United States Patent Application Publication US 2007/0105122 A1 - sequence listing, part 2

SEQ ID NO: 424 - DNA, 859 bp, Homo sapiens
  misc_feature (760)..(760): "n" may be a, t, c, g, other or unknown
  misc_feature (848)..(848): "n" may be a, t, c, g, other or unknown
aaaacgtttgtatctcaagcaagtgctacaatgcaacagtatgcacagagagataagaaacatgaatattggtttgctgtgccacaagaaaggacagatcacttgtatgccttcttcattcagtggagtccagaaatatatgcagaagatactggcgaatataccagagaacctggatttatagtagtaaaaaagattgaggagtctgaaacaattgaggattctagtaatcaagcagcagccagagaatgggagattactacaagggaagacataaattcaaagcaggttgctacagtgaaagcagacctggagtctgaatcttttcgaccaaacctaagtgatcccagtgaacttttactgccagatcaaattgaaaagcttaccaagcatcttccaccaagaacaattggctatccatggactcttgtttatggtactggaaaacatggcacaagcttgaaaactctttatcgaacaatgacaggtttagacaccccagtgctgatggtgattaaagacagtgatggacaggtttttggtgcgttagcatctgagccactgaaagtgagtgatggcttttatggtactggagagacctttgtttttacattctgtccggagtttgaggtctttaagtggacaggagatgatatgttttttatcaaaggagacatggattcactagctttcgtggtggaggaggagaatttgcgctttggcttgatggagatctctccatggaagaagccattcttgnaaaacgtttggaatcgacactttctaagaaggaagattcttatccagatatgaaatctggcttttgaataataaaagctcttgcttanaggagaaggcc

SEQ ID NO: 425 - DNA, 760 bp, Homo sapiens
  misc_feature (720)..(720): "n" may be a, t, c, g, other or unknown
  misc_feature (726)..(726): "n" may be a, t, c, g, other or unknown
  misc_feature (745)..(745): "n" may be a, t, c, g, other or unknown
gaaacagaaacagaatgcatggctgctcaaaaagagtatctttttgtgctttcttgagggagagggttgtggaggggaaaccctccaactcgggctggctaacagggatgcttccttatgaaacgtgctcacctaagaataccagtgagaccatcggcactttctgtaattggcagcaatagagctattagaagaaacatgaaagagatagatggatctgaaatcaacatttgtaacaaaaggcctcaccatgttccccagcacaaatgtgctactgattagcagctaaaatgtgagcatccctactcaaattcaccctgttctccccatcctgaaggttctgatattaatgcataacattgtagcttataatgcttttacttaacattatcttattcatgcatcatcagagaatgatctaccaaaatgtatggagagaaagctaaaaatgtaaagtggctgttctcaatcttagctacatattagaacaacttggggagtttttaaattctgtgataaccacactgccctcagaccaatccgaattctggggcttaaatccaggtggagtgctagccacatgtagagcagctttctgctttcatatatatctgggcttaggcctcggtgagggttgggaagggcctatgacctctgaagagccttcacattacagcccaggaacagctggcccacagcaggagagatgcagagcctgangtgganggccaagcctggggaatanggggtgctttgaaaa

SEQ ID NO: 426 - DNA, 877 bp, Homo sapiens
  misc_feature (743)..(743): "n" may be a, t, c, g, other or unknown
  misc_feature (872)..(872): "n" may be a, t, c, g, other or unknown
  misc_feature (874)..(874): "n" may be a, t, c, g, other or unknown
actcttgctgtactacaaagagatagaatcaaactgctttttttcgacatactggtttttctttctgtttttcttctccttcttctatttcttgtggatattatggctaataacacaacaagtttagggagtccatggccagaaaacttttgggaggaccttatcatgtccttcactgtatccatggcaatcgggctggtacttggaggatttatttgggctgtgttcatttgtctgtctcaccttccggcgacaagcttccctggaacaagcaaattcctttccaagaaaatcaagtttcagagcttctactttccatccctttctgcaatgtccaccacttcctgtggaaactgagagtcagctggtgactctcccttcttccaatatctctcccaccatcagcacttcccacagtctgagccgtcctgactactggtccagtaacagtcttcgagtgggcctttcaacaccgcccccacctgcctatgagcccatcatcaaggcattcccagattcctgagtagggtggcttttggtttttgtttctttcttgtcttgtcttttattgaaaggaaatcaaaaataggctaaacagaattttgagggcatggcccaaataactcatgagttccaagttgaaacatggttgtgcaagttggacattacaatgtttttagtagagatgaagtgtcactatgttaccaaggctggtctcaaactcctaaactcagatgatcctnctgcctcggccttccaaagtgttggaaattagcctggccaatcttggattttaatgggaaatgtgggccccaaaatgaccgaacataggacattctaaagttccttggattggatcattataagaaagngnggg

SEQ ID NO: 427 - DNA, 866 bp, Homo sapiens
  misc_feature (660)..(660): "n" may be a, t, c, g, other or unknown
  misc_feature (722)..(722): "n" may be a, t, c, g, other or unknown
  misc_feature (755)..(755): "n" may be a, t, c, g, other or unknown
  misc_feature (816)..(816): "n" may be a, t, c, g, other or unknown
  misc_feature (838)..(838): "n" may be a, t, c, g, other or unknown
atttatggtggtagctttccaaaattatatagatacctcttacacaatctcaagctcttacagcaagcttgtccagcctgtggctcgacacaagtttataaactttcttaaaacattgtgagtttttttattttttattttttttaagctcatcaactatcattagtgtattttatgtgtggcccaagacagttcttccagtgtggcccagggaagccaaaagattggacaccccttataacatcttagaagttttaaataattatcttcatatccacatagctttacaaaagctcacgacagggagagcattttcttggttctgtagtaatttcagggggtttactgattggaacccttccttttcctcctctctccagtccagctggcattcagtcctttaaacaatgtggctatgcagtacttttgattactaatgacttctattaccttcttccccattgtgtacagatgggagaatcctcagcacaagtgtctactactattggatggacagcggcagatgttcacagcgcgtcatgattaattagtttaaattgcaaggttctatctgtgaggtagctcaggtagatttaagggcggtagacatgaactgaagtcacgtttgcgcagcggctctaggtatacacttcacattgnttctttgcaggtcgcacagcattttaatctgcgcccgcaatgcacaatgcgcgcatgcttgnctgccagtggaagcttcatgaacaaaagatagnaattatgccaataaatggtgaaagacttttggatatttatccaattatttataaatataanggcttggaaagaatggccatgntgaaatttgaacaaattggaagtttttt

SEQ ID NO: 428 - DNA, 765 bp, Homo sapiens
  misc_feature (682)..(682): "n" may be a, t, c, g, other or unknown
  misc_feature (695)..(695): "n" may be a, t, c, g, other or unknown
  misc_feature (728)..(728): "n" may be a, t, c, g, other or unknown
taatgcaactaaaatgttctcgggtttagtaccaagcgtactagtatgagaggcatgagatgttccggcagtatttacacctaattttatgagatttccaaaacttgatgatttcaggtccttcgcaacatggtacactgtgcagacctgagcaaccccaccaagtccttggaattgtatcggcaatggacagaccgcatcatggaggaatttttccagcagggagacaaagagcgggagaggggaatggaaattagcccaatgtgtgataaacacacagcttctgtggaaaaatcccaggtatctaatatgagattttcaaagtttttgtgagctctgctgattatagagctggagggttctatttaattccgtttttccaatagaatatgtatatatgaaacaataaggagacaactacgcattttgttccattatagtcaggactcatgcgacttctccattacactcagtttcacagggtggggaaaagtagtcatcagaaacccatcaaaatttggactatgtgtccctaaatcatttagatagttgtctctgatgttagcaaatccagctgaataatatgaacatcagtgtctcctccatcccaaccctctggatttctcctagctctgtcttcattcaagaactctactcctcatccttgcttccagccctctgnttttatcttctgnccttaatcaagcccatggtgaccatcaccagangcagtctcttttactgcatagtcaaagccctgtcttg

SEQ ID NO: 429 - DNA, 848 bp, Homo sapiens
  misc_feature (741)..(741): "n" may be a, t, c, g, other or unknown
  misc_feature (828)..(828): "n" may be a, t, c, g, other or unknown
  misc_feature (834)..(834): "n" may be a, t, c, g, other or unknown
  misc_feature (842)..(842): "n" may be a, t, c, g, other or unknown
aaagcaaaaaaattagtagaaatggaaagagaacatgaaaaatcacttagtgaaattagacagttaaagagagaacttgagaatgttaaggccaagcttgctcagcacgtcaaaccagaggaacatgaacaggttaagagcagattagaacagaaatcaggagaacttgggaagaagatcactgagttaacattgaaaaatcagacactacaaaaggaaattgaaaaagtttatttggataataagctcctcaaggagcaagcacataacttaacaattgaaatgaaaaatcattatgttcctttaaaagtaagtgaagacatgaaaaagtcacatgatgcaattattgatgatcttaatagaaagcttttagatgtaacacaaaaatatacagaaaagaagttggaaatggagaaattgctactggaaaatgacagcttaagtaaggatgtaagccgcctagaaactgtgtttgtacctcctgagaaacatgaaaaagagataatagctctgaaatccaatattgttgaacttaagaaacagctgtctgaacttaagaaaaaatgtggtgaagaccaggagaaaatacacgctctcacatctgaaaacactaacttgaagaagatgatgagtaatcagtatgtgccagttaaaacccatgaagaggttaaaatgacactgaatgacacgttagccaaaactacagagaattattagatgtgaagaaaaaatttgaggatntaaatcaggaatttgtaaaaattaaagattagaatgaaattttaaaaagaacctggaaaacactcagaaaccaattaaaactgagtncattancctggcanacccca

SEQ ID NO: 430 - DNA, 832 bp, Homo sapiens
  misc_feature (768)..(768): "n" may be a, t, c, g, other or unknown
  misc_feature (817)..(817): "n" may be a, t, c, g, other or unknown
  misc_feature (831)..(831): "n" may be a, t, c, g, other or unknown
ctagaagagttccggtccgattctgcgaaagaggaagtgagagaaagcgcgtactaccttcggtctaggcagcggaggcagccgcgaccccaggaaaccgaggaaatgaagacgcgaaggactacccgccttcagcagcagcactcagagcagcctccgctacagccgtctcctgttatgaccaggagagggctgcgggactctcattcctctgaagaggttgaagcatcttcccaaactgatttaagccaaacgatctcaaagaaaactgtcaggagcatacaagaggctccagtgagtgaagatcttgtaatcaggttacgtcgaccccctctaagatacccaagatatgaagccaccagtgtccaacagaaggtcaatttctctgaagaaggagaaactgaagaagatgatcaagacagctctcacagcagtgtcactactgttaaggccagatccagggattctgatgaatctggagataaaaccaccagatcatctagtcaatatatagaatcattttggcagtcatcacaaagtcaaaacttcacagctcatgataagcaaccttcagtgctaagctcaggatatcaaaaaactccccaggaatgggccccacaaactgcaagaataaggaccaggatgcaaaatgacagcattctgaaatcagagcttggaaaccagtcaccatcaaccttcagcccgacaagtgactggacaaccccaaaatgcatcttttgtcaagaggaacccggtggtggctacttnctctggatagctgctcttggcttttgggaagtttttgggttctttaagnacttcctggaggtng

SEQ ID NO: 431 - DNA, 603 bp, Homo sapiens
  misc_feature (468)..(468): "n" may be a, t, c, g, other or unknown
  misc_feature (575)..(575): "n" may be a, t, c, g, other or unknown
  misc_feature (581)..(581): "n" may be a, t, c, g, other or unknown
  misc_feature (594)..(594): "n" may be a, t, c, g, other or unknown
ggagaatgctgatagaatggtatttttggatcaagataggagggtgtgatatgggaacttctagtccccccctttctcaggagagagctgtcttttgaagaaatccatcgcacgaaaagcaggcgagagaggggaaacctgacattgtttgagcccctgcagtcagctgccatcaaagcctttgacttcgcatgacttgaaccactgaatcattttttttctttttttttttttttgacagagtctcgctctgtcacccaggctggagtgcagtggcacgatcttggctcactgcaacctgcgcctcttgggttcaggcggttctcgtgcttcagcctcccgagtagctgggactacaggcacccgccaccacatctggctaatttttgtatttttagtagagacaggattttgccttgctggccaggctggtcttgaactcctggccttaagtgatccacctacctnagcctcccaaagtgctggaattacaggtgtgagccaccacacccggcctgaattgtcttttatctcaaggtccttcattgctactcaaagtgtgctccacaacccancacagncacatcatcgganagcttgcta

SEQ ID NO: 432 - DNA, 880 bp, Homo sapiens
  misc_feature (769)..(769): "n" may be a, t, c, g, other or unknown
  misc_feature (782)..(782): "n" may be a, t, c, g, other or unknown
  misc_feature (816)..(816): "n" may be a, t, c, g, other or unknown
  misc_feature (880)..(880): "n" may be a, t, c, g, other or unknown
gttacccagtgcccaagggcagtcttgatattatcattctcatatttgttctttcagcaattgttccagacaagatgcagaaggctatcaacaggctgagcaggcttctgaaacctggcgggatgatgcttctgcgagattacggccgctatgacatggctcagcttcggtttaaaaaaggtcagtgtctatctggaaatttctacgtgagaggtgatggaaccagagtttacttcttcacacaagaggaactggacacgcttttcaccactgctggactggaaaaagttcagaacctggtggatcgccgactgcaggtgaaccgaggaaagcaactgacaatgtaccgggtttggattcagtgcaaatactgcaagccccttctgtccagcaccagctgagaggcacctgctgccaacacgatgcaagcccattgtgtttccgggctttttttaaaaaaaaaattgtagcactgggcgtggtgcatgcctgtaatcccagccactcaggaggctgaggcggggaggatccattgagcccagcagtccaacctgggcaaaatagtgagagaccctgtatctgaaagtaataataaaaataaaaaatataaatgaggtctcgttgatgttggacaattcaagaattcagacttgaaccttaaacctaggaaaagttactttgtatcaggattctaacaattatgcttcatatttgtgaagtcctttaaaacataattttctcaagttctttctttgagatctcaatctgncttaacattttgnaactaataactgaaattttattcaaaggaattgnaaaccttaaaccccccaatttatttccatgtgaaaaagtgttacatatgacaagtgttttttgn

SEQ ID NO: 433 - DNA, 840 bp, Homo sapiens
  misc_feature (756)..(756): "n" may be a, t, c, g, other or unknown
  misc_feature (771)..(771): "n" may be a, t, c, g, other or unknown
  misc_feature (792)..(792): "n" may be a, t, c, g, other or unknown
gttcagctaagtactagggaggcttcattagtcatgaggatgtttttatatataaatgtagcaaacatatattacagttttcactgtgtaatagattatccataataattcataaatattcctgctgaagttagtttgtaacttcaagtcaaagatgaaaaatatcaatggtgaagattgattgttcatatagagaggacgttttttttccagactgtaaaactgaatcttgttgaatttaaagagaaattctggcagaggcagatgaatcacctgaggtcaggagtttgagaccagcctgatgaatatggtgaaacccagtctctactaaaactacaaaaatagccaggcatggtggtgggtgcctgtaatcccactcgggaggctgagtcaggagaattgcttgaacccggaggtgaagattggagtaagccaagattgtgccgttgcactacagcctgggcgacagagcgagactccatataaaaaaaaaaaaaaaaaaaaagctgggcgtggtggctcacacctgtaatcccagcactttgggaggccaaggtgggcgaatcacttgaggtcgggagtttgagaccaggtgaccaacatggagaaactccatctctactaaaaaatacaaaattagcccggtgtggtggcgcatgcctgtaatcccagctactcgggagactgaggcaggagaatcgcttgaacacgacaggtggaggttgcagtgtggcgagattgcaccattgactccantctgggcgacagganggaaactcatctgaaaaaaangagaaattcttttatttctacttctcttcaaattggcttatgcatttt

SEQ ID NO: 434 - DNA, 912 bp, Homo sapiens
  misc_feature (811)..(811): "n" may be a, t, c, g, other or unknown
  misc_feature (819)..(819): "n" may be a, t, c, g, other or unknown
  misc_feature (836)..(836): "n" may be a, t, c, g, other or unknown
ttctaatgcttttaaggttccttttcagcccttcctcctcgtaatccacaaatactgagaccaaggcattttttgggtcagtcctaatttcaagcattctatcctgccctccccaaatgaactcacacttattagaccatatgttcctatattagttcaggaagggggaaaaaatgttcatcacacttgtatataagagatcatagaaaaacagtttactaacctgtgaaaataccattcattctctgtttacctctggtccacagctaagcaatcagtaggatataaatgtaccctatgttcactattcagtattcataagtatactacttatgaattggaaatctgacacaacatttacatgacctaattttgaaaatttaaaatagtgtaaggcccctaggcttaattttacaggggaaagattaaaaggacacaagcaaacatatattctctctctgtgctgtgggacactggtaattttttgacttaaaatatttgatacttaaaatgccaaacttctacatttctgcagtaacaaggcagttatcatattgaataccatttctttctctccagtaagtaaatattagcacatgaactgaaaatattaagtgattataaaaaagtccaaataaattcattaaaatttagcttggcaaaatgttagtttcatgttcttggtagaagtccttttatatttatattcaaatgaaatgaaccaatttacaagccaaaggaaatggcatcaaatattttgacacccctggcttcccaagggggtattggattcaatgcctttttggctcanaaatctanggtttcttccacttcanggaaaaaggagggagaaatgtacccccatacctttggggaaaaaccaagttttccgatgggccccagctttttgaa

SEQ ID NO: 435 - DNA, 791 bp, Homo sapiens
  misc_feature (164)..(164): "n" may be a, t, c, g, other or unknown
  misc_feature (666)..(666): "n" may be a, t, c, g, other or unknown
  misc_feature (705)..(705): "n" may be a, t, c, g, other or unknown
  misc_feature (752)..(752): "n" may be a, t, c, g, other or unknown
  misc_feature (789)..(789): "n" may be a, t, c, g, other or unknown
attttgttcctcagtaagagaaataaagaaattcgcagccctttgttttaagaagggagtgttttacatgctttttttgcttttttttttttttctcctaccctagcgatgacctcttccaggtagcggtcccttgtgcgcggttggtagtacccagggcttanagcgagcgcgcacccggggctgcggtggaggctcctctgtgagctctacctgcctcccatcccgaggcctaggagaaggcgggtacctggccgccagctgacgccctggtggtcactgtggccctttagaaacacacagctccatttcataagcaaaacctcctcccccagccccggctcaagcaccattcacactgccatccaagccgcgggcggccgtggaaagggcactggaccacccgtctcgcgggcgccgtgaggtacagcgatggctcccagtgccgggcagttcaggtgacaggagctttccaaagacacctagggtccaaaaagcagggttcccatctcacaatttggatttgctcatagaggagcagataggacaggctgctcacatttctcctttgaaggcacttccacagtggactgtcgctggcgggcccctgggcggtgaccatcggtgccccgggagacagcgaggaattgaccctttggtcactgngtaagcccccactaggctgctgctctttccaaagggaangggctgggggaaccaggaaggaagcccacccccacacctgcatctgnctgggttcaaccaggtaaagggacttactgggatcgngg

SEQ ID NO: 436 - DNA, 751 bp, Homo sapiens
  misc_feature (74)..(74): "n" may be a, t, c, g, other or unknown
  misc_feature (77)..(77): "n" may be a, t, c, g, other or unknown
  misc_feature (399)..(399): "n" may be a, t, c, g, other or unknown
  misc_feature (576)..(576): "n" may be a, t, c, g, other or unknown
  misc_feature (657)..(657): "n" may be a, t, c, g, other or unknown
  misc_feature (725)..(725): "n" may be a, t, c, g, other or unknown
  misc_feature (743)..(743): "n" may be a, t, c, g, other or unknown
aggtgggggccggggcgggatggctgcagcggcggccggggccgggagcgggccctgggcggcccaggagaagnagntcccgccggcgctgctgagtttcttcatctacaacccgcgcttcgggccgcgcgaaggacaggaggaaaataagattttattttatcatccaaatgaggtagaaaagaatgagaagattagaaatgtcggattgtgtgaagctattgtacagtttacaaggacatttagcccatcaaaacctgcaaaatctttacatacacagaagaacagacagttcttcaatgaaccagaagaaaatttctggatggtcatggtatttacacacacagtgtatctttctgaaattgtatggtgaagttatgggtgatctttactgttcanaatttaggaaagttctctggctgttgcatccaagtaaaattaaaataaaattggttgcaattttaaaatcaagttcttcctatttgctttattcattcttggggctgttttaagaagttgtgtttctggtgctgtagcatgttcaaagtttttaaattaaggcaagataaacatggnctaatgaattcattgtataatttcaagtttatcaaactttgtaggttgttcggaatcctataattgaaaaacagagttcanatggaaaaccagttattgaatatcaagaggaggagttgtttggtaatggtgtcattggttgtttaatnatttatttttttaaatgnattgctga

SEQ ID NO: 437 - DNA, 780 bp, Homo sapiens
  misc_feature (695)..(695): "n" may be a, t, c, g, other or unknown
  misc_feature (753)..(753): "n" may be a, t, c, g, other or unknown
  misc_feature (759)..(759): "n" may be a, t, c, g, other or unknown
cttccttctagcagaaatggcggctgcggcggctcgagtggtgttgtcatccgcggcgcggcggcggctctggggtttcagcgagagtcttctaatccgaggcgctgcgggacggtcattatattttggagagaacagattaagaagtacacaggctgctacccaagttgttctgaatgttcctgaaacaagagtaacatgtttagaaagtggactcagagtagcttcggaagactctgggctctcaacatgcacagttggactctggattgatgctggaagtagatacgaaaatgagaagaacaatggaacagcacactttctggagcatatggctttcaagggcaccaagaagagatcccagttagatctggaacttgagattgaaaatatgggtgctcatctcaatgcctatacctccagagagcagactgtatactatgccaaagcattctctaaagacttgccaagagctgtagaaattcttgctgatataatacaaaacagcacattgggagaagcagagattgaacgtgagcgtggagtaatccttagagagatgcaggaagttgaaaccaatttacaagaagttgtttttgattatcttcatgccacagcttatcaaaatactgcacttggacggacaattttgggaccaactgaaaatatcaaatctataagtcgtaaggacttantggattatataaccacacattataaggggccaagaatagtgcttgcttgctgctggangtgttnccatgatgaattgcttgctta

SEQ ID NO: 438 - DNA, 872 bp, Homo sapiens
  misc_feature (867)..(867): "n" may be a, t, c, g, other or unknown
gataaatctatgctagagggtataaaagaaacacaaaaatagaggtatgccatgtataagacccaacataataaatagttctaccaaattaatttataaattcaaagcaatttcatataaccacagtaaagctttttaaatggatgtaataacctgattataacattaatctgaaagtcatcaggcataaagcaattttgattacatctcaaaacaatccatggagttagggtaaatgtgctgttcacacaggaataatcacaggtatagaaccgagaacctaggaacagagcaatgtatatatatatgtatttaaaaaatggcatcacaagtcagtagagaagggtttgaactattcagtaaatgatgttgaggttatttactactttttcttatttcatatcatggatgaaaaaaatcaagatgaattaaacatggaaattaaaaataactagaagaaaatactggaaaaaaattgtaataaatgtgtaagaaaggcattcccaaccaagacacaaaacccagtagccatgaaaaaaaagatagatttgactacatttttaaaaagtaaaacctttcactttttacaaaactttgataaaattagatttcataaataaaggagtgggaaaatacatgtaatagaacagaagatttaagataatataaagagcacctacaaacacaaaaattggacaaaggctataaaaatattttataaataagaaatacagactataaacataaactttcaacctcgtagcaatcaggaaaattaaaggtaaaatgagatactatttttcaatacttggaaatggcagattttaaagattggtgatagtgccggagatatgtgaggaaagagtntctcc

SEQ ID NO: 439 - DNA, 863 bp, Homo sapiens
  misc_feature (790)..(790): "n" may be a, t, c, g, other or unknown
  misc_feature (811)..(811): "n" may be a, t, c, g, other or unknown
  misc_feature (840)..(840): "n" may be a, t, c, g, other or unknown
cataattttctatctatggtacccttggcttctgcctggcttctgaggcttagggaagggaggaagggacctacaaagagccagggtacacctgcctcttgtgctgagggcacgtgccagcttctctgccagtaagccttttgctagctaacatttcccaccctcccaaggcccctaacctgccctcccctctccactatgttagtatatctacctctgtttctgactctgaggaagggtcaggccacacggagggaacagtagtgggtaccagcctcccctctgctgtccagtccaccacatcaatctcttcctcttcagagctggcaggaagtgagcctagtagttcagagtgaccagatacctccttgcctgccttgggagaagggtataataactcatctgtagtcaaggagacttccagcccagtctccacccagtttgagcagggaggtgagaggtccccataagacctctggggagtatcaagggagctgacatggagaagtttgtcttcctgaccatccagtggctgggagctggtaatttcaaggtctggtgtccaacggcctcctactgaaagcacttcactcacctcagagggcatgacaagggggctaaggagctcagttggccctctgttctcaccagcaggttccttttccaattctgtgagctccctgggccagagttccatgtctggtagacaccattcttcccttcaatccagtctttcctggttctgcagatggtaggtaggcgttctgcaacccttaaccccctggaactnttcaaaagacccttatagggngggttcaatggtctgaacccccagaaccntgaaagtccaggatcttctttca

SEQ ID NO: 440 - DNA, 640 bp, Homo sapiens
  misc_feature (339)..(339): "n" may be a, t, c, g, other or unknown
  misc_feature (424)..(424): "n" may be a, t, c, g, other or unknown
  misc_feature (571)..(571): "n" may be a, t, c, g, other or unknown
  misc_feature (596)..(596): "n" may be a, t, c, g, other or unknown
  misc_feature (626)..(626): "n" may be a, t, c, g, other or unknown
atccatggcacggagcggcggcggcggcggcagcaggagcccggcgcgatccgctaggtcccagcccagcgcccagcgagcaggcgacgcggaggggccgggcctccagtgtcccgagggccgggcgctgagactccggccgcgcagctgggagctgcccgcgctgcgctgacagccgcgccgacgtcctccccgccggggcgctcgcaggacatgcccccggggcgcggcggcggggaccccggggctcgcctccgcccagggcccccctccacgccctcgggagccccgggcccccgctgagcactcctcccgcacgcctgggtccctccggccggngcgcagcccggccccagcgctgtgggtccccgcggggcgatgggttgatgggcgccgggggacgcaggatgcggggggcgcccgngcgcctgctgctgccgctgctgccgtggctcctgctgctcctggcgcccgaggctcggggcgcgcccggctgcccgctatccatccgcagctgcaagtgctcgggggagcggcccaaggggctgagcggcggcgtccctggcccggnttggcggaaggtggtgtgcagcggnggggacctcccggagcctcccgaacccggncttctgcctaacgg

SEQ ID NO: 441 - DNA, 823 bp, Homo sapiens
  misc_feature (747)..(747): "n" may be a, t, c, g, other or unknown
  misc_feature (789)..(789): "n" may be a, t, c, g, other or unknown
  misc_feature (809)..(809): "n" may be a, t, c, g, other or unknown
cctcagtgtaggagtgatctgaagcaggacaagctcagcctgcagctgccgtgggctttgtgtggactggacgcagagcttgggagacgggggagggctattactccaattcactgtcaatggaattacagctatagcggcagtgtatataggattgctttttctcgtcttcctgggttctgaagtaacggaagctaccttgtataaagacctcaacactgctgaccatgatcagcgcagcctggagcatcttcctcatcgggactaaaattgggctgttccttcaagtagcacctctatcagttatggctaaatcctgtccatctgtgtgtcgctgcgatgcgggtttcatttactgtaatgatcgttttctgacatccattccaacaggaataccagaggatgctacaactctctaccttcagaacaaccaaataaataatgctgggattccttcagatttgaaaaacttgctgaaagtagaaagaatatacctataccacaacagtttagatgaatttcctaccaacctcccaaagtatgtaaaagagttacatttgcaagaaaataacataaggactatcacttatgattcactttcaaaaattccctatctggaagaattacatttagatgacaactctgtctctgcagttagcatagaagagggagcattccgagacagcaactatcttcgactgcttttcctgtcccgtaatcaccttagcacaattccctggggtttgnccaggactattgaagactacgcttggatgataatcgcatatnccctatttcatcaccatctnttcaaggctcacta

SEQ ID NO: 442 - DNA, 852 bp, Homo sapiens
  misc_feature (752)..(752): "n" may be a, t, c, g, other or unknown
cattccaaatggtcaacattggctcaacactgagtgagaagaaaaggcagaagaaaaccaaagggcagaactgatagcttcaggtcagtctgagtgcagaatgaaagactcagctgtttttattatttccagcttgttgaccttgctatacattcacagaagtttgaacttttctagataatcagcaaaacaaagcaagatgagaagagagtttgaagggtttgtttaggctcctctttgtagacttagagcagcagtttcaaaattcagttccagcagcatcaggtcacctgggaacgtgttagaaatgcagattcttgtgccccattcaggcctactgaaccagaaactggagagtggggcccaggaatctgtgggctaatttttttttaatgttgtagttatatatataaaacatagcattttctattttaactgtagaattcagtgacattcacagtgttttacaaccataaccactatctgtttccaaaactttttcatcaccccaaacagaacctttgtaattattaagcaataattcctcactccctccaatccccagccccagataacctctaatctccttctgtctctatgaatttgtctattctagatgttatgtacaagtggaattatgtggcctttttagtctggtttattttgcctagcagaatgttttcaagggtcctacatgttttagtatatagcaatacttcgatactttttatggctgaataatattccattgnatggctataccatggtttggttatccattcatctggtgatggatgcttggggtggtttcaccctttggctattggggaataatgctgaaatgaacactgc

SEQ ID NO: 443 - DNA, 834 bp, Homo sapiens
  misc_feature (143)..(143): "n" may be a, t, c, g, other or unknown
  misc_feature (703)..(703): "n" may be a, t, c, g, other or unknown
  misc_feature (767)..(767): "n" may be a, t, c, g, other or unknown
  misc_feature (815)..(815): "n" may be a, t, c, g, other or unknown
  misc_feature (829)..(829): "n" may be a, t, c, g, other or unknown
agggcaatacagtttttgtaaaattttacaaaaattggactccccccattgaaacactgtactttgaaagaaacttcaaattcagcatattttttaaaaatctggatgatgactcgttttctttctttcaaaccttttaattncgacaacatttagcttaaggcaaattttatctttgttatagctatttcagaacagcttttaaaatgcaatttaaaaaatggcatttagcaagcaattgccttttcaaccttaaccatagagcctcttccatggattccattatattttattaacataagttaaaataggagtgttctgggtttcacaaggattaaagttcctatctaatgtgcatgtaactaaacgcacgtttacgtacataatagctattggtcacagtttgtatgatggtctttcagccagaaaacagggctgcagttcttacagtagtccttgaataatgacgttacattcaacgtcttttcattattgggttatgagaaaaaaatttgattccaggtgggtgcccctgtctgtgtggaatttgcacattctcctcaagtctgtttgggttttctctggatactacagttttctcccacatcccaaacacacgcatcgcatgttaggtttatcggcttgtttaaatggtcctacttttgagcaagtgcgctgtgtgtgtgtgtgtgtgtgtgtgtgngtgtgtgtgtgtgtgtgtgttagtgcaccctgcgaaggggatggcatcctggccagggttgggncctcctttggccctgagcttttgggatgggctctggcaacccttaagnctgactgggaatangcagt

SEQ ID NO: 444 - DNA, 634 bp, Homo sapiens
  misc_feature (619)..(619): "n" may be a, t, c, g, other or unknown
  misc_feature (624)..(624): "n" may be a, t, c, g, other or unknown
  misc_feature (630)..(630): "n" may be a, t, c, g, other or unknown
gttaggattcctggttttaaactagagaaaagaacatgtatcaagaaaatcataaggaagagaaaacacatttacagtactgtactgtatttattggtaccatacatttatgttgctgtttacaagatgaagcatctgtctgaaatggccagcagctacagctgtacctatctactgtacatatcaagcaagtcactttattcttataatgtctatgacttctctctttgaaagcgcttccatcatcactgttggcacttcatatgggtctcatggtgttaaggtttacggcattgcactagacacaatgaaaactacacaagagggccgggcacggtggctcacgcctgtaatcccagcactttgggaggccgaggcgggcggatcatgaggtcaggagattgagaccatcctggctaacacagtgaaaccctgtctctattaaaaataaaaaaattagccaggcatggtggcacgtgcctgtaatcccagctaatcgggaggctgaggcaggagaatcgctttttcccagaaggcgtaggttgcagtgagccgagatcgtgccactgcactccagcctggatgatagagggagactctgtcgcaaaaaaaaaagaanagaanaagaanagaa

SEQ ID NO: 445 - DNA, 852 bp, Homo sapiens
  misc_feature (787)..(787): "n" may be a, t, c, g, other or unknown
  misc_feature (824)..(824): "n" may be a, t, c, g, other or unknown
gatccttttggttctgttcctttcatttctcattcaggcaagttacacatgtaacatcatcactgtcacaaataaaacacacaagaacaacagcaaaatcttataaagtggaagtaagactctgatgttagttagctacagaaagtagaaaatattttaacctttagccatcctactcttcttaatgatgttctttgcattgagttattattcagttgtatctttgccaacatagaaaaatgctgatttacacaatagaaacataactgcttcttttcatctttattattggatactgttgaaaaaaatatttaaagatatttttatacttggcttttgcttaaaaatttgatattttcctagtttgtacatgctctcttgtagatgcattttaaaagtattaatagttttgtatttgtcacaatcactttgttttactcttgtcttcttatatccctcttttgatttcaattcagaattcaaatattgatgtttttcactgttaaaaattttcagtaataatttcaaattacccagttaacacttggaagatactaggatggaataggatcgtgcattggcataaatgaattttcatgtatgtatggttatagtggaaaaaaagagttttaatcttggcaaagggaaatatgttagaagaagttatgctttattagaaggtaaaagttcgatatattcatggtaactgtcggccatgttcttcagttctggtccttttggttctcactcaggcaagttacatatgtaacaccatttgaaaactacngaattaccaccaaaggaaaaacttacaaatgtaaagnccaaagaagaattgagggttaaggattc

SEQ ID NO: 446 - DNA, 853 bp, Homo sapiens
  misc_feature (668)..(668): "n" may be a, t, c, g, other or unknown
  misc_feature (672)..(672): "n" may be a, t, c, g, other or unknown
  misc_feature (769)..(769): "n" may be a, t, c, g, other or unknown
  misc_feature (807)..(807): "n" may be a, t, c, g, other or unknown
gaagcacatctggacagctgtgcggcctccttgcgggccgacgtcagccgagcacgtcccccacgtcctctccttctcgccacttattatttattcgttttcccaaagaagcgactagggacccaagtttaaaaattcctccccccactcaatgcgagacgtggccagatcccatccaacacacggtttaattttcatggggctctgggatcaaaagaacagaaacagcaacaacaaaagcccagccgctgtctgattttaagctggcaaagtgggaaaaataaagtgttgagtaaacagaccaagttggatcatggggaatttcagaggtcatgccctccctggaaccttcttttttattattggtctttggtggtgtacaaagagtattctgaagtatatctgcaaaaagcaaaagcgaacctgctatcttggttccaaaacattattctatcgattggaaattttggagggaattacaatagttggcatggctttaactggcatggctggggagcagtttattcctggagggccccatctgatgttatatgactataaacaaggtcactggaatcaactcctgggctggcatcatttcaccatgtatttcttctttgggctgttgggtgtggcagatatcttatgtttcaccatcagttcacttnctgngtccttaaccaagttaatggtgtcaaatgccttatttgtggaggcctttatcttctacaaccacactcatggccgggaaatgcttggacatctttgngcaccaactgcttgggtttgggccgctttctgacaggncttggtggctttctaaagttccttggtcggacaatggacttttgga

SEQ ID NO: 447 - DNA, 851 bp, Homo sapiens
  misc_feature (794)..(794): "n" may be a, t, c, g, other or unknown
  misc_feature (845)..(845): "n" may be a, t, c, g, other or unknown
  misc_feature (851)..(851): "n" may be a, t, c, g, other or unknown
ggtaatccttgaaatatttaaattataggtcacatttgaaattctgcttagccgtttgtatgtaacttggtaagaactaaatgaattaccgcattttactcaggttgttttcttgaggtaataacattatagattttgtaaaaagagaaaaaagtattagaattatcttaacattaggcttccctaagtactctttctgagttaaccaattgctttttaaattatagctttatcagctacccctctaaaaatcatgcttcagtagatttttttatagggtgtacagttctatactttgaaaagctcctggaataattatgatattgcaaacagattttatcataacacttttcattagttttgccatatgcacgtcctttgttttatcctatgacatgtttcagaattcttttattgagttctttgtgaaattttccttaaaactttcctatgcagatgatcacaaatcatatttgagtttaaatacaagtttgtttgtttgtttgtttagagacggggtcttgctgtgctgcccaggctagtcttgaactccggggctcaagcaatcctcccacctcagccttccaaagtgttgagattacaggcatgagccaccacaccctagcctaactacaagtatttttgacaggtgattttgaaattttgggggagctaatgcaagtaaactactttacttggtgacatttgacactctaaattttaactggcaaatactttagatatggaccaagaagatgcattaatttgctttgaagaacacattcgggctttanaaaaggaggaagaagaagaaaacccgaagagttgctgagagaaaggagacnaccgcn

SEQ ID NO: 448 - DNA, 687 bp, Homo sapiens
  misc_feature (640)..(640): "n" may be a, t, c, g, other or unknown
  misc_feature (654)..(654): "n" may be a, t, c, g, other or unknown
  misc_feature (662)..(662): "n" may be a, t, c, g, other or unknown
acttgctttttctcccgctttgtaattgtaggagaaaaccaaagaactagcagagaagcaggcgcaactgagcccatctcgctggccagctgcgccatggctgatctggttccagacttgcagcccattcttttctggatgtctaactccatcgagctcctgtactttatccagcagaaatgcccactctacatgcagagcatggaggagcagctggacatcacaggctcgaaggaatcgctgttctcctgcacgctgacggccagcgaggaggccatggcggtgctggaggaggtggtgctgtacgccttccagcagtgcgtctactatgtctccaagtccctgtacatctgcctcccggcactcctggagtgcccgccattccagacggagcgccgtgagagctggtcctcggcccccgaactgcccgaggagctgcgccgcgtggtgtctgtgtaccaggcagccctggacctcctgcggcagctgcaggtgcaccccgaggtggcctcgcagatgctcgcctacctcttcttcttctccgggacactgcttctcaaccagctcctcgacaggggcccctccctgagctgcttcactggcccagaggtgtccaggcctgcgccgcctgcagcagctnctggagtggatgcngagcgccngcttcggggcggctggagagcactt

SEQ ID NO: 449 - DNA, 874 bp, Homo sapiens
  misc_feature (802)..(802): "n" may be a, t, c, g, other or unknown
  misc_feature (813)..(813): "n" may be a, t, c, g, other or unknown
  misc_feature (852)..(852): "n" may be a, t, c, g, other or unknown
ccaatatgaggaggaagactccgtaaatccaacaaacaggagaattagcaccaaaagaacttaagatcttaacagaatggtttcaaagaaaatgtagtatatgaagtcaaaagctcaatggacttgctaaatagcaaattagttaaaattcaatgaataagttaaaaacagcttaagaaaagaattagcgtttgaggctgccatgagcctcaaacatccagccttttatctctctgtagcataaagagataaaaaaagtagaaaaaattataggaaggttaaatattggaggactgaatgagaaagtcccacatacatctcataaggaatctagaacaagagagaaaataagaaaactaatttcaaaatgaaaatagatgagaattttccagaaattcaatttcattcctcaaattaaagaagcacaacacatccccagcaagttaaataaaaataaatccacagacatctccagtgaaactcaataccaaattcaaagatacaatcttaaaagaaccaaagattacctagtatgaatgcagactggcatcatgttttttgcaacatcaggggccagatgacaatggaataaagtaatatctttgaagtaatgagaaaaaatatcaatctagaattctatacccaccttagctatttttaagagtaagggtaaaataaaatttcactcttgcagaaaggacacccaactctagagttagaaaaccggtaacccaaaaattaaggtgggactcaaaggactaaaaatatggttggtaaaatcttaaatcagcaatggactgcntaaaaccaccnttaataggttaaccttaaggaagttggttaaggataaanggtaaaaatactaggccaataa

SEQ ID NO: 450 - DNA, 746 bp, Homo sapiens
  misc_feature (593)..(593): "n" may be a, t, c, g, other or unknown
  misc_feature (695)..(695): "n" may be a, t, c, g, other or unknown
  misc_feature (698)..(698): "n" may be a, t, c, g, other or unknown
  misc_feature (728)..(728): "n" may be a, t, c, g, other or unknown
acagctagggctgctcagtaactgccccaaccactaccacgtccccaagtgcaacgggacccacggaactacaggtgtggggcagggtgagcgtggaagaagggacgcggatgggggtgcgctttgcagacgatctggagactgctgtgtgttgagggaagatacgaagtcgcgggagcagttggggactcaatgtgtgggcaacaagggtcctgctgagctcaggagctgcacggaatggtggcagtcaccttgccagtgcagcaggcatggatcagactgcaagctaggggcacgaggcatcagttgggaagaggggacgcacagctaggcttgaggcctcttcatcgggatgtccccaggccccccagcccaggcccagcataaaggccgtgttggggggcccccctgacccaaggggggcttcatgcgccacgtgcaggcggagccgtctccatcctcagagccggaggctggcccttcacagcctccagtcaggcagggggccctccagggtggcctgctcatgggctacagcccatcagggggggcgacatcccccggggtctaccaggtatccatcttttcccctncggctggtacctctgagcctcatagggccctgaaacgacaagccccatccacttgagggttccccgggagcttaaaaaaagcccttgggcttggggggccanaanaagggacttaccccccttggaagaaacccnttttacttgggggggctt

SEQ ID NO: 451 - DNA, 787 bp, Homo sapiens
  misc_feature (719)..(719): "n" may be a, t, c, g, other or unknown
  misc_feature (760)..(760): "n" may be a, t, c, g, other or unknown
  misc_feature (763)..(763): "n" may be a, t, c, g, other or unknown
aggagcttgcagtagcgggcggcagagctggagtgaagggagctagtgtttaggtagcagtcaccattatgctcaaagcggtgatcctgattggaggccctcaaaagggaactcgcttcagacctttgtcttttgaggtgcccaaaccattgtttcctgtggcaggggtccctatgatccaacaccatattgaagcctgtgcccaggtccctggaatgcaggagattctgctcattggcttctaccaacctgatgagcccctcacccagttcctagaagccgcccagcaggagtttaaccttccagtcaggtacctgcaggaatttgcccccctaggcacagggggtggtctttaccattttcgagaccagatcctggctgggagccccgaggcattcttcgtgctcaatgctgatgtctactccgacttccccttgagtgctatgttggaagcccaccgacgccagcgtcaccctttcttactccttggcactacggctaacaggacgcaatccctcaactacggctgcatcgttgagaatccacagacacacgaggtattgcactatgtggagaaacccagcacatttatcagtgacatcatcaactgcggcatctacctcttttctcctgaagccttgaagcctcttcgggatgtcttccagcgtaatcagcaggatgggcaattggaggactcaccagcttgtggccaggggcangtaccatccgctagacaggatgtgtttcagcctgcaggcanggncagattacgtgcatctactgatgg

SEQ ID NO: 452 - DNA, 784 bp, Homo sapiens
  misc_feature (699)..(699): "n" may be a, t, c, g, other or unknown
  misc_feature (749)..(749): "n" may be a, t, c, g, other or unknown
  misc_feature (766)..(766): "n" may be a, t, c, g, other or unknown
atttatttcctgcttacaaggcagtcttcagcatgtgtatgtccatgtggtcattcagggatccaggctccttgtgttttctggctccacctcaccctagttcctaatcatcatccatatccacctgatggaatagaaaatagcgtgaggtgtgttcccaggaggctttgcatgggttagacctggaaggcaaacacatcacgtctgcttatgttccatctggaaaaacatttgagttgccacagcaaattgctagtgagaatgagagatggagttccctgtgtctccaagaagggtatgactttggcagagcagctcttctgttccctgacttctctttctcctgccagaacccagcaccgagagggaccatcagaggatgttccatgagaacttggtgagggttgtggagaggttggctggtgcttctccgtcttcatacagatgtccagacaggggaccagaagtctcaggtctgagctctacctggaagcccctcacgtctgtagccatcaaacctccagataagacgagccctgaagcattttggttgcatcagaaaacagatggaaggccagtcttcacagatgcatatacttcatcctggcttccacccacagaggttgcatctgtgcagaaattcatcccagagcaccaggcaggtgggtgtcaactcctgctgagatttcgctgtatcangaaactcatgcatctggtgcagatgtcccggagtggctctgacagtccanggcttgggcagtggganacctgatgacagccttga

SEQ ID NO: 453 - DNA, 851 bp, Homo sapiens
  misc_feature (759)..(759): "n" may be a, t, c, g, other or unknown
  misc_feature (851)..(851): "n" may be a, t, c, g, other or unknown
acaccaagctgaagcggctggagatcacgccggtggtgtgcaatgtggaacaagttcgcatcctgaggggactgggcgccatccagccaggagtgaaccgctgcaaactcatctccaggaaggacttcgagaccctctacaatgactgcaccaacgcaagttctagacctggaaggcctcctaagaggactcaaagtgtcacctccccagagaactctcacatcatgccgcattctgtccctggtctcatgtctcctgggataattccaccaacaggtctgacagcagccgctgcagcagctgctgctgctaccaatgcagctattgctgaagcaatgaaggtgaaaaaaatcaaattagaagccatgagcaactatcatgccagtaataaccaacatggagcagactctgaaaacggggacatgaattcaagtgtcggactggaacttccttttatgatgatgccccaccctctaattcctgtcagcctacctccagcatctgtcaccatggcaatgagccagatgaaccacctcagcaccattgcaaatatggcagcagcagcacaagttcagagtcccccatccagagttgagacatcagttattaaggagcgtgttcctgatagcccctcacctgccccctctctggaggaggggagaaggcctggcagtcacccatcatcacatcgcagcagcagcgtgtccagctcccctgctcggactgagagctcttctgacagaatcccggtccatcagnaatgggttgtccatgaaccagatgcttgatgggcttatcaccaaatggactttctgggcccaaagaaggagatttggccgtcatgacatggn

SEQ ID NO: 454 - DNA, 526 bp, Homo sapiens
  misc_feature (524)..(526): "n" may be a, t, c, g, other or unknown
tttttgttttgttttaacttccccttgtttcaagacaatgctaaggaactttaaaattgtagcagttcatatttgctgggctcttactgtgtagtggcagggttgtaattgcgttacctatattaactcagtcaatccttacaacagccctatatgactggcataattatacccttgttttgtgcatgaggaaatacagggaattgacatactggatggcagggctgggactcaaggacagtctgactctggagcacagctcttttgtttttctttttttcttttttctttgtgtttgtgtgtgtgtgtgtgtgtgtgtgtgtgtgtgtgtgtgtgtgtgtgtaggagagagagacagagtctcgctgttgcctaggctggaggtgcagtagctcaatcttggctcactgcaacctccacctcccaggttcaagggattctcctgcctcaccctccccagtagttgggattacaggcgtgtgccaccacccccagctgactttttgtgtgtgtatgtgtatgtnnn

SEQ ID NO: 455 - DNA, 845 bp, Homo sapiens
  misc_feature (683)..(683): "n" may be a, t, c, g, other or unknown
  misc_feature (727)..(727): "n" may be a, t, c, g, other or unknown
  misc_feature (805)..(805): "n" may be a, t, c, g, other or unknown
  misc_feature (815)..(815): "n" may be a, t, c, g, other or unknown
  misc_feature (845)..(845): "n" may be a, t, c, g, other or unknown
cctcctgaaaatgaaaagaaggtagaggaagatattatcacagagcttgctcttggagaagatgctatatctagcagtatggaaattgaccaaggtgaaaagaatgaagatgaaacttctgcagatcttgtagaaacgattaatgaaaatgttattgaagataacaaaagtgagaatatcttagaaaatacagactctatggagacagatgaaatcattcctattttggaaaagcttgcaccttctgaggatgaacttacttgcttttctaaaacatctctccttccaatcgatgagacaaatccagatttggaagagaaaatggaaagttcttttggttcaccatctaaacaagaaagtagtgagagtttgccaaaagaagcctttctggtcctctctgatgaagaggatatttcgggtgaaaaagatgagtctgaagttatatcgcaaaatgaaacgtgctctccaggttagcatataacttaaatgttaaagattttttattgactttgatgaactgtttaataaaacattatcataatgttttaaatttattttagctgcagagaaagttgagaatagtgatgactctatagaaagatgtcttaacttcatagaattcagaattagtgtgtgtactctgtgagtagcattgtctaaatactaagaagggagataaaatnagtagaaaatatgcccttatagtctggaaatagagatgaagtanagcaccatacactgagatacagcttaagttagtacataattgactagagttgtacagttctttcttgctatcacttancgaacaaatnacttagaactaaaagcctaatagtttaatn

SEQ ID NO: 456 - DNA, 794 bp, Homo sapiens
  misc_feature (714)..(714): "n" may be a, t, c, g, other or unknown
  misc_feature (732)..(732): "n" may be a, t, c, g, other or unknown
  misc_feature (779)..(779): "n" may be a, t, c, g, other or unknown
aaggcgcggaagcggcggtagctgcagctggcgaagttgggcgactggcggatgcaggccttgcggcacgtcgtgtgcgccctgtccggcggcgtggacagcgccgtggccgcgctgctgctgaggcggagaggttaccaggtgacaggggtgtttatgaagaactgggactcactggatgaacatggggtctgtactgccgacaaagactgtgaagatgcttacagagtttgccagatcttagacatccctttccatcaagtgtcctacgtaaaggagtattggaatgatgtgttcagtgactttttgaatgagtatgaaaaaggaaggactcccaatcctgacatagtttgcaacaagcacatcaaatttagttgcttttttcattatgctgtggataatcttggggcagatgccattgccacaggtcactatgcaagaacttccctggaagatgaagaagtccttgagcagaagcacgttaagaagcccgaagggcttttcagaaatcggtttgaagttagaaatgccaggtttcccaggatgccctgaggagaaccatcttccctctggggggattaacgaaagagtttgtaaagaaaatcgctgctgagaatagacttcatcatgtgcttcagaagaaagagagcatgggcatgtgtttcatcgggaagaggaattttgaacatttccttcttcagtatctgcagcctngacctggcactttatttncatagaagacaataagggtctgggaacacataaaggttgggtcctgnataccttgggccaga

SEQ ID NO: 457 - DNA, 846 bp, Homo sapiens
  misc_feature (762)..(762): "n" may be a, t, c, g, other or unknown
  misc_feature (766)..(766): "n" may be a, t, c, g, other or unknown
aatccattaatctgatgctatgatgaccttggaaataatgtacttttaaaaaatatcctaaagtcctatgacttaaagttcacattatcttccttcataaatgaaaaattttcatttaaaacatggaatcagtttatcaaagtacagtttacaggttttaagtctgttccatttctggttagacaaactcaaatacaatgatcaaactaaaagatttcttaaaagtatgatgactattaattgtctgctaatgaagtctgaaggtctgataagattatccatgaagcaaaagggaggaacaaaaaaactgttacatttctttcttctaatttttgagcctaaaaaccattttttataaacgtggtttcattgttctgacatcttaggtgtggcagttctctgcctcaagaaaatttgtaaaatttatattttagattttagcataatttctgaaacaaacaataacaactacttaccagtttttactgtagatactggactttgcctcttagggtgaatacttgtttgacttcaagcggggagagtatactttttaaccaatgacttgctgattttgcagttaagaaagaaaaacagaatccactgaaaataaaatttctatttgaaagtttcataagtgtaattgactaacggtgagtcctcccccagctgttactggtatttcaatgtttaagaaattattttatttacactaaatagtctcaacaattccctatcttatactggcaggcaggaaactgnagangttgtatcaactgcagtttgcactgaaagaaaacaatcttaaatcacttttaatcttgcagagcatttttggaaggtcaa

SEQ ID NO: 458 - DNA, 425 bp, Homo sapiens
  misc_feature (204)..(204): "n" may be a, t, c, g, other or unknown
  misc_feature (231)..(231): "n" may be a, t, c, g, other or unknown
  misc_feature (408)..(408): "n" may be a, t, c, g, other or unknown
  misc_feature (410)..(410): "n" may be a, t, c, g, other or unknown
  misc_feature (424)..(424): "n" may be a, t, c, g, other or unknown
acccacgctgcgggcaagccatggcgggaagcgagccgcgcagcggaacaaactcgccgccgccgcccttcagcgactggggccgcctggaggcggtcatcctcagcggctggaagaccttctggcagtcagtgagcaaggagagggtggcgcgtacgacctcacgggaggaggtggatgaggcggccagcaccctgacgcggntgccggtgagcgtcggccgcaggccgnggaggacagtggggccggcccgggccggagggacctcccctggagccccccggggcctggggaactctcgcgccccggcctgggtctggctccgtccatgcagccattcctggcagagtagtcaccgagaagctacagttgatcagaagcgtcttggcttggaccctggtgcttcgnanggggcccgaacatnt

SEQ ID NO: 459 - DNA, 868 bp, Homo sapiens
  misc_feature (756)..(756): "n" may be a, t, c, g, other or unknown
  misc_feature (807)..(807): "n" may be a, t, c, g, other or unknown
  misc_feature (828)..(828): "n" may be a, t, c, g, other or unknown
ttcagaatcataaaaacatttttaaaaggaattgagaaaaaaaaaacctcaaagaagataccatatgagtatggtagtaatacccaaagataaccaaagcaatggaacaaaataaattttataatgagaaattttaatccttgttatatttaacccatttgttcattcaatgctgttatacattccctttgttgtgggttgaatctaggaaaagggtcttgtccaatataattaaggatctcaagatgaagcatcctgtatcgtcacgggtacgtcctaaatccaatgacaagtgttcttataaaagacaagagaaggcacaaagacaaagaaaaagccacgtgaaacacaatagaaggcataaataaaaagccacgtgaaagcaaaggcagaaactagagcaatgcagctacaaagaatgctgacagctaccaaaagctgaaaaagacaagaaaccattctcctctcttgtcttcagagggattgtggccctgccaacaccttgattttgtacttctgtcctccagaaccatgacagaatgaatttctgttattttaagccaagtaggtggtacagcagccacgggaaactaatatatgtggtttgctttatatttatgttggacagcattctcttagatcctacaaccaattcacagaaaacacagggctgaggaaccagttaaacttcaccagggaatacagttcacaaaatttagcccatgggaaattccacagagtaaactatctaatctncacaaataaattgaaatggaagccttctatggatgaaaagagacttagacntatcaaccagtcacaaccagntttggaaccctgattaaaaccaaaatggtaaaaaaaaaac

SEQ ID NO: 460 - DNA, 819 bp, Homo sapiens
  misc_feature (699)..(699): "n" may be a, t, c, g, other or unknown
  misc_feature (724)..(724): "n" may be a, t, c, g, other or unknown
  misc_feature (787)..(787): "n" may be a, t, c, g, other or unknown
  misc_feature (806)..(806): "n" may be a, t, c, g, other or unknown
gtggttaaacgtacaatttggggggcctcatcccccaaatttatttgaatggagcagaggggggttgtcatctttacattttcaaatgagcagtcctggggctgagactgattaatgtaaccactacattgagaattactggtctaacataaaagtgttcaagatgttgaaacaagtgacaccttgtgccgttgatttccttcccttttccagagctgtgttggtggtgtatctcaaactaaaggaggtaacagaatggactcttaggacgaacctgatttagttagagtttccactcccatcttgaactagtggtataatgtaggaaagcagttctcaaagtgtggacagatgacccatggggatctcctcttaccctttcagggtagcctcaaggtcataactattttcaaaataatagtaagatgctatttattgttttcactgatacactgatggttcaaaagcaaggctgggtaaaactactggcggtaccttagcacaaagcaagtcaggggcaccaaactacttgagaatgcccttgaagcagtaaaatttattattctatttttatttttttgaggcggagttttgctctgtcgcccagggtggagtgcagtggcactatctcggctcactgcaatctcttcctccctggttgtatttttagtagagacagtgtttcgccatgttggccangctggtctcgaactccggacctcangcgatccacctgcctcggcgtcccaaagtgctgggattacaggcatgagccaccgtgcccggnctattattattaagcttancttttgactactg

SEQ ID NO: 461 - DNA, 415 bp, Homo sapiens
  misc_feature (399)..(399): "n" may be a, t, c, g, other or unknown
  misc_feature (408)..(408): "n" may be a, t, c, g, other or unknown
  misc_feature (415)..(415): "n" may be a, t, c, g, other or unknown
tgtttaatctgatgaatgtggctttttttcccttcactttaatgttcaagaagttgtggctatttcatagatttcttctgatttattctgtgggtccctgttatctgttctttatgtaatctttcagtagattttcatccttttatatccacattcttatgtggacttgctgaagaaacagaatatcagttcaaaacaaaacctaggccaggcatggtggttcgcgcctataatctcagcactttgggaagccaaggcggtcaggagtttgagaccagcctgaccaacatgatgaaaccctgtctctactaaaaatacaaaaattagcctggcgtggtggcacgcatctgtaatcccaactactcaggacgctgaggcaggagagtcgcttgaacccangaggcgganattgcan

SEQ ID NO: 462 - DNA, 856 bp, Homo sapiens
  misc_feature (717)..(717): "n" may be a, t, c, g, other or unknown
  misc_feature (841)..(841): "n" may be a, t, c, g, other or unknown
  misc_feature (847)..(847): "n" may be a, t, c, g, other or unknown
  misc_feature (854)..(854): "n" may be a, t, c, g, other or unknown
atgtagcccggtccgtgccgcaaagcgaacggcggccgcggcgcgggccccgcgggggttagagtcaccacgcccagcccacagatgtcacttctgcctttccattattactcagttttctgaatgccagttgcttctagcatagtgcctgctctagagaggcactcaggaaccaaggcctatctttctgtgttgttccactctacacctaagttgctgtgatggagccatgtggtcggggtcagggttcccactgcactttctgcagtgctcccagaactcagtatgtactgggaagggcctgctgtcgtgacagcctctctttggggccagcttctgcttttgcccccatctttgcagtacagggggtaaattaaacaagaggatgcctgaatgaacgatatcctgggttcttgagagacaagtgggagctgataattctgaaaattcattagtcaaagcatggagataaaggtggcagcaggaaggggagaggcaaggagtagacccgtgacagttttagaatcttatttgtgccaaaatactttactgcattggcttggacctctaatacaatgttgaattgttaaccatgatagcactgtatcctggtctaattcctgaattgaatggctagtcttaccattaagaatgctatttgcggccaggcacggtggctcacacctgtaaccccaccactttgggaggccaaggcangtggatcacttgaggtcaggagtttgagaccagcctggccaacatggtgaaaccccgtctctactaaaaatagaaaaattaacccgtgtgtgtggccggcgcctgtaatccaactgctctggantctgangcaaaanaa

SEQ ID NO: 463 - DNA, 827 bp, Homo sapiens
  misc_feature (627)..(627): "n" may be a, t, c, g, other or unknown
  misc_feature (758)..(758): "n" may be a, t, c, g, other or unknown
  misc_feature (764)..(764): "n" may be a, t, c, g, other or unknown
  misc_feature (817)..(817): "n" may be a, t, c, g, other or unknown
gcgagcaacaggccgtgccgggtttgcatttccttactgctttgtcttgaagacagaacgatgccaaagaaagcaaagcctacagggagtgggaaggaagaggggccggctccctgtaagcagatgaagttagaagcagctggggggccttcagctttaaactttgacagtcccagtagtctctttgaaagtttaatctcgcccatcaagacagagacttttttcaaggaattctgggagcagaagccccttctcattcagagagatgaccctgcactggccacatactatgggtccctgttcaagctaacagatctgaagagtctgtgcagccgggggatgtactatggaagagatgtgaatgtctgccggtgtgtcaatgggaagaagaaggttttaaataaagatggcaaagcacactttcttcagctgagaaaagattttgatcagaaaagggcaacgattcagtttcaccaacctcagagatttaaggatgagctttggaggatccaggagaagctggaatgttactttagctccttggttggctcgaatgtgtacataactcccgcaggatctcagggcctgccgccccattatgatgatgtcgaggttttcatcctgcanctggagggagagaaacactggcgcctctaccaccccactgtgcccctggcacgagagtacagcgtggaggccgaggaaaggatcggcaggcccggtgcatgagtttatgctgaaacccggtgatttgttgnactttnccagaggaaccattcatcaagcggacacttctgcgggctggcccactcgactnacgtgaccat

SEQ ID NO: 464 - DNA, 863 bp, Homo sapiens
  misc_feature (737)..(737): "n" may be a, t, c, g, other or unknown
  misc_feature (792)..(792): "n" may be a, t, c, g, other or unknown
aactcattgatgaagacctgtgcttgggcaaagctaagaaacaagaacaaactgttgaggagaagaagaagatgcctatggaaaatgagaaccaccaggtattcagtaatccaccaaagatccttactgttcaagaaatggctggattgaataacaagacaattggatatgagggaattcatagccctagtgtgcttccttctggtggagaagaaagcagatcaccatctcttcaacttaagcctctggattccagtgttttacagttttccagtaagtacaaatggatcctaggtgaagaaccggtggagaaacgaagaaggctccagaatgagatgacaacaccttctctagattattccatgcctgctccttacaggagggtagaagcacctgttgcctacccagaaggggagaacagccatgataaatcgagttctgagagaagtacaccaccataccttttcccagaatacccagaagcaagcaagaatacaggtcagaatagggaggtttcaattctgtatccaggggccaaagaccaacgccaggggtccctgcttcctgaagaattagaagatcagatgccaagattggtggcagaagaatctaacagaggtagcacaaccataaacaaagaagaagtcaacaagggaccttttgtagctgttgtgggtgttgccaaaggtgttagagattcaggagctcccattcagctgatcccttttaacagagangacttgctgagagacgaaaagcagttgaatcctggaacccaatgccttattctgnggcctctgctgcaatccctgctgagccattggggagaaagcaagagctttgaggagaccaaagtcataatc

SEQ ID NO: 465 - DNA, 858 bp, Homo sapiens
  misc_feature (852)..(852): "n" may be a, t, c, g, other or unknown
  misc_feature (857)..(857): "n" may be a, t, c, g, other or unknown
tacacatgagcctcctccggcagaaaatagcccagctggaggaggagaagcaggcacgcacggccttggtggttgagagggacaacgcgcatcttaccatcaggaacttgcagaagaaggtggagaggctgcagaaagagctgaacacgtgtcgagacttgcacaccgagctcaaagccaaactggccgacaccaatgaactgaagattaaaactttggaacagactaaagccattgaagatctaaacaaatccagagaccaactggagaagatgaaggagaaagctgagaaaaagctcatgtctatcaagtcagaactggataccacagaacatgaggctaaggagaataaagaaagggccagaaacatgatagaagtggtaaccagtgaaatgaagacactaaaaaaatctctggaagaagcagaaaagagagaaaagcagctggcagacttcagggaggtggtgtcgcagatgctaggcttgaacgtgaccagccttgctcttcctgattatgaaatcatcaagtgtcttgaaagattgatccattcacatcagcatcactttgttacctgtgcctgcctcaaagatgtgactactgggcaagagaggcacccacaaggccatttacagcttcttcattgaacactgtatctcttgagagaggtggccataagacatggcacacaattcccaatttcacaaattcctcctgtctttgagatttgatcagttggtgaatattttatgctttgatgatatagtgagaatgcatcacttgcaaaaacgatctcaaaagtgtcagccttagataacgttcacatttaaaacgcctattattcatttactagcntttang

SEQ ID NO: 466 - DNA, 590 bp, Homo sapiens
  misc_feature (225)..(226): "n" may be a, t, c, g, other or unknown
  misc_feature (302)..(302): "n" may be a, t, c, g, other or unknown
  misc_feature (447)..(447): "n" may be a, t, c, g, other or unknown
  misc_feature (511)..(511): "n" may be a, t, c, g, other or unknown
  misc_feature (533)..(533): "n" may be a, t, c, g, other or unknown
  misc_feature (564)..(564): "n" may be a, t, c, g, other or unknown
aatcgagtcggccttgttggcctactgggcggcgcttcctagttcggctggttcttctgtcgccggcttcagcagcccgcgcccgggcaggtaaggcattccccgccttaatgcctcggtcaaacgtcgtccgaggtccgcttccaggccttggcacctctgccccagggttgctggggtcggctgctggaacggaaatctctttatcatccgtgagaaaagttnnagaggaagtgggttcctttgacagagcttactccagaagaaagacttgggtaggtccccggtaatcaagaagttcntcggccctgaggaagagcctgaggcttggagggacgtcacccagctgttctggggcgcagtcggacctcaagtttctcacctctcaggccctggattccgtgaacccgactgcgaaatgaagtctcttttccccagaaccagcangtcatgccagcacctgacagatgcctgtggcgccagcagctcgctgagcctgcacacgattgtnattcgcttgtttctccggcctncaagcttccagggaattagaaagtggaggcngcttatgggatcagatgagtacattc

SEQ ID NO: 467 - DNA, 800 bp, Homo sapiens
  misc_feature (555)..(555): "n" may be a, t, c, g, other or unknown
  misc_feature (647)..(647): "n" may be a, t, c, g, other or unknown
  misc_feature (746)..(746): "n" may be a, t, c, g, other or unknown
  misc_feature (759)..(759): "n" may be a, t, c, g, other or unknown
  misc_feature (787)..(787): "n" may be a, t, c, g, other or unknown
cctttgcgcgccgggttaatgggcggtaatttggtacccttgggtgcactttgttttgcccctgttcatttgaatgcaaatgggtgacccgggcccgactaggtgcttattaaattgcagttttcccccctgccttttccggaatgcagacttagaggagagaggctgcgccctggcccagcctggctcggctcagctccgcgcgccatggcaagctcggcttccctggagaccatggtgcccccggcctgcccgcgcgccggagcgttgccggccacttccaagacactggccttttccatcgagcgcatcatggccaagacgtcggagccccgtgcgccctttgagccccggcctggagcgctagaggcggacggcagccagggcaagaaactgctcaacctctgctcgccgctgccctgtatgatccccctccagcccctaggctacgaggtgccgtcaaagacactgctcagttactcggagctctggaaaagcagcctccgggcgggcggcggcggaggcggcggcggcggtggcggcggcggcggcggnggggccccagtgtgcggcgccagcggcttgtgcaaaaccaactgtggcgtgtgctgcaaggccgagctgggcctggcgccgtccgcgcttgncgcgggcagggtcatcaagccgcaagtcatcaaccaaggctgtgggctgccggccagcggctcgctctactactttaaactacctggacttcgaaccgngtaccccgccgtntgagcttcttcagcggggcacctttttnccgtcttggcctt

SEQ ID NO: 468 - DNA, 696 bp, Homo sapiens
  misc_feature (456)..(456): "n" may be a, t, c, g, other or unknown
  misc_feature (521)..(521): "n" may be a, t, c, g, other or unknown
  misc_feature (532)..(532): "n" may be a, t, c, g, other or unknown
  misc_feature (652)..(652): "n" may be a, t, c, g, other or unknown
  misc_feature (686)..(686): "n" may be a, t, c, g, other or unknown
  misc_feature (696)..(696): "n" may be a, t, c, g, other or unknown
ggaacagcaagtggcacatagtaggcacaccttttattcctctctcatcctgttctctactcattaagctgtccactctcttttttgaccttagcacattcctaatgctctaaccttctcagcctctttttttaaagtgtcagagccctataaaatattgttaataaataattttaacataaaaagaggtacagatttacagatgtacatgcagtataaaatgataacctcaagcatacctttctccaaagaaaaatgttacaaaactaaacacagttggctgagcttgagttgcattactgcatacttaggacgtgccagcacataacaaacgtttaaggaaagtgattacaagaagaaaagttaatattttagacaagttgattcagtttttcttgggttgtatgatgttagaagttgactactgtctcaaattggagcctgtaggccactggngttttataaggcacttgattggagaactaatgctttaaccacaccagaataattgcattctgcanattaaatgcantgccatatgctgccaatcccccctgcgtgtcccccggcattatcttctttctcgaccaccactgatgagcatctaattgccccttcaaggccttattcagatggcccttattggagctgnttctgaatctttttagactcatttgggccccttnacttaagaan

SEQ ID NO: 469 - DNA, 869 bp, Homo sapiens
  misc_feature (799)..(799): "n" may be a, t, c, g, other or unknown
  misc_feature (834)..(834): "n" may be a, t, c, g, other or unknown
  misc_feature (837)..(837): "n" may be a, t, c, g, other or unknown
tacattaaaatgcacttaatatcactttgtaaagcccagatgagtgcaaatgtgcctgtaacttcctcctttaatctgtccaggtagtatttagtctttagtcttacattttctttctccctttatttcatgaaattccttgagaaaacttcaacagtaaagaaagaaatttcgttcatctcacaactcttccaaacgaggaaacttagtgaaatatttcagagcttctagatgtgaggtacaaaacttgggatcaaatggaatcttgattcactaaccaatttaagatctgacttctaattttaggaactttgggttatgaacgcttccattttatacctgtgtctagttagtttctgcctatctatccaagaagcttttatcaagggtccaccatgtgccagccactgaagtagttataaatacaaggatgtgtaaggtatggatgatggtatacgaactgtcatcttactggatttgtccgctctgttaaagatacggttccgaaaactttttaaagccctagagagggctttaaggcaatgtagcatcatatatagaggcatcaacctgttcatatctttctatttaacagaactgtgcacctgggcacaagggtgtgcacaacaggatgtgtacagcagcactgttaaagtgtagcacatccatactacaggatcttatgcaactgttggaaagaatgaagcgatgctgcactgtggtcatgcagtgatctctaagacatattaactagaaagccaaagggttaacaatgtatagcaactgggcgcaatgactngcgccctgtaatcccagcactttgggaaggctgantangggcggatcacctgaggtcaggagttttgaaa

SEQ ID NO: 470 - DNA, 822 bp, Homo sapiens
  misc_feature (697)..(697): "n" may be a, t, c, g, other or unknown
  misc_feature (760)..(760): "n" may be a, t, c, g, other or unknown
  misc_feature (777)..(777): "n" may be a, t, c, g, other or unknown
  misc_feature (807)..(807): "n" may be a, t, c, g, other or unknown
gttatgaagatagtctgtcttgataaaatcccaggcttaatttagataatgtcagtctgccacacggagttggtagccataaaatgctacttctgagttctacacttagctgtagaatgcaaattgagtgacacctttaaggctacagtacttgattttttaacatcttttctgttggggctttgactagttctgcagaaagggattgggacaaaaccaggagtttgttatttttagtttttctttgccatttagcagcagaaattcgatccccactgataaacagaacctgctggaccacctttgctcagataatttctataacacagaggttaactcactattggttgaaataaatgcttaaactttgaagcactttttaaaaaatcataagtacaccagtgctgcacctccaatgataatcatttaggaaacacagaaaacaaaaattaaatgaatggtccacatgtgaataaataaccttaatccactcggatatgcagcagctcttcccactgcaaatgggttttgtggtggtaacttgaattggaggagagagacagctggcctggtgctgctgctgctgccaaaagccatcttgttaacatggtttatttccattctgtcttcctgctacccacaagagccctgtcctcctgtctccctcctctttcatcagttttcagtggcatactgncctcagtcacatttctcctgctttgccagtaaacagcatgtagctgattcttctagtcctcgnctgcattcctacaattnctgctcattccgaattgggtctggtatctnctaagttggtgcact

SEQ ID NO: 471 - DNA, 798 bp, Homo sapiens
  misc_feature (646)..(646): "n" may be a, t, c, g, other or unknown
  misc_feature (752)..(752): "n" may be a, t, c, g, other or unknown
  misc_feature (777)..(777): "n" may be a, t, c, g, other or unknown
  misc_feature (793)..(793): "n" may be a, t, c, g, other or unknown
agcagagggaacagggaagaaacctaaaggctgcaggctgccaggtgtgcttggagagcccccttcttccgccgggcctcgcaagcagcgtaggactgtggagaagggcggtgggcaaggagggaactcgagagcagcctccatgggcacacaggagggctggtgcctgctgctctgcctggctctatctggagcagcagaaaccaagccccacccagcagaggggcagtggcgggcagtggacgtggtcctagactgcttcctggcgaaggacggtgcgcaccgtggagctctcgccagcagtgaggacagggcaagggcctcccttgtgctgaagcaggtgccagtgctggacgatggctccctggaggacttcaccgatttccaagggggcacactggcccaagatgacccacctattatctttgaggcctcagtggacctggtccagattccccaggccgaggccttgctccatgctgactgcagtgggaaggaggtgacctgtgagatctcccgctactttctccagatgacagagaccactgttaagacagcagcttggttcatggccaacgtgcaggtctctggacggggacctagcatctccttggtgatgaagactcccagggtcgccaagaatgangcgctctggcacccgacgctgaacttgccacttgagcccccaagggactgtgccgaactgcaatggagtttcaggtggatgacacagacccaatcccttgagcttnctggctgggggtccttaagccttcnttggacttggggcttnttcca

SEQ ID NO: 472 - DNA, 862 bp, Homo sapiens
  misc_feature (714)..(714): "n" may be a, t, c, g, other or unknown
  misc_feature (790)..(790): "n" may be a, t, c, g, other or unknown
  misc_feature (840)..(840): "n" may be a, t, c, g, other or unknown
  misc_feature (846)..(846): "n" may be a, t, c, g, other or unknown
agtgctagctcgccgcggccgcctccggggaccacctggcttcatgtgtggatttccacggctcttgcccagaggcgggtacactgtgttccaatgtgccacggaactcacgcagtggcactttgtggcttcatgaaggaagaggcaggccacgcaacacttcctccccaagccaaggagaagtatcacttttagaggcagaggagcggaaggcagtgggtgtgaccaaaagtgccatttgttaaagcttatcttccttgccagattttaaaaactattatggaaaatctcaagcattcacaaaagtagagagaaagaaaggactctcagactgttggagcagaactactgagaaaaaccaggcattgtatcttcagttgtcatcaagttcgcaatcagattggaaaagctcaacttgaagctttcttgcctgcagtgaagcagagagatagatattattcacgtaataaaaaacatgggcttcaacctgactttccacctttcctacaaattccgattactgttgctgttgactttgtgcctgacagtggctgggtgggccaccagtaactacttcgtgggtgccattcaagagattcctaaagcaaaggagttcatggctaatttccataagaccctcattttggggaagggaaaaactctgactaatgaagcatccacgaagaaggtagaacttgacaactgcccttctgngtctccttacctcagaggccagagcaagctcattttcaaaccagatctcactttggaagaagtcaggcagaaaatnccaaagtgtccagaagccggtatcggcctcaggaatgtaagcttacaganggtcgncatctcgttcccaccg

SEQ ID NO: 473 - DNA, 811 bp, Homo sapiens
  misc_feature (717)..(717): "n" may be a, t, c, g, other or unknown
  misc_feature (806)..(806): "n" may be a, t, c, g, other or unknown
  misc_feature (809)..(809): "n" may be a, t, c, g, other or unknown
cgacgctccacagctcgccgcggccggggggcggtgcgcggaccgtgcgcgccgcgggcgccagatgtgcagtccccgccgccgccagtgaccgagccgcagtccgagcggtatcgggccgcctccctgatgctgcgggggcgaccttgagcgtacagcggcttccctcggtggggaccccgacatcccagcgctgtgcccggtcttgccctctgtagcccggttcgccccgcgcttggacatggaaggggccgccgcgcctgtggcgggggaccgccccgacttggggctgggggcgccgggctctccccgagaggcggtggcgggggcgactgcagccctggagcccaggaagccgcacggggtgaagcggcatcaccacaagcacaacttgaagcaccgctacgagctgcaggagaccctgggcaaaggcacctacggcaaagtcaagcgggccaccgagaggttttctggccgagtggttgctataaaatccgttcgtaaggacaaaattaaggatgaacaagacatggttacatcagacgagagattgagatcatgtcatctctcaaccatcctcatatcatcagtatttatgaagtgtttgagaacaaagataagattgtgatcatcatggaatatgccagcaaaggggagctgtacgattacatcagtgagccggcgacgcctcagtgagagggagaccggcacttcttncggcagatcgtctctgcttgtgcactattgtcacaaggaacggtgttgggtccacccgggactttggaagcttgaaaaaagaaccagtnatnaa

SEQ ID NO: 474 - DNA, 866 bp, Homo sapiens
  misc_feature (603)..(603): "n" may be a, t, c, g, other or unknown
  misc_feature (681)..(681): "n" may be a, t, c, g, other or unknown
  misc_feature (803)..(803): "n" may be a, t, c, g, other or unknown
  misc_feature (821)..(821): "n" may be a, t, c, g, other or unknown
  misc_feature (859)..(859): "n" may be a, t, c, g, other or unknown
caaatgcgtacctttctgtttttaatttgtgtgtctccaaaaaaaagaacctttcatacttggcagcttcactactaagctttaagccctgtatgtaatttgttacccagttcctctgctcatccatccattcattcaaaaaatatttattgaggatttgcaaggggttgggaacagagtggtgaaccttgaaggtgatgccactgctcttggggagctcagcggtgactctccccatatatgtaaataaacatataaacagaaatgtggataaaccaacttctgagcaaattaacatgtatgtgatttaaaagtaagatgatttgcaagagaggagcaggtgatgaagtgtaatcaagatcggcctaggatgatcagggaagcgctttttaggtgggtgacatgtgagcagaaagacctgcctgaagagaagggataaaccagcaaaggcctgggggaagcattttagacagagagacacatggtgcagagaccatgagctgagaaggagcctggcatgtccaggggctgacagaacactggtaatgtcacagggtgtggaagaactggcataggtgaggtcagagcatatagaaagagcangttgtaagggattttgcatctcacaacgtggtccactagactattctcccttccaccacccacccctatgcacacatncaagcagtgtgataagttctgtccattctacatacttgatatctctcagatctcctctttcccactactttaacaggcaccatcatcttttggcttatgctcaatggttgcctactgacttncttggcttctaggacttncttcctaaccatctttcataatgccaaacttggatagntctaatt

SEQ ID NO: 475 - DNA, 864 bp, Homo sapiens
  misc_feature (808)..(808): "n" may be a, t, c, g, other or unknown
  misc_feature (852)..(852): "n" may be a, t, c, g, other or unknown
  misc_feature (854)..(854): "n" may be a, t, c, g, other or unknown
atgcatggtaaatttgaatttccccattgttctctagagctaggtcaaaaaaacaactgtttcttttcttattccactattaataaattgaaagcttgctgtacaaaggcaacagcaacttaaaaaagaaaatctggacaatagatgtggactccaaggggccactgccatcccttcctgtgtgctctttttgacaagtaaatcactccagttagctgatgtcctgaaatgacatttgtacctgaggcaattcttattagagcttactcaggacttttcaaacatcaggacacacatagcaatttggatgttgtaaaactacgtgttacatttggagaggtcttgttgagaaggcaaaattttctaaatattttgatatcaatttgggtaaagaaaggaatacttttgttagaatgagaattaaagagaaaacaaaagaatcttggcaaaattttccctctgaaattacaaactttaggaacttttccagatgtatcgaatttaatttgacattgatgtcactcttcataccaagtgaatctattctcatgaactttgaacccatgttaattttggaccctataactaatttcctttctgtatcccatggtggtcaaagcagtaaaggagtttagagatacttagcaaatgccattcatatagtattgttagccaaactattattccttccttagaagttgatgtatcagaaaatttataagttatttgtatttatatataagtacatcagaacttgcccacatgataactcatggttgctttaataagggaaaatatgttatttganggtaattatatgatagtgaggaacattttacaattatttacagngnttgacattaa

SEQ ID NO: 476 - DNA, 861 bp, Homo sapiens
gataactgtattatatttttcatctagctataaaactttaatcttactcttaatatcctggatttaattcaaactcctgttgggttcttcacaaatgagaacttgttcaaaggatttattgaactggtattgatttcactgaaaattttccacaccaccaccattgtttttttgaattcttggtgttgtgcttcccaccttctgtccttttcgtttgtttagagaagatgaatttttaaaaagcagataaattgctaatgagcaataatgaccttatctttaccaaaacactgaaaattaagagaggttcagtgttgaagaagcacaatatgctgcggtgtctttttctagaagtgaatggaaatcttgctcagttggcatttcaagcaggaaatgaaatgcttgctttaatggcaaagcagcgttaacatttttcctgtcgtgtagcagagagtacaagaatcatttcagcaaagcagtgactcaccatgagacgttatctccatggagctgcgttttgacttttcccactctcttactcatagaaggaggacaaaggaacgaaatgaaatcatgctcacaatgaactgttcattacatcaactgatctctctctctctctcttcctctctttctctttctcccataccccaaggcaaaatttttttaaagaaatgactttaaaaactatcatttctgtattttaattacatctcttagaaataaaattatgtttgcaccatagctttctaagaaaaaaaaatgtgtttttaactgagtcttagttgcttagtgcttttattggggtatttttagactgtattttaaccacacttccaaggatcatgttcattgccttac

SEQ ID NO: 477 - DNA, 866 bp, Homo sapiens
  misc_feature (807)..(807): "n" may be a, t, c, g, other or unknown
  misc_feature (866)..(866): "n" may be a, t, c, g, other or unknown
tatgaaacagacgtggcagagtaaacctcgaaaccgaccttcttttcggcagacactcatgcatttagacattgcctctgcagatgtacttgccaccccacaagaaacttacttcaagtctcaggctgaatggagagaagaagtgaaaaaacattttgagaagatcaaaagtgaaggaacttgtatacaccggttagatgaagaactgattcgaaggcgcagagaagagctcaggcatgcgctggatattcgtgaacactatgagcggaagcttgagcgggcgaataatttatacatggaattgagtgccatcatgctgcagctagaaatgcgggagaaggagctcattaagcgtgagcaagcagtggaaaagaagtatcctgggacctacaaacgacaccctgttcgtcctatcatccatcccaatgccatggagaaactcatgaaaaggaaaggagtgcctcacaaatctgggatgcagaccaaacggccagacttgttgagatcagaagggatccccaccacagaagtggctcccactgcatcccctttgtccggaagtcccaaaatgtccacttctagcagcaagagccgatatcgaagcaaaccacgccaccgccgagggaatagcagaggcagccatagtgactttgccgcaatcttgaaaaaccagccagcccaggaaaattcaccccatcccacttacctgcaccaagctcaatcccaatacccttctcttcatcaccataattctctgcagcagcaataccagcagcccccttctggccttgtcccagagtcaccatnccagactcaatatgcacggacaggacatagcaacctgcgccaacaacctgaggtatttn

SEQ ID NO: 478 - DNA, 857 bp, Homo sapiens
  misc_feature (180)..(180): "n" may be a, t, c, g, other or unknown
  misc_feature (389)..(389): "n" may be a, t, c, g, other or unknown
  misc_feature (738)..(738): "n" may be a, t, c, g, other or unknown
  misc_feature (836)..(836): "n" may be a, t, c, g, other or unknown
accatcatgttaccatattcttgccaaaaaaaaaaaaaaaaaaaaaaaaacaccagagtcgttacatgaagtatctttgatcactgaatttccagcacttctttgttgtgtctagatgctaagcccttttctaatttgaaaaaaaaaaaaaaacaaaaaactggagacctgattctgttnatctcttgtagtttctcttatctctgtttctaaccactctatgtagtgcctctttttttctgtctacacacacacggagcatccaccataccaataatcacagtatgtggtaatgaaaagtggaagggaaaaatggcccttgcttctcacagacaaactcactatctcaatggatcatttttgtttttttgttttgttttgtttttganacagtctcactctgttgcgcaggctggagtgcagtagtgcaatcttagctcactacaacctctgcccccgggttcaagcaattctcctgcctcagcctcctgagtagctgggattacggcacctgccaccatgccctgctaatttttgtttttttagtagagatagggtttcaccatgttggccaggctggtctcgaactcctgacctcaagtgatctgcccgcctcggcctcccaaagtgctgaaattacaggcatgagccacagcgccccgcctcaatggatcctgatgagctacgcaaaccattatttttatgtctttacgaatgccaccagaaagttcattttgntctttctgaaaacaaccatgattataagatgcttctgaaacacggaagtgagagaacatgttgtacagagaacatgcatcctttgccctgccccatgnacctatgctaagcatttataa

SEQ ID NO: 479 - DNA, 862 bp, Homo sapiens
  misc_feature (681)..(681): "n" may be a, t, c, g, other or unknown
  misc_feature (746)..(746): "n" may be a, t, c, g, other or unknown
  misc_feature (813)..(813): "n" may be a, t, c, g, other or unknown
  misc_feature (815)..(815): "n" may be a, t, c, g, other or unknown
aacaaacatgcagacagtcttacagctgcagttgcctgagccttaagggccttgctactcaaagtgtggtcctcggaccgccagcatcagcatcacctgggagcttgttagagaaaacaaatctcagacctcaccgaccccacggaatcactatctgcattttaacgacatctccaggtgattcatctgcacacaagttcaaccacaggctgaccatttagagaagctggacttgagtgggattttgcagtttttccttttgatggcctcctcccctttgcttcccctcctacccttctgactccttgtagcttattttagaacatgtcgggatcctgcttctcttgtcaacaaaaggctgttgttaaaatctttcagccggcagcagcaatgtttaattcatggactagaaaattaattttattttcatgaatagagctgaggaaaaatagcaaggagactctgtgcatggcccttgggaatccagcttgtctatttaacagatgaactggcaacagtggggaggcctgaggggagggctgccttctacaaacttgtgtagcaaattgtattaggatgcttttggctgcaggtatcacaaaattcagcttcaaatggcttaaaagaaaaggaaaatttctaatttcactgataaaaaatcttgagatagggtacttttangatgacccagaaatgccatcaaatagcaggtttggtttctgccatggtggcttggtgcattcagntttcctcatgggtacaaggtggcccgccagagttccgggcagcacatgggagtcaatggcctatggnangagaaagaggttgcccttcctgaagttcatttatcagaaaccaaaat

SEQ ID NO: 480 - DNA, 865 bp, Homo sapiens
  misc_feature (675)..(675): "n" may be a, t, c, g, other or unknown
  misc_feature (692)..(692): "n" may be a, t, c, g, other or unknown
caattaaatacagtggacacaagccagtgttatttattaaatcctggtgctcaataagggtgcctgctgagggttgggagcctggggccactacatcctgccttttctctaaggagattagctagtattaaagaagtgttaagactagcccagactgagtctttctcctcaaagcatgaagcacctgagagcatcctgctttcagcaggagggagccactcagaaactgttccctagaaccctgttgttcaaagtgtggtaggaggaccagcagcctggctggtcaaagtagagttctcacctaggagatgtgggaactacagaaacttggccccctagatcttcagaatcagaatctgcactttaacaaagttcctaggtacctcggtgcccattaaagccagaggacccctgacctacaggccacagacccagataaagcagcccaagctatcgtttcctcttgctctcttgagtcacaccagcgaggcttttgtggtgcctttcattcactgcagtgtcgagatgtgccgccaagtcacgaatattgtccacactgtccctgcagtgtaacattatcagggcctaggaacgactgagcccctcgtaggcatgtgacactgtgttcctaagactgcttctctcttttcatgaataaaagcagacacaacgcangtgtttagaaaactagnctgggattaatattttaagctagaccttggatgcctcagactttatattcgtggtttattttcaattctggtcattgtattggctcttacattaaatatactggtttggccctagaaatggcaaaatcacgaagtcaccactctggctggccttaaggagctcacaagccatt

SEQ ID NO: 481 - DNA, 745 bp, Homo sapiens
  misc_feature (686)..(686): "n" may be a, t, c, g, other or unknown
  misc_feature (690)..(690): "n" may be a, t, c, g, other or unknown
  misc_feature (727)..(727): "n" may be a, t, c, g, other or unknown
tattgatctgtgtaggaatgtactgaatttcacgaaacacagcttatttatttaggtagtagtcccccaaacttgaatctagtgaaaggtggcagacattttagctcagagttttctgacatttgattttgtaaatgaatcggtgggtaacagatctgtgtcatcctatgtgatgtgatgtgatgtcatcctatgtgatgtgtactctggggtactcacatcctatgtgatgtgtctcaagtgactgtcacacagtggacactttaccagtgctagcttgaatgaggtctacctccatggcccagccctgctgccccctagtgatttcattgaatgggatgaaaaggtaaaaagtgcttaagacctgtagaagggactacatcaggtagggtatgggaatatttaggactactttggtaattattgaaaagtctagagtattaagccactggtggttttgtgaggcacgagtgagttgaacagtttggtgggctttggtgtatctttgctccagaattatatcaccagttagctgttaggtgctgccatttggtaacgtgccaacttttcaaaaatggtttgccccaaactagatttttctatcttctccaaagccagagccaccttcctgtcctagtgcatttttagcagtgccccgtcatcttactggcattcacctgggcttnctgngctcaatcaggggtcaagtctggcctgatctcagttncacagttcctctactctg

SEQ ID NO: 482 - DNA, 755 bp, Homo sapiens
  misc_feature (702)..(702): "n" may be a, t, c, g, other or unknown
  misc_feature (739)..(739): "n" may be a, t, c, g, other or unknown
  misc_feature (741)..(741): "n" may be a, t, c, g, other or unknown
tttgtttaatacatgttaaacaatagtccatcagtggtttgtctcttttaagatcactaacttggggcataccgtaccggttggacaagatctcaaatggtgacttaacttttaatgagtgcttataaaaacatgtgtgttgcctcatgacactatgcaattgctgctttagtggtgctttttgcattccagttgaattgtacataggttggcccatattgctcaccatttagttagatcttcattgtttagatctcagtatgttgaaaatctgggaacagcatcatagaaaactatatcctcctctcttagaacattgcttagcaaaaattatgttttgttctctaaatgaacttttccaacttcgaaattttgtgacttttaaataatgtataatactctaatgttattctaggaacaagccagcatgtttggccttatttacaaagcagttaatataccagtgttagaataagtcaaaacactgtaccaatgaaaatgtgtgctcttccaagtagtatatgtgttttattttaatatttagaagatctaaaaagctataggaacacatgttccacttgtaacttaatagcatgccttaaacttaaagatatctggccgggcgcggtggctcacgcctgtaatcccagcactttgggaggccgaggcggtggatcatgaggtcaggagatcgagaccatnctggctaacaaggtgaaaccccgctctactaaaaatncnaaaaattagcccgg

SEQ ID NO: 483 - DNA, 876 bp, Homo sapiens
  misc_feature (656)..(656): "n" may be a, t, c, g, other or unknown
  misc_feature (688)..(688): "n" may be a, t, c, g, other or unknown
  misc_feature (753)..(753): "n" may be a, t, c, g, other or unknown
  misc_feature (784)..(784): "n" may be a, t, c, g, other or unknown
  misc_feature (806)..(806): "n" may be a, t, c, g, other or unknown
  misc_feature (876)..(876): "n" may be a, t, c, g, other or unknown
gtggctgtactggcggcggcagggctggcggcttaggccgcagaggtctgtgggcctgagcccacgctggactctgtccgttctgcgatgactgctgctctggccgtcgtcacgacgtcgggtttggaagatggggtgcctaggtcccgtggcgaagggaccggggaagtggtcttggagcgggggcccggcgcggcctaccacatgttcgtggtgatggaggacttggtggagaagctgaagctgctccgctacgaggaggagttcctccggaagagcaacctgaaggccccgtccagacactattttgcactgcctaccaaccctggcgaacagttctacatgttttgtactcttgctgcttggttgattaataaagcgggacgtccctttgagcagcctcaagaatatgatgaccctaatgcaacaatatctaacatactatccgagcttcggtcatttggaagaactgcagattttcctccttcaaaattaaagtcaggttatggagaacatgtatgctatgttcttgattgcttcgctgaagaagcattgaaatatattggtttcacctggaaaaggccaatatacccagtagaagaattagaagaagaaagcgttgcagaagatgatgcagaattaacattaaataaagnggatgaagaatttgtggaagaagagacagatnatgaagaaaactttattgatctcaacgttttaaaggcccagacatatcacttggatatgaacganactgccaaacaagaagatattttggaatccncaacagatgcttcaaaatgganccctaaaaatggaacgtggtactaccggaactgaaagtcccgattaggacttgacaataagggattgggn

SEQ ID NO: 484 - DNA, 797 bp, Homo sapiens
  misc_feature (742)..(742): "n" may be a, t, c, g, other or unknown
  misc_feature (750)..(750): "n" may be a, t, c, g, other or unknown
  misc_feature (769)..(769): "n" may be a, t, c, g, other or unknown
aaggttatgtgtgatcgggtgtgggagagacactctttggggctctgtatgggacattgagagaccgtatgtgggagtgagagaccgtgtgtgacggtgcgtgtgagggggcagtgtgtgtggctgtgtgcaacatggtgagcatacggtgctgtgtgtgtcacagaagtagattctgtgtgagagagagtgagactgatgactgatgtacactgagaggtggtgtgggcaggtgtcatgagaggcacatagggggcctgggtgggacagacacagtgagtgtcagacagtctgtgttggccactctgtgtatggcttgtgaaaaagtgcgtgatccgggcacattgctgtaatcccagcactttgggtggctgaggcgggaggatcccttgaggccaggagtttgagatcagcctgggcaacatagggagacccctccccccacccccgccgtctctaccaaaataaaaataaaagaaattaaccaggtgcggttatgtacctctgtggtcccagctactgggaggctgaggttggaggatcgcttgagcctgggaagtggaggctgcagtgagctaagatcgtgccactgcactccagcctgggtgacagagagagagaccttgtctcaaaaaacaaaacaaaactgcgtgactatgtgtgacactgagctggtgagagatggcagcgttgtgacagtgcatgccaaaagtttgcggcttgtgcagggcactcggaaccnaaagcctnagggaggccttgtgtgtanaaggcaagaaatgatggaaaaggtggga

SEQ ID NO: 485 - DNA, 832 bp, Homo sapiens
  misc_feature (654)..(654): "n" may be a, t, c, g, other or unknown
  misc_feature (795)..(795): "n" may be a, t, c, g, other or unknown
  misc_feature (808)..(808): "n" may be a, t, c, g, other or unknown
  misc_feature (821)..(821): "n" may be a, t, c, g, other or unknown
agttaaaacaattttttaagagaaaggagataaccagagcatagccagcagaaggactcgcatgaggtttggtgggactgcctagggagaaggaggcagctggctgcgtgacagagcccagtgataggggagggcctgtgaccccttaaggagctgagacgctgtcacagagcaatgggagcgctgagtgatggagctggatttgtgcttttagaaaagctttgttggctgctgttgggagaatggattggaagggggtgagactgcagtcagagactcccataaggaagctgttactgtaatcacaacaacagatgcctacactccttcccaagacttccctctctgatcttagaagcattgtcaaatctgggttcccagcctgccatggcaagctgcttgctacttgggagtgaaaagcccttgtggagctttttcttattcggtgactgctcataaagtgccttcacctcgcttgccttattagccagtcctgcctccaaattaccaccacttgctcctttcaggagtctcttccccctaaagtccctattactccttctctctgctttcagatcagaaacagaaaaagtcaccttccctaagagtctgctccagtccagtagaaatgctttaaaatttttctggcctcanctgcccttcttgagcacagaaatttctagaatattgaatgaatcactggttctttataatcattttgtccagtttcaatcactgcattttaggaaagatttgaaaaactgaaggacaaagtggggcctttaaaggacttangattctttcagangaaagtatctaangaacaagttaa

SEQ ID NO: 486 - DNA, 762 bp, Homo sapiens
  misc_feature (681)..(681): "n" may be a, t, c, g, other or unknown
  misc_feature (738)..(738): "n" may be a, t, c, g, other or unknown
  misc_feature (745)..(745): "n" may be a, t, c, g, other or unknown
taaaactcccgtctctgccaaaaatacaaaaattagccgggtgtggtaacatgctcctgtagtcccagctactagggaggctgagatgggagaatcgcttgaacccgggaggcggaggttgcagtgcgccgagaccacatcattgaactccagcctgggtgacagagtgagactctgtctcaaaaaaaaaaaaaaagttgtggtcataaaacttggttcagatgccgtcagcggcatgccttgcctagggtcttgccctccttgtggcctctgcacaccctgcctagtctttccttccctcctgacctttctgaatctgattcatccttttgccccaagcagaatcccaccttctccaggaaggtgttagcctttgtaggacccactctgggacactggtacctgctgcctgtagccgtggcctttccccttccagagggcagggcggtctcagcaccctcttggtccacagctgatcttttttagctgctgaagggtctggggctgtgccctggggaagccatgacgctcccctgcgtagggtcactgggtggctcctgcagccagacttggacaccctccctttgcagatttctgtctcctccccaggaaccagctgccttccttctggggcgaattcattcttatcccacagccccagcataatgggatctggctcanggaggcctttcctgatctgccctaggtttgccttccctgtgagcaagcccttactgncctctgncttcccgttgagctgca

SEQ ID NO: 487 - DNA, 852 bp, Homo sapiens
  misc_feature (693)..(693): "n" may be a, t, c, g, other or unknown
  misc_feature (781)..(781): "n" may be a, t, c, g, other or unknown
  misc_feature (820)..(820): "n" may be a, t, c, g, other or unknown
  misc_feature (839)..(839): "n" may be a, t, c, g, other or unknown
tgtacaagagatcattgtcatcctgggtgttctttgtattcttcatactagaaatccataacacgccaaatgcccttagaaccatggacagcacccaggttttacaaatgtcttctccaggcttcagaaggaaggtggtggacattctttccatcatgacacaaaccaacaattacataccaggctttgttggtgagaaagcaaggtggcccacctggagatttatgccgaaacaaccactttacaacacaacccacggagtccttgacgttggcttggtttgtcaatcccaccacctcataccatttagaaacttatcagctatttctagataactgggtgttttagtttcctgtagataaaactgaaggctaaattgaatatatgactaagttatttactatgaggaatcttagtccaggaaaacctctcaaaatacacaaatgtctgagagatgtaatatatttaattaatcccttactccttttatttttattttttattttttcagagacaaggtcttgctttgacacccaggctggagtgcagtagtgcaatcagaggtcattacagcctccaactcctgggcttaagtgatcctcctgcctcatcctcccaagcagctggagctacaagtgtgcaccatcatgcctggcccctttattcctaaacgtttcttcatgaaggaagatncaaatttacatgagcccatgctcttcacatgggtaaggggaaaacagagagactccagggcacccacatattgggctttatcattggnctaggaacagtcttggaataggcagcttgggttctactnccagaaatactttgccatncattaatttattc

SEQ ID NO: 488 - DNA, 806 bp, Homo sapiens
  misc_feature (759)..(759): "n" may be a, t, c, g, other or unknown
  misc_feature (785)..(785): "n" may be a, t, c, g, other or unknown
  misc_feature (804)..(804): "n" may be a, t, c, g, other or unknown
gaaccaggagtttggcgtgaccatggtgagagaagacggtccaagaagggacgttatcaggccactttttgggtggagaaggaggtagtcagaccgtggccaaatttccttcacattatcctagcatattttcattctggtcttagctcttaaacttctccaagcggtgactgttatgctttacagagtggggaagagggtctgggttatttgaggcaagaagggaaggcaatagacaagagaaaagaagagactttaaaagatgccgtgtgtttccaacttttttaattctaaaatttctgtttcaaggggaagcaaaagaaaacaaggaagtatgcgaccatgaagcgaatgcttagtctcagagatcagaggctgtgagtgtctggaatcaactgcccagggatattctaataagagtctagagaggataagtagtaaaaatgtttgttgttattattttgttttttgcttattatcgtgtcttagatttatatagcatgagatagccagtgtttaacagtaatttagctgctgagcgatcacactgggaaaggcgttgggaattaaacatttcttaagtgttcactttttctaccgttatatgctttgtctgccatatcgcatttaaacctcatgtcagttcggtgaagtccgtatagttctctttatgtttttaccattacactactacattcccctggggtggggccaaggggagtgtttcttgttgaaagatggcaaggttagagaccttgnttggctggcgtttccagtgccctggnactcaaatatttttggcanaa

SEQ ID NO: 489 - DNA, 889 bp, Homo sapiens
  misc_feature (889)..(889): "n" may be a, t, c, g, other or unknown
tataaaaccataataaattacttagactacaatgagcaaaacacatttgtgggtttggtcagcagatactgctctgatttgccattaaaatcttaaaaattcttaaaaagctctcttgaattcgacctctactaccttccaaggaccttggaaagacttaagtatgtgttagaactctcttgaaggcttggtcttcctttagtgacattaacactcaggtttgttattccagtgggcagccccagttcatgcaaactgacctgttgtgtctggtgtccttagactttgatatgcaggccaaagtccaagggatatgcaaacataacacacacctgtacttccataaaaaccagcagaattgtagatcagctcattttactgaaattttaaaccctgtaaaaaaaaaaatactatgtttgaagaaagaaatcctggtgcatataaaaactacaatgagtaacagtaatacaggtaagaatcaagcaggccttgagcaaaacagtccattattactgcgtaaactatgttgctatgatacttattttgagcctttatgcaccagcacatacatagtaagacacacaagatagttcaacaaaatctaagtaatatacaaacactgtaagagcttttccaaccaaagaaactttaatgtagatctgaaatgagccatcatgatacagaaaaagatgattaccatttcgtgtcctttccaagtagaactatctgataaacttttctggttgtatcagaagagatttcaactcaacatgaaaattctactacttgggaattatttgaaaaaatcaagtatttgaaggaaaaaattatttttcatctaaaggacgcttacattttccttttgctagaaacgaatgccatggatgan

SEQ ID NO: 490 - DNA, 723 bp, Homo sapiens
  misc_feature (679)..(679): "n" may be a, t, c, g, other or unknown
  misc_feature (697)..(697): "n" may be a, t, c, g, other or unknown
  misc_feature (700)..(700): "n" may be a, t, c, g, other or unknown
acatggaatgatcagaatcgtggaggcaaagctctgtccaaaaatgttcattttgttttgttttgttttgttttcttgtttttaacatttccttcatcctggtgaaatatcctggaaattcatagatctgggtttggtgatttcaaaactcaccatgcccagtggccatttcagttactgccgtgacatccctgaggctaccatactctcaaaaccaaatcaatgccagtgatctaacaggattctttcttatttatgagttttgtttagatggatatttttgcagagcataaaaaattaaatgacatttagttatccattgaatgtatcaccctgacttaaaaaaaaatccttaaatcaaaacttttcaaaaaatctgggctatggagtcactccctctgtggagcgagagcccagtcttttctggtactaaggccacagaggcaatttccagtagcatttttatatcttctctaagtttcttttccttttctgtctgtatctgtttttctctgactgcctatatcttactttgtatacccatacataaattattttcccatcttctctcttcccctttttttctgatttgttttctctcttgcaagaaactctgaaataaccttcagaacacaaaaaactggaggttctatacctacagagtcattatcattattgngattaccattgttactgntgntggtgtttttcctctttttattg

SEQ ID NO: 491 - DNA, 808 bp, Homo sapiens
  misc_feature (732)..(732): "n" may be a, t, c, g, other or unknown
  misc_feature (781)..(781): "n" may be a, t, c, g, other or unknown
  misc_feature (805)..(805): "n" may be a, t, c, g, other or unknown
cttagtggtgtcggggtctagtggacagagaagactcttggccaggcagatggcttctcggtggcagaacatggggacctccgtgcgccggagatctctccagcaccaggagcagctggaggacagcaaggagctgcagcctgtggtcagccatcaggagacctctgtaggggccctggggtccctgtgcagacagttccaaaggaggctgcccctgagaaccgtcaacctcaacctccgcgcagggccctcctggaaacgcctggaaaccccagagccaggtcagcagggcctccaggctgcagctcgctcagctaagagtgctttgggtgccgtgtcccagagaatccaggagtcctgccaaagtggcaccaagtggctggtggagacccaggtgaaggccaggaggcggaagagaggagcacagaagggcagtggatccccaactcacagcctgagccagaagagcacccggctgtctggagccgcccctgcccactcagccgcagacccctgggagaaggagcatcaccgcctctctgtccggatgggctcacatgcccacccattacggcgatcaaggcgggaggctgccttccggagcccctactcctcaacagagcccctctgctctcccagcgagtctgacagtgacctagagcctgtgggggcgggaattcagcatctccagaactgtcccaagagctagatgaagccattatggcggaaganagtggtgacatcgtctctctcattcatgacttgaggaagtgccttgcangaaaacaagccctgtctggaccgncaa

SEQ ID NO: 492 - DNA, 874 bp, Homo sapiens
  misc_feature (757)..(757): "n" may be a, t, c, g, other or unknown
  misc_feature (779)..(779): "n" may be a, t, c, g, other or unknown
  misc_feature (850)..(850): "n" may be a, t, c, g, other or unknown
  misc_feature (870)..(870): "n" may be a, t, c, g, other or unknown
agaagatctaggaaagaagattgctttggccttgaacaaagtggatggagccaatgtggctcttaaagactctgaccaagtagcacagagtgatggggaggagagccctgctgctgaagagcagctcttgggagagcacattaaagaggaaaaagaagaatctgaatttctaccctcatctggaggaacatttaatatctctgtcagtggggacattgatggtttaattactcaggctttgctgacgggcaattttgagagtgctgttgacctttgtttacatgataaccgcatggccgatgccattatattggccatagcaggtggacaagtactcttggctcgaacccagaaaaaaatacttcgcaaaatcccaaagcaaaattaccaggctcatcactgcagtggtgatgaagaactggaaagagattgttgagtcttgtgatcttaaaaattggagagaggctttagctgcagtattgacttatgcaaagccggatgaattttcagccctttgtgatcttttgggaaccaggcttgaaaatgaaggagatagcctcctgcagactcaagcatgtctctgctatatttgtgcagggaatgtagagaaattagttgcatgttggactaaagctcaagatggaagccaccctttgtcacttcaggatctgattgagaaagttgtcatcctgcgaaaagctgtgcaactcactcaagccatggacactagtactggaggagttctcttgctgcgaanatgaatcagtatgcccatttgntggcagctcaaggcagtattgctgcagccttggcttttcttcctgacacaccaccagccaatatcatgccnctttgtgacagactttgtanaccc

SEQ ID NO: 493 - DNA, 834 bp, Homo sapiens
  misc_feature (729)..(729): "n" may be a, t, c, g, other or unknown
  misc_feature (781)..(781): "n" may be a, t, c, g, other or unknown
  misc_feature (825)..(825): "n" may be a, t, c, g, other or unknown
  misc_feature (830)..(830): "n" may be a, t, c, g, other or unknown
agacgatccgctagccacattaggcgctcggtctctgcgtccgcccctcccgtgcctcagagacttgcgctccccaggcccgagcccctgtcggcccatcctcgagcccgtgtggctcgcgaacctctaactccagccgctgcagccccctcccaggcccggcgtccccgagccccgcgggcgccgcgcctgcccttctttggctacgctgcagccgcggtgtcggcgagtcctcccgggttgcccccgcgggcgtcagagggagggcgggcgcccgcgtggtgacggcgacgcctgcagcccaaggagcgctccactcgctgccgccggaggggccggtgacctcttggctaccccgcgtcggaggcttagatggctcaggcgaagatcaacgctaaagccaacgaggggcgcttctgccgctcctcctccatggctgaccgctccagccgcctgctggagagcctggaccagctggagctcagggttgaagctttgagagaagcagcaactgctgttgagcaagagaaagaaatccttctggaaatgatccacagtatccaaaatagccaggacatgaggcagatcagtgacggagaaagagaagaattaaatctgactgcaaaccgtttgatgggaagaactctcaccgttgaagtgtcaagtagaaacaattagaaaccccagcagcaagaatccctaaagcatgccacaaggattattgatgangtggtcaataagtttctggatgatttgggaaatgccaagagtcatttaatgncgcttctgaagtgcatggtcatctgaggtgccacatgggccagnttggntcaa

SEQ ID NO: 494 - DNA, 823 bp, Homo sapiens
  misc_feature (785)..(785): "n" may be a, t, c, g, other or unknown
  misc_feature (800)..(800): "n" may be a, t, c, g, other or unknown
  misc_feature (818)..(818): "n" may be a, t, c, g, other or unknown
attgtgggaagggcggccggtgcagccgcagctgccatcttaggggcgcctggcgctacgggtttctcgttggaggcggccttcgtggcagctgtagacgccgggaaaaggcataaagtccgttggccgacacctttctttcctccggcctcggtagaaccgccagcccgcgtccgaaggcggaggcgaggggaactggccgcgtgaggggcctgaggcgagcggttagagcgtctcccggaaggatgggccggtctcggagccggagctcgtcccgctccaagcacaccaagagcagcaagcacaacaagaagcgcagccggtcccggtcgcgatcccgggacaaggagcgcgtgcggaagcgttccaaatctcgggaaagtaaacggaaccggcggcgggagtcgcggtcccgttcgcgctccaccaacacggccgtgtcccggcgcgagcgggaccgggagcgcgcctcgtccccgcccgaccgcatcgacatcttcgggcgcacggtgagcaagcgcagcagcctggacgagaagcagaagcgagaggaggaggagaagaaagcggagttcgagcggcagcgaaaaattcgacagcaagaaatagaagaaaaactcatcgaggaagaaacagcacgaagagtagaagaattggtagcaaaaagggtggaggaagaactggagaaaaggaaggatgaaattgaacgagaagttctccgaagggtggaggaagccaaacgcatcatggaaaagcagttgctcgaagaactcgaaccgacaganacaagctgaacttgncggacaaaaaagcttganaagga

SEQ ID NO: 495 - DNA, 752 bp, Homo sapiens
  misc_feature (677)..(677): "n" may be a, t, c, g, other or unknown
  misc_feature (704)..(704): "n" may be a, t, c, g, other or unknown
  misc_feature (747)..(747): "n" may be a, t, c, g, other or unknown
gcgcacgtcccggagcccatgccgaccgcaggcgccgtatccgcgctcgtctagcagccccggttacgcggttgcacgtcggccccagccctgaggagccggaccgatgtggaaactgctgcccgccgcgggcccggcaggaggagaaccatacagacttttgactggcgttgagtacgttgttggaaggaaaaactgtgccattctaattgaaaatgatcagtcgatcagccgaaatcatgctgtgttaactgctaacttttctgtaaccaacctgagtcaaacagatgaaatccctgtattgacattaaaagataattctaagtatggtacctttgttaatgaggaaaaaatgcagaatggcttttcccgaactttgaagtcgggggatggtattacttttggagtgtttggaagtaaattcagaatagagtatgagcctttggttgcatgctcttcttgtttagatgtctctgggaaaactgctttaaatcaagctatattgcaacttggaggatttactgtaaacaattggacagaagaatgcactcaccttgtcatggtatcagtgaaagttaccattaaaacaatatgtgcactcatttgtggacgtccaattgtaaagccagaatattttactgaattcctgaaagcagttcagtccaagaagcagcctncacaaattgaaagtttttacccacctnttgatgaaccatctattggaaagtaaaaatgttgatctgtcangacgg

SEQ ID NO: 496 - DNA, 465 bp, Homo sapiens
  misc_feature (405)..(406): "n" may be a, t, c, g, other or unknown
  misc_feature (430)..(430): "n" may be a, t, c, g, other or unknown
cttagtggtgtcggggtctagtggacagagaagactcttggccaggcagatggcttctcggtggcagaacatggggacctccgtgcgccggagatctctccagcaccaggagcagctggaggacagcaaggagctgcagcctgtggtcagccatcaggagacctctgtaggggccctggggtccctgtgcagacagttccaaaggaggctgcccctgagaaccgtcaacctcaacctccgcgcagggccctcctggaaacgcctggaaaccccagagccaggtcagcagggcctccaggctgcagctcgctcagctaagagtgctttgggtgccgtgtcccagagaatccaggagtcctgccaaagtggcaccaagtggctggtggagacccaggtgaaggccannaggcggaagagaggagcacagaanggcagtggatccccaactcacagcctgagccagaa

SEQ ID NO: 497 - DNA, 830 bp, Homo sapiens
  misc_feature (620)..(620): "n" may be a, t, c, g, other or unknown
  misc_feature (736)..(736): "n" may be a, t, c, g, other or unknown
  misc_feature (801)..(801): "n" may be a, t, c, g, other or unknown
  misc_feature (827)..(827): "n" may be a, t, c, g, other or unknown
ttcagaaggccagccggcaggaggagccggacagcctctcctattactgcgctgctgagaccaacggggtgggtgcagcctcgggcaccccgccctccaaggctaccctggaggggaaggtggcttcccccaagcactgtgttctggctcggcccaaagggactccccctctgccccctgtccgaaagtccagcctggaccagaagaaccgggccagccctcagcacagtgccagcggcagcggcaccagcagccccctgaaccaaccagccgccttcccggcgggcctcccagacgagcctagcggcaagacgaaggacgccagcagcagcagcaagctcttcagtgccaagctggagcagctggccagcagaagcaactcgctgggcagggcgacggtcagccactacgaatgcctctccccggagcgggccgagagcctgtcctccgtgagctcccggctgcacgcgggcaaggacggcaccatgccccgcgcggggaggagcctgggccgcagcgccgggacctcgccccccagctccggggcctcgcccaaggccggccagtccaagatctccgccgtgagcagactcctcctggccagccccagagcgcacggnccgtccgcctccaccaccaaaaccctcagcttctccaccaagtccctgccgcaggcggtgggccagggcttcagctcgccccccggtgggaagcacacgccctggtccacgcagtnccttcagcaggaacaggaagcttcggcctgggcttcaaagctttcccttgcggggccgtcaagcngggcgcatcttcggaacttgcttcanggt

SEQ ID NO: 498 - DNA, 847 bp, Homo sapiens
  misc_feature (722)..(722): "n" may be a, t, c, g, other or unknown
  misc_feature (810)..(810): "n" may be a, t, c, g, other or unknown
  misc_feature (828)..(828): "n" may be a, t, c, g, other or unknown
  misc_feature (847)..(847): "n" may be a, t, c, g, other or unknown
tttccatgggcagggtcgacagactcccttttcagtgatttctggctctgagaaacctctttactcactagaaaagaactttatttaaatggccaattttgttcctcagaaaaagaaattaaaaaaaaagaaaaataggatactgaagacagaaccatgtgacttggtgacaaacaaaaggaggggtgcactagaatttcaataggctccctaattccatagaaaaagcaaagcaacccaatgcctcctgagcctgcagtgcatgaagagagtgcttgagctgacccagccaccaggccttctggggctagacataacttcccactggaacagcagcagcctctttcccctctttgtgttttcatgaagaaaacggctgttctcttaggtagccaggaaatagattacatggggcaaactttcaaaagcaatctctaccctggtgctcaggctacatacagaggcagaaaaggggcacggaagagcccttgctcttgagagagagtattttcatattcccaagggctttccgtgtagagttgctatttctgatatcacttaaacctttacaagaaaaaaggctgtggtgactcagtgttcctataaattcagaatgtggaaactactaatccaaagcatcacttctagcactgagtatcaagacgatcagcctgaccaaaatattgcaaagagttttctaagtctctgaagatttttttctncttgaacactgagtctatagcagtcagcaatgtccttacccgatccctggggaatgggtatggaacagtaagggcttggttccatccnttttagagtgaagagatngaaaattagggctacctan

SEQ ID NO: 499 - DNA, 819 bp, Homo sapiens
  misc_feature (659)..(659): "n" may be a, t, c, g, other or unknown
  misc_feature (676)..(676): "n" may be a, t, c, g, other or unknown
  misc_feature (755)..(755): "n" may be a, t, c, g, other or unknown
  misc_feature (782)..(782): "n" may be a, t, c, g, other or unknown
  misc_feature (815)..(815): "n" may be a, t, c, g, other or unknown
gtcataaacaagccatgcaaggtttcaagctctacatgccacggggtcggtactggcggcttcgtctctgtcctgaacctcccagtgctcctagtgagtatgctggtttagtggtccgcaccgtactggagcctgtgttgcaaggattgcaagggttgccacctcaagcccaggcccctgcccttggtcaggctctgacggccatcgtgggtgcctggcttgaccacattcttacccatgggatttggttcagcctgcagggagcgctgcagctcaaacaagactttggagtggtcagggagttgctggaagaggagcagtggagcctgtcccctgatctccgccagaccctgctcatgctcagcatcttccagcagctggatggggccctgctgtgtctgttgcagcagcccctgcccaagtctcaagtccacaggaggcccccctgttgctgtgagttactccccttcgctcactgctttgtgtgtcccaaaccctattctcaccattaatctggcttcagtatatccccagcagccacctaccttccactcctgccttaccaggtgcttgtcaggaggtccagaccacgaaattgcccagcagctgcctcaatagcctggagagcttggagcccccgctccagcctggaacatctncagcccagacaggtcanctgcaaagcacactaggaggaaggggacctagcccggagggctacctggtgggaaaatcagcaggcctggcttggcctnaggcaacaccaagcgaaccccgttggnaccctggccgtttttttccttgccttggggaanccag

SEQ ID NO: 500 - DNA, 711 bp, Homo sapiens
  misc_feature (660)..(660): "n" may be a, t, c, g, other or unknown
  misc_feature (692)..(692): "n" may be a, t, c, g, other or unknown
  misc_feature (702)..(702): "n" may be a, t, c, g, other or unknown
atgcagcagatccgcccgcccttcatccgcgggcctccgcaccatgcctccaaccccaacagccccctgtccaaccccatgcttcccggcatcgggcccccgcccggtggccccagaaacctgggccccacttccagccccatgcaccggcccatgctatcgccccacatccaccccccgagcacccccaccatgcccgggaaccccccaggcctgctgcccccgccgcctccgggcgccccactgccgagtcttcccttcccgccagtgagcatgatgccaaatggcccgatgccggtgccccagatgatgaatttcgggctgccgtcgcttgccccgctggtgccgcccccgaccctgctcgtgccgtaccccgtgatcgtgcccctaccggtgcccatccccatccccatccctatccctcacgtcagcgactccaagccccccaagaagctgctgtcgcctgaggaaccggcggtgagcgagctagagtcggtcaaggagaataactgtgcttcaactgccacctggacggggaggcggcaaaaagctgatgggcgaggaggccctggcggggggcgacaagtcagacccgaaccttaataaccccgcggacgaggaccatgcctatgctctgcggatgctgccaagaccggctgngtgatccagcctgtgcaaaacccgcggagaangctgcatggnaccgtgcat

SEQ ID NO: 501 - DNA, 840 bp, Homo sapiens
  misc_feature (789)..(789): "n" may be a, t, c, g, other or unknown
  misc_feature (806)..(806): "n" may be a, t, c, g, other or unknown
  misc_feature (834)..(834): "n" may be a, t, c, g, other or unknown
ttgccagctatccacctcagagtggatatgctaacagggatgtactaaaaattgcaaacattgaaggcttctctaatcccagatacacaacaaaataccatccaagaccataccacacagagacttccaaggccatccttggaaaaatggagaagtagaaggcccccattattttattttatttttatttttttgagatggagtctcgctctttcacccaggctggagtgcagtggcgcgaacttggctcactgcaagctctgcctcctgggttcaagccattctcctgcctcagcctcctgagtagctgggactacaggtgcccatcaccaggcccggctaatttttttgtatttttagtaaagacagggtttcaccatgttagccaggatggtctcgatctcccgacctcataatccgcccgcctcagcctcccaaagtgctgcgattacaggcgtgagccaccgcgccttaaggcccccattcttaactgttaactcctgaattggggatttctgtcaatctagcagaaactccaaaaggattctctgtactagaaccttgattgtctgatcacccctgtttcttatttttcttatttttaggcattaattccaaaaacatccatcagacagacatttaggaagtgttctttctatacaacagagacttggacaggtgaatcagaccacagtccttggttcattaagttttcaattttggaaggggaaggaaaggagaatgagacagccaaaaacttggctaactggtactgaagtgatgggtgangacaggagacagagccnttaattctgctggactagcagatggggnctttca

SEQ ID NO: 502 - DNA, 745 bp, Homo sapiens
  misc_feature (536)..(536): "n" may be a, t, c, g, other or unknown
  misc_feature (598)..(598): "n" may be a, t, c, g, other or unknown
  misc_feature (606)..(606): "n" may be a, t, c, g, other or unknown
  misc_feature (685)..(685): "n" may be a, t, c, g, other or unknown
  misc_feature (712)..(712): "n" may be a, t, c, g, other or unknown
  misc_feature (732)..(732): "n" may be a, t, c, g, other or unknown
ggctcctcccccaccggccttcaccttttgttccctatcctgggccagttctctcgcaggtcccagatgtccagttccagatgcctggacccagagtgtgggggaaatatctctggagaagccctcactccaaaggctgtccaggcgcaatgtggtggctgcttctctggggagtcctccaggcttgcccaacccggggctccgtcctcttggcccaagagctaccccagcagctgacatcccccgggtacccagagccgtatggcaaaggccaagagagcagcacggacatcaaggctccagagggctttgctgtgaggctcgtcttccaggacttcgacctggggccgtcccaggactgtgcaggggactctgtcacaatctcattcgtcggttcggatccaagccagttctgtggtcagcaaggctcccctctgggcaggccccctggtcagagggagtttgtatcctcagggaggagtttgcggctgaccttccgcacacagccttcctcggagaacaagactgcccacctncacaagggcttcctggcctctaccaaaccgtggctgtgaactatagtcagcccatcagcgangccagcangggctctgaggccatcaacgcacctggagacaaccctgccaaggtcagaccactggcaggagccctattatcaggccgnggcagcaggggcactcacctgtgcaancccagggacctggaaagacngacaggatgggga

SEQ ID NO: 503 - DNA, 812 bp, Homo sapiens
  misc_feature (556)..(556): "n" may be a, t, c, g, other or unknown
  misc_feature (577)..(577): "n" may be a, t, c, g, other or unknown
  misc_feature (733)..(733): "n" may be a, t, c, g, other or unknown
  misc_feature (764)..(764): "n" may be a, t, c, g, other or unknown
  misc_feature (798)..(798): "n" may be a, t, c, g, other or unknown
agcaaagagccgaggccgggcgcgcgaccctcgtccttctgcccctggccgcacactttgcgcacatctctttttctgcatggtggatattatttttcattatccttttctgggtgctatgggtgatcattccaagaagaagcccgggacggccatgtgcgtgggctgcgggagtcagatccacgaccagtttatcctgcgggtgtcgcccgacctcgagtggcacgcggcctgcctcaagtgtgccgagtgcagccagtacctggacgagacgtgcacgtgcttcgtgagagacgggaagacctactgcaagcgggactacgtcaggctgttcggcatcaagtgcgccaagtgccaggtgggcttcagcagcagcgacctggtgatgagggcgcgggacagcgtgtaccacatcgagtgcttccgctgctccgtgtgcagccgccagctgctgcctggggacgagttctcgctgcgggagcacgagctgctctgccgcgccgaccacggcctcctgctcgagcgcgccgcggccggcagcccgcgcagccccggnccgcttcccggcgcccgcggnctgcatctgcccgacgctgggtcgggccggcagcccgcgttgcgccccgcacgtgcacaagcagacggagaagacgacccgcgtgcggactgtgctgaacgagaagcagctgcacactctgcggactgctacgccggcaacccgcggccgacgctntcatgaaggagcacttgtggagatgaccggnctgagcccccggggcattccgcgtttggttccanaacaagcgcttgaa

SEQ ID NO: 504 - DNA, 792 bp, Homo sapiens
  misc_feature (712)..(712): "n" may be a, t, c, g, other or unknown
  misc_feature (716)..(716): "n" may be a, t, c, g, other or unknown
  misc_feature (755)..(755): "n" may be a, t, c, g, other or unknown
tctaaaattcctataattttttgctgcatattatcctcatccccaaaataacatccattttaaagtgtatagttgaggggaaggatgctgtttttggtataagttgtcaaatatggaacatttgacctggagagggctaaaatcaatatttaatcctcagagcttcacctgtcaaaactatttaagtctgcagaaaatcaagattgaaatgaaaactaccaaccagctgaacatccaaaacgtcaaattccttaacatgatgtaaaaaatgtaagctaaaaggaattagtccattttgatagcagcaatagagagccctgtgtattcgtattcgactttcatggaaaggttcttctgtggcaagaccacctgtggaactagtacctaaacacacagatttgttttattttagagcttcacaatttgagatctcaaaatacaaaacctaataaggctgaaacacagggtctatgaaggctaagaacccacattaattcaaaaagttgacacagctaaacatcttacaagcatgaggtgagaactgcagaaaccaaagctgtgctaacatctcacctctactgctttgatgtgatctagatgcacagttagcttcagtgtggcccgttatctaatagaaccatctttcaaggcttttcattagaaatgacaaaaagccagttgctctggctgtgtggcttcagaggcacatttncagntaatcagtacaaccaaagtcaacctaatagttgactggnatttaatttattttaatttacttttattatagaacta

SEQ ID NO: 505 - DNA, 726 bp, Homo sapiens
  misc_feature (702)..(702): "n" may be a, t, c, g, other or unknown
  misc_feature (704)..(704): "n" may be a, t, c, g, other or unknown
  misc_feature (713)..(713): "n" may be a, t, c, g, other or unknown
cttcgctctagctgggaggctgacggcccgcgggcgtaagcggactgcagccgcgagctcctggaggcggcgggatggaggcggcggccgagcctggaaacctggccggcgtcaggcacatcatcctggtcctctcaggaaaggggggcgttgggaaaagcaccatctccacggagctggccctggcactgcgccatgcaggcaagaaggtgggaatcctggatgtggacctgtgtggccccagtataccccgcatgctcggggcgcagggcagggctgtgcaccagtgcgaccgcggctgggcacccgtcttcctggaccgggagcagagcatctcgctcatgtctgtgggcttcctgctggagaagccggacgaggccgtggtgtggagaggccccaagaaaaacgcgctgataaagcagtttgtgtccgacgtggcctggggggagctggactacctggtggtggacacgcccccggggacctccgatgagcacatggccaccatagaagccctgcgtccctaccagcccctgggggccctcgtggtcaccacgccccaggcggtgtccgtgggggacgtgaggcgcgagctgaccttctgtaggaagacggcttgcgggtgatgggaatcgtggagaatatgagcggttcactgccacactgacgatgaccacgttttcaggcgcgaaagactgccantngcggtgctntagtcgcctgact

SEQ ID NO: 506 - DNA, 762 bp, Homo sapiens
  misc_feature (587)..(587): "n" may be a, t, c, g, other or unknown
  misc_feature (683)..(683): "n" may be a, t, c, g, other or unknown
  misc_feature (748)..(748): "n" may be a, t, c, g, other or unknown
  misc_feature (757)..(757): "n" may be a, t, c, g, other or unknown
ataaaaagaatggctttgcactgagcagctcagtctactggtctcatcagtgaaaggcttgtgaaaatttctggaaagagcattggctggcttgttcatctctctgtttggtcagttgctgtgtttctgccggatcagatgagcagattggttagtgaaggtcagtgtgagaagaagattgtttctgagcttgagaagcttctggaggattgaagagtatttgaagtctgtgtcaaacatccacatcataagtggaattttggagatattcaaagaatgctgtcagaagggtatctcagtggacttgagtactggaatgacatccactggagttgtgcctcttataatgagcaggtggctggggaaaaggaagaggagacaaattctgttgctaccctttcctattcctctgtggatgaaacacaagtcagaagtctctacgtgagctgcaaatcatctggcaagtttatctcttcagtgcattcaagagagagccaacatagcagaagtcagagagtcacagtgctgcagacaaaccccaatcctgtgtttgaaagcccaaacttggctgcagttgaaatatgtanagatgccagcagagagacctacttggttccatcttcttgcaaaagtatttgcaagaactataatgacttacagattgcagggggccaggtgatggncattaattcagtgacaccagattttcctctgagagcagttttgaatatggccctttgcttgaaancattctganaatcc

SEQ ID NO: 507 - DNA, 786 bp, Homo sapiens
  misc_feature (654)..(654): "n" may be a, t, c, g, other or unknown
  misc_feature (738)..(738): "n" may be a, t, c, g, other or unknown
  misc_feature (771)..(771): "n" may be a, t, c, g, other or unknown
  misc_feature (785)..(785): "n" may be a, t, c, g, other or unknown
acaacgctgccgccgcgctccgtgggcaactcctactactgctgggctgggctgggctgggctgggctgcgccggagctcgcctgcacagatcagctccggagaggggagaaccacgctcctcggaccaagcctcgggagctaagccagatctgccagtgagcctcaggctttaggaactgaagagtgtttctgaaagatctatccagcactccgatggccagcaacaacaccgccagcatagcacaagccaggaagctggtagagcagcttaagatggaagccaatatcgacaggataaaggtgtccaaggcagctgcagatttgatggcctactgtgaagcacatgccaaggaagaccccctcctgacccctgttccggcttcagaaaacccgtttagggagaagaagtttttctgtgccatcctttaagtctttgagaggggcctgaagagcctccgggctcctgggacattgatgtagagtttttagtgaagtgggcacctttctagtccacggcatttgaagagagcgaggagaaccattctggaaactctaggctatgcatgtttaaagatctggtcccctttatgagaatgcaagccgatccacatcctgacttaagagatctgattctgacgaactgctggaggangggaatatataaaaataaaattggtgtcacttcttttctgctatccccaagcccccccccccaaaatcctcatggttctgcttnatattttggaaaataaccattaaaacagacagntgtactgaggtaana

SEQ ID NO: 508 - DNA, 860 bp, Homo sapiens
  misc_feature (135)..(135): "n" may be a, t, c, g, other or unknown
  misc_feature (508)..(508): "n" may be a, t, c, g, other or unknown
  misc_feature (715)..(715): "n" may be a, t, c, g, other or unknown
  misc_feature (786)..(786): "n" may be a, t, c, g, other or unknown
  misc_feature (790)..(790): "n" may be a, t, c, g, other or unknown
  misc_feature (830)..(830): "n" may be a, t, c, g, other or unknown
acaccatgccgactgtcagcgtgaagcgtgatctgctcttccaagccctgggccgcacctacactgacgaagaatttgatgaactatgttttgaatttggtctggagcttgatgaaattgctccgtagaatttgngacagccctggctgacctccgagcagaggctagctgtcccatctgtctggactacttgaaagacccagtgaccatcagctgtgggcataacttctgtctctcctgcatcattatgtcctggaaggatctagatgatagtttcccctgccccttttgccacttgtgctgtccagaaaggaaatttataagcaatccccagctgggtagtttgactgaaattgctaagcaactccagctaagaagcaagaggaagaggcaggaagagaagcatgtgtgtaagaagcataatcaggttttgactttcttctctcagaaagacctagagcttttatgtccaaggtgcagtttgtccactgatcaccagcatcgctgngtttggcccataaagaaggctgcctcctatcacgaaaaaactggagcaatacaatgcaccgtggaaggagagagtggaactaattggaaaaagtcataactatacaaaccagaaaatcactggaactgaagaaaaaggtaaaacatacggcagaagaagtcaagtctgaattttgagcaacttagggtatttctgcaaaatgagcangagactggtttgggcaattacaagatgacgagatggatattttagcacaactaaatgaaagcctaccaaantttnagatatcctctcattaaatatctactaagagatagagagntatatgtgaagcagactggaatactggctg

SEQ ID NO: 509 - DNA, 678 bp, Homo sapiens
  misc_feature (635)..(635): "n" may be a, t, c, g, other or unknown
  misc_feature (651)..(651): "n" may be a, t, c, g, other or unknown
  misc_feature (675)..(675): "n" may be a, t, c, g, other or unknown
tcgggctccgcgggcgggcgggcggacatggcggccaacatgtaccgggtcggagattatgtctactttgagaattcctccagcaacccatacctaataagaaggatagaagaactcaacaagactgcaagtggcaacgtggaagcaaaagtagtatgcttttatagacgacgtgatatttccaacacacttataatgctcgcagataagcatgctaaagaaattgaggaagaatctgaaacaacagttgaggctgacttgaccgataagcagaaacatcagttgaaacatagggaactctttttgtcacgccagtatgaatctctgcccgcaacacatatcaggggaaagtgcagtgttgcccttctgaatgagacagaatcagtattgtcatatcttgataaggaggataccttcttctactcattggtctatgacccctcattgaaaacactattagctgacaaaggtgaaatcagagtgggacctagatatcaagcagacattccagaaatgctgttagaaggagaatcagatgagagggaacaatcaaaattggaagttaaagtttgggatccaaatagcccacttacggatcgacagattgaccagtttttagttgtagcacgtgctgntgggacattcgcaganccctggattgcagcagtctgtgangca

SEQ ID NO: 510 - DNA, 769 bp, Homo sapiens
  misc_feature (715)..(715): "n" may be a, t, c, g, other or unknown
  misc_feature (743)..(743): "n" may be a, t, c, g, other or unknown
  misc_feature (768)..(768): "n" may be a, t, c, g, other or unknown
ttttttttttttaacttgaattgatagttggtttataatcctggagttgtatatgttagggtttgctattgagaagtataggagtgtattaactctgataaatgaagtgggctaattagtatttcagtttaattttctgcaattgcatttaagtttgtgatcagttcttttctcctcactgtataactttttcctgaagatttgtataattattagtggtaaaaactccatcttagttgcttatgattttaatgtcaatttgaggaagatatcaccatatagaaaatacttagaagtagcttattttaaaaatattcatttgcttttcttccaaacacgtggtcacttagcaagcagtgattcaattattcatagtcctcagtatttatgtaatgccaaagaagtggaagaaggggaagtgaagtgagaaaggaaattaggcagacaagtgaatcagagggcaagagaaatgagtaatgcaaaaggggaaggaaatgatggtcagagcacacatgccttgcagcatgagcaaagaaaatgtgctaaacaaaactacagtcagaatcatagaaaggataaggttttagagaggttttgttgttttttaaacattcatgtgagctaaatataatgcaggtattgaaatgattactgcagatatgccagatgaccttgatatctattttcatgttaatcttctggtatttggtggtgntgaattggtacccccacgttttacctgngtaagtgaattgaaatattcaaggnc

SEQ ID NO: 511 - DNA, 802 bp, Homo sapiens
  misc_feature (770)..(770): "n" may be a, t, c, g, other or unknown
  misc_feature (772)..(772): "n" may be a, t, c, g, other or unknown
  misc_feature (783)..(783): "n" may be a, t, c, g, other or unknown
taacaaatcatttcgtattaggttccattaaaatgtcattcctttgaaaaggcaagggatttccactttcagaatttgaaaatgaaagtagcatgtttatctaaaggcagaaaatagttcggacttggtattatgaaaataagtaatggtttctggagaggatttgtttagatttgcacagatggcgatggcaccttttacttaaattaacattaatcaacagtgctaaggaaaatttacacaaaattacaagataaaacatggaaatgtgtgcctttcagtatacaaactcttgcttggtggccatttgggtaatcagaccatttgaatgcctgagagcatgtttaatttctgtggagtgccacatatggctaaaacaactctttaatgtgcaattaatttctagagtaaaatgtctgttatgtgagggggatctttatgttgggcttttctattttttaaatgttcacatttctttctgttaattaaatgccatcataatgtcacatttacactgttgcctcttttaaaagcaaagccactttcttgttctaagattacatcaagacttgagcagtgtgtagtaattaaaatgtgtgcttaatgagcataatagattctggttttaggaaataacatatagcttttatatgaatattttcttttgctataatgaaagtcacagattttttttttcctgcttttatggaggaatgaaaagagttggctccctctaagagtatactatttttgatctcatagcataatgncnccttcttatcnaagggaaatccccctggat

SEQ ID NO: 512 - DNA, 782 bp, Homo sapiens
  misc_feature (689)..(689): "n" may be a, t, c, g, other or unknown
  misc_feature (705)..(705): "n" may be a, t, c, g, other or unknown
  misc_feature (738)..(738): "n" may be a, t, c, g, other or unknown
tatgcacaggcacacaagaattgtgggcagatgagtgagattgaggccaaggtccgctacgtgaagctagcccgttctctcaagacttacggtgtctccttcttcccggtgaaggtaggttatggacccttttcactgccctccttgtttcccactcttgcccttttctgtctctgaaagtctctggccttgccctcagtcacatctcccaccattccctaagattcccattctcttccttgctctgacctcatgaaaacctgcctgtcatcagccctacaccaccacttccctccctaccctgcattttcccttgtccgttagccctcccggccacctcaacatcccctatggctgcaagctgatctgatcattcacctctcatttgacctttgacctgtaacaccaacaccaacctctgcctcataggaaaaaatgaaagggaagaacaagctagtgcccaggcttctgggcatcaccaaggagtgtgtgatgcgagtggatgagaagaccaaggaagtgatccaggagtggaacctcaccaacatcaaacgctgggctgcgtctcccaaaagcttcaccctggtaagtctggggactataacaagaaagtgctttgggagtttcattaaaggggcagctgcagaggtctcttccctctcttggggtaagtatactgagtattactncagaaaaaaaggaggntagagtagatggagaatcttcctctggggaaantgtgaaggctttaaaatggaaaaccggatgaatggacttaattc

SEQ ID NO: 513 - DNA, 893 bp, Homo sapiens
  misc_feature (680)..(680): "n" may be a, t, c, g, other or unknown
  misc_feature (769)..(769): "n" may be a, t, c, g, other or unknown
  misc_feature (856)..(856): "n" may be a, t, c, g, other or unknown
  misc_feature (866)..(866): "n" may be a, t, c, g, other or unknown
  misc_feature (870)..(870): "n" may be a, t, c, g, other or unknown
gtgcatttgtgttgtgggggcatggggtgcatttgtgtgtatatatgtgtggatgtagggtgcgtttgtctgtgtgtatttgtgtgggcatggagtgcatttgcgttgcgggggtgtggagtgtgtttgtgtgtgtgcacacgcacatggttctcatggtcctcccgttttcaactgaacctgtaattagctcctcagagaccaggtttcaagacaacagatgaattgtgaaagagagcagctaaggggtaatcaggaagcagccgctgcccctgacacaatggctcagccttacgcttcggcccagtttgctcccccgcagaacggtatccccgcggaatacacggcccctcatccccaccccgcgccagagtacacaggccagaccacggttcccgagcacacattaaacctgtaccctcccgcccagacgcactccgagcagagcccggcggacacgagcgctcagaccgtctctggcaccgccacacaggcagatgacgcagcaccgacggatggccagccccagacacaaccttctgaaaacacggaaaacaagtctcagcccaagcggctgcatgtctccaatatccccttcaggttccgggatccggacctcagacaaatgtttggtcaatttggtaaaatcttagatgttgaaattatttttaatgagcgangctcaaagggatttggtttcgtaactttcgaaaatagtgccgatgccggacagggccaagggagaaattacacgggaccgtggtaaaanggcccgtaaaatcgaggtaaataatggccccacacgtgtaatgaccaattaaaaagaaccgtcaaccctttatacaaaagggctggnaaattgaatnccanttgtgggtgcaagtctaacagtc

SEQ ID NO: 514 - DNA, 784 bp, Homo sapiens
  misc_feature (636)..(636): "n" may be a, t, c, g, other or unknown
  misc_feature (720)..(720): "n" may be a, t, c, g, other or unknown
  misc_feature (726)..(726): "n" may be a, t, c, g, other or unknown
  misc_feature (764)..(764): "n" may be a, t, c, g, other or unknown
aatgtgtatgtggcaaaaacatttttaaagtttagacccaaaggccgtagttataaaagattcattttgagtcagtcaataggaatttatgtttgtggaattgtttttgaaaactaatcatttaaaatctatcatagtctatggattcacctcatttaataaataatcagaataatagctaacagttgttatattaggcagttttctaaatgtcttacatgtcttatttaatctccacataattctctgacttaggtagtattctcattttatagataaggaatctgaattaaatttaaaaattatttctatattaacaaaagtattaagctaaaaactacagagctggttctagtatatttcaatgtaaatgttaacataatatgtctacttatttttatctagattttcttgccatataaggatcataattgaaaagtagcaagttacagtagatggacaagcaattaagggagaaataatctaatatattaagtttattactaaattttttgttattggtttttaatctttgctttttttctgttagcctaaatggaaaatattattgtgtatggaggggatggagggtatacaaataatatatagtttacatgcagggaaatgagtaattgnaatgcatatatgatgtagaattctttactcttttttttccctataaaattttaaaaatttggttcctgaattttttttctcagnctttanatgaccttttaaaaggttccttctggagacctcaagtncacttcatgcctacatttca

SEQ ID NO: 515 - DNA, 794 bp, Homo sapiens
  misc_feature (635)..(635): "n" may be a, t, c, g, other or unknown
  misc_feature (657)..(657): "n" may be a, t, c, g, other or unknown
  misc_feature (785)..(785): "n" may be a, t, c, g, other or unknown
  misc_feature (788)..(789): "n" may be a, t, c, g, other or unknown
tatgtacttagaatttgagttctgataattcatttttttatgggaggtggggaggtttattttttaaattgcagtccaaaggagtaaatttgatgttacattggacagtttattcagataccacaaactttacagatttaattagatagataatggatgatgttaaaaactaagcagcatcttaagtttaaatttttatttttatttctttttctgtcatcattatttatgaaaactggttgaaaatgaagttaaaagattttctgtacatcataagattggacagaaatattatttaccttaaaactttttctgagtaaaaatttaaacataaactagaactcagcctgaatttttttttaaaccatctttggaagcacatataaaagtagagtaaatacatcgaatgtagcttacctactgcatttgaagaaaatcttttgtgtatgtctgtaagctatttgtgtgttttgaaacagtttaccagaatagactgaaactggtagaaacaggcataagtaactctgcagtggtagttgtattgaaaactggaatggtagtctctttcaaaatcttgaagagatggaaactaatgaatctttttttttttttggtaaaatagtatttttttttgntcacttaaatgaaattatttgnactttaagttttgtccaggaaattacttcagttggagctaatttattggcaccctttactaacaaatttctggtctggattaagattagtattggaaaaaaaaggagatgttggaaattaagaaagcnccnnaaatt

SEQ ID NO: 516 - DNA, 692 bp, Homo sapiens
  misc_feature (403)..(403): "n" may be a, t, c, g, other or unknown
  misc_feature (680)..(680): "n" may be a, t, c, g, other or unknown
  misc_feature (682)..(683): "n" may be a, t, c, g, other or unknown
gtagctggaaggggaggtggggcaagggaggggacccccagcctgtcacctgggttgcctgcatggtactgagtgagctggtggcttctgtgtgggcctctggctgtggggatggtcagacaggaatagacacaatgctgcccaccctctgcatgcatgtgtgtgctggcatgcacacacacgtgtgcacacacatctacatgcacatacccacacgtgcatacatacatgtatagacatacacctttgtgcatacacacaggtatagacatacacctttgtgcatacacatacattatacacacatgtacatagacacacatacacatgtgcacacacctataggcagagcccactccttttcccctgatgaggttgtggtggtattaataatcataatggnagatgatatttactgaatgcttactgtgcatgatatgttccactgacagttttacatccattatcttaatcttcacagccccttgtgggataggaagttggccacattgcccacatccagtagccagtgaatagttgtgcttggagtttgccctgtaggctgacttatgagccatagcccaagtcacatcccgagaacacacaatacggggagcccctccttaggggaaaatttctttccaaaatatcacctcataccttgctcagggaatactctntnnggtataagt

SEQ ID NO: 517 - DNA, 785 bp, Homo sapiens
  misc_feature (697)..(697): "n" may be a, t, c, g, other or unknown
  misc_feature (739)..(739): "n" may be a, t, c, g, other or unknown
  misc_feature (784)..(784): "n" may be a, t, c, g, other or unknown
ctcacgcagccaacatggctccagtggagcacgttgtggcggatgctggggctttcctgcggcatgcggctctgcaggacatcgggaagaacatttacaccatccgggaggtggtcactgagattcgggacaaggccacacgcaggcggctcgctgtcctgccctacgagctgcggttcaaggagcccttaccggaatacgtgcggctggtgactgagttttcaaagaaaacaggagactaccccagcctctctgccacggacatccaagtgttgcactcacataccagttggaagcagagtttgttggggtgtctcacctaaaacaagaaccacagaaggttaaggtgagctcatcgattcagcacccagaaacacctctgcacatttctggtttccatctgccctacaagcctaaacccccacaagaaacagaaaaaggacactcagcttgtgagcctgagaacctggaatttagttccttcatgttctggagaaaccctttgcccaacatcgatcatgaactgcaggagctgctgattgacagaggtgaggacgttccaagtgaggaggaggaggaggaagaaaacgggtttgaagacagaaaagatgacagcgatgacgacgggggtggctggataacccccagtaacatcaagcagatccagcaggagctggagcagtgtgacgtccccgangacgtgcgggttggctgcctgaccacagacttcgccatgcanaatgttctgctgcaaatggggctgcacgtgctggccggtggaacng

SEQ ID NO: 518 - DNA, 901 bp, Homo sapiens
  misc_feature (2)..(2): "n" may be a, t, c, g, other or unknown
  misc_feature (794)..(794): "n" may be a, t, c, g, other or unknown
  misc_feature (799)..(799): "n" may be a, t, c, g, other or unknown
  misc_feature (878)..(878): "n" may be a, t, c, g, other or unknown
antcgcgatccactacccaatccatgggcaccaccgccagctacccagagttctgcaactaccagcacgaccacaagcactggtagtgggtctggcaatagttccagcaatgctactgggaacaccgttgctgccgctaattatgtcgccagcatctttagtaccccaggcatgcagagcctgctgcaacagataactgaaaacccccagctgattcagaatatgctgtcggcgccctacatgagaagcatgatgcagtcgctgagccagaatccagatttggctgcacagatgatgctgaatagcccgctgtttactgcaaatccacagctgcaggagcagatgcggccacagctcccagccttcctgcagcagatgcagaatccagacacactatcagccatgtcaaacccaagagcaatgcaggctttaatgcagatccagcaggggctacagacattagccactgaagcacctagtgaaaccacgagtcatacatcagaatcaggacccaaccagcagttcattcagcaaatggtgcaggccctggctggagcaaatgctccacagctgccgaatccagaagtcagatttcagcaacaactggaacagctcaacgcaatggggttcttaaaccgtgaagcaaacttgcaggccctaatagcaacaggaggcgacatcaatgcagccattgaaaggcttcttggctcccagccatcgtaatcacatttctgtacctggaaaaaaaatgcatcttattttttgataatgggttcttaaatcttttaaacccnccccnccaaaatcggttcttttacttttcatttttggattctttttaaaactgggctaagttggtaaagtcttaattatggaangcatttttaaagaaagggaggcc

SEQ ID NO: 519 - DNA, 771 bp, Homo sapiens
  misc_feature (703)..(703): "n" may be a, t, c, g, other or unknown
  misc_feature (761)..(761): "n" may be a, t, c, g, other or unknown
  misc_feature (767)..(767): "n" may be a, t, c, g, other or unknown
atatgggctctccggactggaaagaatcttaggggtcctctaatctaaccctcacatgatgcttcaactcctccagatcatctctaacatagccagagtgtcacgctatgtttaagcatcttcagggatgggaaaatcccccacacccagccttcatcatccatatcccagaccacttccatgtgacgtcccactggcccccaaagacgctccacccagcagcctctcagccagagccatctgttcctggccttaccaactcctgggcttcctccagccttgctgaccccatggctctggcctcacttttgtttcagtcaaggagaaattgactgctgaccctgacagtgaggtggccactacaagtctccgggtgtcactcatgtgcccggtgggtaaaaggggagaagggaacagggtgggaagggagttgggtttagcctgtggactttgatgagggttcctagggatactggcgtgaagttttctgggatgaaatcagagtagggcctctgacaagagaacttgcttctcctcagctagggaagatgcgcctgactgtcccttgtcgtgccctcacctgcgcccacctgcagagcttcgatgctgccctttatctacagatgaatgagaagaacctacatggacatgtcctgtgtgtgacaagaaggctccctatgaatctcttatcattgatgggtanggccatttgctttcctcttacctgggacatccactagaacctcttttcttgggtaatncttttncttt

SEQ ID NO: 520 - DNA, 684 bp, Homo sapiens
  misc_feature (650)..(650): "n" may be a, t, c, g, other or unknown
  misc_feature (653)..(653): "n" may be a, t, c, g, other or unknown
  misc_feature (660)..(660): "n" may be a, t, c, g, other or unknown
caaataccctctgccatcttctgtgcctagaacatttattccaatgaaagtgttgatgtcaacttcacagaagaggaaagtgagattcagaaggcacttaaactgcatcatagaagacctttgttttcattaggctttgctttcaatccgtttcatcatacaaaagttggaaagcaaaaccagactaattccaaactctcttcactgcatcatgctgttttctaataagcaaatgactttttaaattgggattaattatggagccaccatttctggcttgtgctctcattacctcaagttctcgattttaacatataaaattcaaattcagtatattctaattagttataaaaccaaactgctcagtttacaaaactcccaaagaatatgttgaagtttttttccatgcaaatgtatcttattgaaatgtcaaatcattgaggctgatttatagagatgtagatcatcccacttttggatagatgtgccttgaatatctactgtctaacaaacaataaacacttatcaataaaggtgagttactggtattgatgaaaacagtcagagaatatactttatttaaaaaacatttacaaagaactcttaaaactcaacaataagaacttaacagatatgccccaaagaagttntcngatgacnagtaagatttgaaaaaaaatgctg

SEQ ID NO: 521 - DNA, 833 bp, Homo sapiens
  misc_feature (762)..(762): "n" may be a, t, c, g, other or unknown
  misc_feature (824)..(824): "n" may be a, t, c, g, other or unknown
  misc_feature (829)..(829): "n" may be a, t, c, g, other or unknown
aaaaatcattcattcatctaacaaacttattgagcacctatcatgtatcaggtaatattctagataatgagcatataagatgtaagcaaaacaaagtcctagtgctaaaaaacaaaagcacattctggtaatagatatgtgacaatagacaaaaagatataatatgttaggtggtaactatcataaagtaaaataccatttaaaaactcaggtgcaaacatagaaaaatggaaagagtgctgctccaaccttaagaaaactactgaataatctataaaatcataacttttcttgagtcccatagagagctaacatcccaggacaatcatgcggcctgaaatctaaggaaatactggcacctccaaggagagatgggacacagacactggcctgcctgtggcagaatgtggcagatgcaagtgccacacaagcacttaagaagaaatcaggtaaaaattttagtgaatttataaagaccaagcgtggcctagagtaaacccctttaagctgcagacatccagggagttcacactcactagtgtgagaaagactggaggcaggagagagattgatgacagccttcctcagtggtgtgagcctggaagaggagatagctcccaccacaaaaaggcagggggccttaccaacccttctccatagttaacgaaagccttcagttgctgaggaagatcagcaaaccctgtcagcttggggcactgcatcttgggtagggaaaaaattaaaacccacttacttcctggngggttggagcaaggaaacccaacctggggccttagcaccatttagaagggcttcctactggntgggnaaaa

SEQ ID NO: 522 - DNA, 696 bp, Homo sapiens
  misc_feature (660)..(660): "n" may be a, t, c, g, other or unknown
  misc_feature (691)..(691): "n" may be a, t, c, g, other or unknown
  misc_feature (695)..(695): "n" may be a, t, c, g, other or unknown
gaaatagaacaatatgttttcaagaaaacaggtatttcatattaaaaccatgtgaatgtgtaagtcttagggacagatttggtttatctcaagataataaaatcttaaggaatattttttgagaagagatgtcagaacacttttccctatattaattcaatcctgtttttagaattaaacatatagaagaattaaacatttagaatgaaacatatagaagactgaatagattaagtgtttttctctgaagacatatagttaatactggacaagacttaaaaattatattttgggacacattcttacaggtaaattgcttctcggatttaaataagatattttctaaaatatattactttcagatcaccagagatttgttttttgtttgtgtatattttataaagtaaattgcactccagtactctaaactgtgtactaagcaaagaagggttgtgccttctgacatattacactgagtactcaggatagaaaaagtaataatcttatactggctgggtgcgatggcccatgcctgtaatccaagcactttgggaggccaaggcaggtgaatcacttgagctcaggagttcgagaccaacctgggcaacatagcaagaccccgtgtctacaaaaaatacaaaaattagcctgcattgcggnacacacctgtaatcccagccattcaggaggntaang

SEQ ID NO: 523 - DNA, 828 bp, Homo sapiens
  misc_feature (656)..(656): "n" may be a, t, c, g, other or unknown
  misc_feature (731)..(731): "n" may be a, t, c, g, other or unknown
  misc_feature (802)..(802): "n" may be a, t, c, g, other or unknown
  misc_feature (824)..(824): "n" may be a, t, c, g, other or unknown
tggacaagaaggaaaatcccctgggtttgttcatgaagagcacccatacctaaacctgacaaaggcagaaaataaaaaagacaactgtaggccagcagttctcaaactttttggtctcaagactcctttacactttgaaaaatcagtgagaaccctaaacagcttatttatgtgagttatatgcataaatatttaccatgttggaaactaaagcagaaactttttaagaatggagaaatatgtaattttactaagaagtaaataaacttgtctttcttttccccattcctgaatttaccatattgatgtttagttttatttttttgtttgtaggtgtcaaaatagcattttaaaggcactgctgaattattccatcatactacagtatgaatttgtgcttgtcataatttgtgacttatatgctattgaaattttagccaaactaaatctgtacacaaagggtgtgtgtataagaatgttcatgggctgggcacagtggctcacacctgtaatcccagcactttcatagacctaggtgggaggatcgctggagctcaggaggtatattcatttcttattgatgagggcttagatgctttgcctgttgcttttgctctgtgatagtttgcacatcatgtcagctgctccacccttangctcaaaagggatttccctggcaccacccttatagttcccactttagctggaccacagggaaaatatttaacagnctcataatggtacttcagcttcataaatattggaacaccactatggttggtgatagtaaaatacctttagntcttcagttctactggatacgngtag

SEQ ID NO: 524 - DNA, 805 bp, Homo sapiens
  misc_feature (749)..(749): "n" may be a, t, c, g, other or unknown
  misc_feature (790)..(791): "n" may be a, t, c, g, other or unknown
ctcactaaatgcaggagaacgaggatgtttttgtcttgatttctcccacaatggaagaatattagcagcagcttgtgccagccgggatggatatccaattattttatatgaaattccttctggacgtttcatgagagaattgtgtggccacctcaatatcatttatgatctttcctggtcaaaagatgatcactacatccttacttcatcatctgatggcactgccaggatatggaaaaatgaaataaacaatacaaatactttcagagttttacctcatccttcttttgtttacacggctaaattccatccagctgtaagagagctagtagttacaggatgctatgattccatgatacggatatggaaagttgagatgagagaagattctgccatattggtccgacagtttgatgttcacaaaagttttatcaactcactttgttttgatactgaaggtcatcatatgtattcaggagattgtacaggggtgattgttgtttggaatacctatgtcaagattaatgatttggaacattcagtgcaccactggactataaataaggaaattaaagaaactgagtttaagggaattccaataagttatttggagattcatcccaatggaaaacgtttggtaatccataccaaagacagtactttgagaattatggatctccggatattagtagcaaggaagtttgtaggagcagcaaattatcgggagaagattcatagtactttgactncatgtgggacttttctggttgctggaatgaggatgggatannggatgtttggaccc

SEQ ID NO: 525 - DNA, 788 bp, Homo sapiens
  misc_feature (722)..(722): "n" may be a, t, c, g, other or unknown
  misc_feature (754)..(754): "n" may be a, t, c, g, other or unknown
  misc_feature (786)..(786): "n" may be a, t, c, g, other or unknown
gcaataaacgaataccgaattaggtgtggaaagaaacccagccagaaagcaacagtgttaccagaagacataatcccctcagagagtagctctttgtctgacaccaccacctatgatgatcccagtgatgccttcacttttcctgggcagcgatcaagttcagtacctcattctccaagaattcttccccccaagtctcttggtattgagcgaatccatttcagaaagtcgtccatcaatgaacagtttgtggataccaggcagtccagagaaatgctgtccacacacagcagcccttacaaaactctggagaggcggccccagggaggacgaagcatgcccaccacgccagttcttacccgaaacgcctacagcagcagccacttggaacccgaatcttcatctcagcactgccgccagcggagtggaagcctggagtcccagtcccacctgctctccgagatggacagcgataagccatttttctccctctccaaatcccaaagaagcagcagcacagaaatcctcgatgacgggtcttcttatacaagccaatcaagcacagagtattactgtgtgacaccagttaccggcccctattacaccacccagaccctggacactcgcaccaggggtcggaggaggtcaaagaaacagaatggttctacttcaaattcaggaagcatgcccaacctacacaaaaggatagtttgaggaatggnggttactcaaagagtcaggagccaccgtcttncagtactacattggcgggtaccacctatgcanag

SEQ ID NO: 526 - DNA, 807 bp, Homo sapiens
  misc_feature (632)..(632): "n" may be a, t, c, g, other or unknown
  misc_feature (744)..(744): "n" may be a, t, c, g, other or unknown
  misc_feature (752)..(752): "n" may be a, t, c, g, other or unknown
  misc_feature (761)..(761): "n" may be a, t, c, g, other or unknown
acataagcaagggaacaccaaagtcctttgatagtgcttcagcactccttcacaaaatcaaattgaggtagtagtgaggccactgtggggatgtagtagccaatgatgtatcatttatcttgggacacacctgaaagttttaatggcaaaagctgaagttttggaaatctgtcttccttttgagctaaggctttaattctgcctcctctttgatcttcccttccaaaaagctgcctttgagaaatggtacaatttctctctcatgtttaagaggtttgtgacattagctacctggggacattattgtccatcagagaacttatataaagaaaacaaaaaaagatattatatgcacagacactgtctaatggattcttcctgtttcccactcctcttatcttccttgactcagcacaaaagtgctcaacaggccataaactcaaaagaccctcctccctgttagagctaaaaatcctgcgtgataacctttcagatgctcagttaagggcaaatttgtaactgagttttaaaacttggtgtgttaccctaagacttatcaagaaaagaagaaagagactcgaggggttttgaacaaggagttaggaataggtgaaactttttatcatgtttgntcctactgtgtggggttttgggggagtcaggaatggtatccacaagactttggcatttatgatgatattcctgccttggtccggaattcctctatttatccctttgcatgangacagtgncaccactgnctattgctaggccctaaattatctcaagaaagggcttaagggtggg

SEQ ID NO: 527 - DNA, 828 bp, Homo sapiens
  misc_feature (768)..(768): "n" may be a, t, c, g, other or unknown
  misc_feature (785)..(785): "n" may be a, t, c, g, other or unknown
  misc_feature (804)..(804): "n" may be a, t, c, g, other or unknown
ctggtcttcctgctagagccaggcctgaggctccctgggagcccagtgcaatcatcagccccctgccctcctccccatacccactagctctggggagtaagccattatctcaaaggtcaggccgtgcaccagccagacctcatgaactcaggaaggtgcttgtccaggagttcctggctgctgtgcccttcacaggcaaagactgcattccttcctcagctgccagtgaggtgctgccaggcattccctgtagaactttcaggccagtttatgaactggttggcacccgtgtcctcctcctggcccaggcaggagaaccatgagcaggcagaaggagactttgcaaagtgccttccccagcatgtgtgccctctgcccttcagagcctgcagataggaggggtggcgaggacactgttctcaatgagcagaacctccaagacacccaaagctgcctgtttgccacctggccctatgcctgccccgttttctccctcaaggccttcacccgtgctagggcagtcacctggaatgtcctttccattacccctgctgtaatgcccagcacagaacttgatggcaggcctttgcatggtagcctgaagcgatctcacccttctaactgggtttggccacaggcacactggctcatgcttacctgtgctgcctgtggttatagttatgcgaattgtgggtttacatccctaaaacagaagggcacggtgtccaagggatagcacccagcccaacttcagaaagacttcaggcnagatgtctaacccttgncttggtctggttctttcanggaattccaatgcccactttcgga

SEQ ID NO: 528 - DNA, 309 bp, Homo sapiens
  misc_feature (301)..(301): "n" may be a, t, c, g, other or unknown
  misc_feature (307)..(307): "n" may be a, t, c, g, other or unknown
  misc_feature (309)..(309): "n" may be a, t, c, g, other or unknown
tctaaatgtcacctggccactgtccctcacctagtgctcaaccttggaaacccttttcctctgtgtctctttttaaagaaatttaataaattcttattgtctgtttggaatattcaacaatttaggctgggtgcggtggcccatgcctgtaatcccagtactttgggaggccaaaagagggtgggtcacctgaggtcaggagttagagagcagcctgaccaacatagtgaaaccatgtctctactaaaaatacaagaattagccaggcatggtggtgcatgcctgtaatcccagctactcnggaggntn

SEQ ID NO: 529 - DNA, 860 bp, Homo sapiens
  misc_feature (768)..(768): "n" may be a, t, c, g, other or unknown
  misc_feature (774)..(774): "n" may be a, t, c, g, other or unknown
tataaacccatatattcaccagttaccccagtaactcctggtacaccaggaaataccatgcactttgagaatatttcttccccagaaagttctccagaaataaagagacgcacttatagtcaagagggatatgacagatcttcaaccatgttaacattggggccttttagaaattctaatttaactgaactgggtctgcaagaaataaagactattggttatacgagccctaggagtaggactgaagtcaacaggcagtgtcctggagaaaaggaacctgtgtcagaccttcagctaggactcgatgcagttgagccaactgccctacataaaaccctggaaacgcctgcacatgacagggctgagcccaacagccaactggactcgactcactctggacggggcacaatgtattcttcctgggtaaagagccctgacagaacaggagttaacttctcagtgaactccaacttgagggacctgacaccctcgcatcagttggaggttggaggaggcttccgaataagtgagtcaaagtgcctgatgcaggatgatactagaggcatgtttatggaaacaactgtgttttgtacttccgaagatgggcttgtatctggtttcggacggactgttaatgacaatttgatcgacgggaattgcacaccccagaatccaccacaaaagaaaaagggttctctattagaataccgtaagagacaacgtgaagctagggaaaagtggctctaagacagagaactttccactcantagtgnatcaccccatgcaagtggaagctttgagcaacaatggtgatggctgtgccagcagtaatgacaatggggaacaggtggaccacctt

SEQ ID NO: 530 - DNA, 765 bp, Homo sapiens
  misc_feature (688)..(688): "n" may be a, t, c, g, other or unknown
  misc_feature (733)..(733): "n" may be a, t, c, g, other or unknown
  misc_feature (737)..(737): "n" may be a, t, c, g, other or unknown
gggccgggcagggccggggcgtgggccggcaggaagatggcgaacgtggggctgcagttccaggcgagcgcgggggactcggacccacagagccggcccctgctgctgctcgggcagctgcaccacctgcaccgcgtgccctggagccacgtccgcgggaagctgcagccccgggtcaccgaggagctctggcaggctgccctgagcacgctcaaccccaaccccacggacagctgtcccctctacctaactacgccaccgtggctgccctgccctgcagggtgagccggcacaacagcccctcggccgcccacttcatcacgcggctggtgcggacctgcctgccgcccggagcgcatcgctgcattgtgatggtctgcgagcagccagaggtctttgcttccgcctgtgccctggcccgggccttcccgctgttcacccaccgctcaggtgcctctcggcgcttggagaagaagacggtcaccgtggagtttttcctggtgggacaagacaacgggccggtggaggtgtccacattgcagtgcttagcgaatgccacagacggcgtgcggctagcagcccgcatcgtggacacaccctgcaatgagatgaacaccgacaccttctcgaggagattaacaaagctggaaaggagctggggatcatcccaaccatcatccgggatgangaactgaagacgagaggatttggaggaatctatggggttggcaanccgnccttgcatccccagccctggccgtcctt

SEQ ID NO: 531 - DNA, 800 bp, Homo sapiens
  misc_feature (702)..(702): "n" may be a, t, c, g, other or unknown
  misc_feature (770)..(770): "n" may be a, t, c, g, other or unknown
  misc_feature (789)..(789): "n" may be a, t, c, g, other or unknown
ctcccaagatggcggagacagagtgaagaaactgtgttccccccttgggttgctatcgatcaagggtaaaattccattctgatatcaaaatgcagtattcgcaccattgtgagcaccttttagagagactgaacaaacagcgggaagcaggttttctctgtgactgtaccatagtgattggggaattccagtttaaagctcataggaatgtgctggcctcctttagtgagtattttggtgcgatctacagaagcacttctgagaacaatgtctttcttgatcagagtcaggtgaaggctgatggatttcagaaactgttggagtttatatacacaggaactttaaatcttgacagttggaatgttaaagaaattcatcaggctgctgactatctcaaagtggaagaggtggtcactaaatgcaaaataaagatggaagattttgcttttattgctaatccttcttctacagagatatctagtattactggaaacattgaattgaatcaacagacttgtcttcttactctgcgagattataataatcgagagaaatcagaagtatctacagatttgattcaggcaaatcctaaacaaggcgcgttagcgaaaaagtcatctcaaacgaaaaagaagaagaaggctttcaacttcccgaaaacagggcagaataaaacagtgcaatatcccagtgacatcttanagaatgcatctggtgaattattcctagatgcaaataaactggccacacctgtagtagaacaagttgcncaaataaatgataattcanaactcgagttg

SEQ ID NO: 532 - DNA, 606 bp, Homo sapiens
  misc_feature (290)..(290): "n" may be a, t, c, g, other or unknown
  misc_feature (555)..(555): "n" may be a, t, c, g, other or unknown
  misc_feature (572)..(572): "n" may be a, t, c, g, other or unknown
  misc_feature (587)..(587): "n" may be a, t, c, g, other or unknown
tcaaagtggcttctcgtgagctaaagaatggtttcgctgtggtgtggcccccaggacaccatgcagatcattcaacagccatgggcttctgcttcttcaactcagtggccatcgcctgccggcagctgcaacagcagagcaaggccagcaagatcctcattgtagactgggacgtgcaccatggcaacggcacccagcaaaccttctaccaagaccccagtgtgctctacatctccctgcatcgccatgacgacggcaacttcttcccggggagtggggctgtggatgangtaggggctggcagcggtgagggcttcaatgtcaatgtggcctgggctggaggtctggacccccccatgggggatcctgagtacctggctgctttcaggatagtcgtgatgcccatcgcccgagagttctctccagacctagtcctggtgtctgctggatttgatgctgctgagggtcacccggccccactgggtggctaccatgtttctgccaaatgttttggatacatgacgcatcaactgatgaacctggcaggaggcgcantggtgctggccttgganggtggccatgacctnacagccatctgtgacgcct

SEQ ID NO: 533 - DNA, 703 bp, Homo sapiens
  misc_feature (99)..(99): "n" may be a, t, c, g, other or unknown
  misc_feature (397)..(397): "n" may be a, t, c, g, other or unknown
  misc_feature (446)..(446): "n" may be a, t, c, g, other or unknown
  misc_feature (472)..(472): "n" may be a, t, c, g, other or unknown
  misc_feature (615)..(615): "n" may be a, t, c, g, other or unknown
  misc_feature (625)..(625): "n" may be a, t, c, g, other or unknown
  misc_feature (631)..(631): "n" may be a, t, c, g, other or unknown
ttcttggaaaggcattaactttgtgatggtcaacagcgtggcgctgaacggggatggctgtggcatctgctctgaaacagaagcagagctcattgaagnttctcacagactgaactgctcccgagaggcacgtggctccagccggtgtggacctgggcctctgctgcccacgtctgcccctgtcctcctgcagcattatcctctgtatcggagaagtgatgctaactgttctggggaagacgctgctcctccagaggaaagggacatcccatttaaggagaactatgacgtgctttcacgggaggcatcacaaaagctgctgtggtggctccagccgtgcctggttctcagtggccacacgcacagcgcctgcgaggtgcaccacgggggccgagtncccgagctcagcgtcccatctttcagttggaggaacagaaacaaccccngtttcatcatgggaacagatgcttanttgagcatcaaggggcaggaagacacctttccctccttgttcctcgctgaccgatgaccctggaactccacggtgcctctctgaatctctgttatggatcccccactatatttgatgggaacccagtgagccaggggccagtnttgacagggnagcatnacgcccacagactacaccctctccaagtgctaccttccacgtgaggatgtggatttgatcatctactgtgga

SEQ ID NO: 534 - DNA, 756 bp, Homo sapiens
  misc_feature (661)..(661): "n" may be a, t, c, g, other or unknown
  misc_feature (693)..(693): "n" may be a, t, c, g, other or unknown
  misc_feature (728)..(728): "n" may be a, t, c, g, other or unknown
agcagttgctccggcggcgctcggggagggagccagcagcctagggcctaggcccgggccaccatggcgctgcctccaggcccagccgccctccggcacacactgctgctcctgccagcccttctgagctcaggttggggggagttggagccacaaatagatggtcagacctgggctgagcgggcacttcgggagaatgaacgccacgccttcacctgccgggtggcaggggggcctggcacccccagattggcctggtatctggatggacagctgcaggaggccagcacctcaagactgctgagcgtgggaggggaggccttctctggaggcaccagcaccttcactgtcactgcccatcgggcccagcatgagctcaactgctctctgcaggaccccagaagtggccgatcagccaacgcctctgtcatccttaatgtgcaattcaagccagagattgcccaagtcggcgccaagtaccaggaagctcagggcccaggcctcctggttgtcctgtttgccctggtgcgtgccaacccgccggccaatgtcacctggatcgaccaggatgggccagtgactgtcaacacctctgacttcctggtgctggatgcgcagaactacccctggctcaccaaccacacggtgcaacttgcagctncgcagcctggcacacaaccttttcgtggtggncaccaatgaccctgggtgttaaccaatgcgttcgntttcaaaccccaagggctttttgggtta

SEQ ID NO: 535 - DNA, 871 bp, Homo sapiens
  misc_feature (509)..(509): "n" may be a, t, c, g, other or unknown
  misc_feature (571)..(571): "n" may be a, t, c, g, other or unknown
  misc_feature (680)..(680): "n" may be a, t, c, g, other or unknown
  misc_feature (817)..(817): "n" may be a, t, c, g, other or unknown
  misc_feature (838)..(838): "n" may be a, t, c, g, other or unknown
  misc_feature (852)..(852): "n" may be a, t, c, g, other or unknown
acctggaaatagttagactcttccacttcccttcaggacctgtgaactcagatatgtaagtcagcttctcaggtggtcggacgtgagagcgaccacagtgaaggagccagcactcagggctctctgccttctatgtgggaatgaggtcttcccaacagactctccctcttccaaaagattgtgtatcagttgctccttctgggatttagagatggacagaaaagggtgtgcgatctatgctgtgagaactcccagccagcttagaagtgtcgagccatttgcacagaaagccactccttgagcgaggagaccaaatccctcctgaaatcctccatcgcgtccttctggggagaaaaacccttgatgtgctgaggaccatcatggggaccaggatagaaggcttcttcccactcaaagcttttctccctggagggtgggcactgctgggccatgccacttcaaagcagtgttcctcagcaggaaagcggaggtcaccacttaccggcctnctccaccttctcggcttctcttttctccatgaacccaggtcgtccagcaggtacttccaagntcccaggtctgtctgcctaagagccttttgaggagaccgtcctggagccccatcagtgcccagatcctggggtaccgaccattgctgtctagcagtgggggatcctgtngtgggaatggggtgggcttctcatccatggtgcttctgggaagagagggttgcctttctgggctagggaagtggctggagcttctgcctgaccttccctagaaacccagtatatccattggccacagcaatactgtntaacaaatccgccacaacttnggtggcctgcacantcagcacttgatctagggg

SEQ ID NO: 536 - DNA, 864 bp, Homo sapiens
  misc_feature (779)..(779): "n" may be a, t, c, g, other or unknown
  misc_feature (819)..(819): "n" may be a, t, c, g, other or unknown
  misc_feature (864)..(864): "n" may be a, t, c, g, other or unknown
caacagcattggaaaggaaaggagacagaatgagctttggttatttctattgcacagaaaaggatttttaaaattagattagtataatatctggccatagagtgataagaacaatatgacttagattttctgtatttcatctgccagattatttgaatcacacaggatgatgtgttaacagtattagggtggaagaggaatcaagagtaaagaggtaggggtttactcatttttcttccctgagccaggtgtgacaagccaactctgtcaccattcgtgaggggagagttgcagtcctcttcaagctgttatcataagtacagtagtcagctacttggatatcaagactaagtgctgatatgaagacttgcctttgtgttttgttatgaaacacgcaagcataaagcaggactcaagcacaaggctgactgttctactttgaataacagcttccttgcagtctcctccacatgggtggtactgtgtttagaagggattaccaaaggctggagcgatttaagctatgcactagccttgccctcttaggttgcattctctttaggccactggttctcaaacattagggtgcactgtaaccattacagagcttgtgaaaagtgcagaaacctgagcctcaccttatgagattctgattcagccagggggaggacaggaatctgtatttttcatagcaacctcaagtaatctttattctgagggtctcgggattgcaggttgaaaaacacaccttaatcagcagtaaatcttctctactcggncaggcgcatggctcatgcctgtaatcccacactttgggangcccaagtgggtggatcacaaggcaggagttcgagaccagcctgn

SEQ ID NO: 537 - DNA, 773 bp, Homo sapiens
  misc_feature (81)..(81): "n" may be a, t, c, g, other or unknown
  misc_feature (702)..(702): "n" may be a, t, c, g, other or unknown
  misc_feature (735)..(735): "n" may be a, t, c, g, other or unknown
  misc_feature (746)..(746): "n" may be a, t, c, g, other or unknown
tccgtaatggctatactagtttacattctcatcaatggtatgcaggggtttccttttctccatattcttgccaacatttgntatctatcttttttaatatagtagccattctaacaggtgtgacatggtatttcattgtgattttaatttgcatttccctgatgataagtgatattgagcattttctcatatactgagccatttttatgtgttcttttgagaaatatctattcaggtcctttgcccatttttaaatcagattatttgttttcttgctgttggattgtttaagttccttatatattttcagtattaaccttttatgagatgtatggcttgcagatatgttctcccactctgtagattgtctcttcactctgttgattgtttccttagccatgcagaagcctttttgtttgatgtaatcttactttttttgcttttgttgcctatgctttggggcacataacctgattttttcaactgtcacactgattgtacctaacattgaaatgttagaaatgtatttcagattatattctatatatatcaagcataccacttgtgaaatctgttctgatttttttcctgaatctacctggagtgtcttaatgaatgactctacttagacttcccccagagaaatgattacataataatactttgtataggacatcttataaaaagcttaaagtattttgnatatagactcattaatcattgaagtatacttanggaaaatctangtgggctggcatagcactttatactgg

SEQ ID NO: 538 - DNA, 856 bp, Homo sapiens
ttctgagaagcttatgtagctgataaagcagtgaaaaaaactcagcctttagatctacatttgtgtgagtccagttgcgtgaaatactgtgatcaaaacaaaaattgcatatttattgcattcaaagggacattttgtagtctaacctgattttcgaaattgattattgataatttaagatatttttcatagttatatgagttacctttagtaatgatagacaataaataaagaactaagaagttgtcatgaaagtcatagccagagcaggtagataagagaaagaaataaagggcatccaaactagaatggagaagtcaaattgttctctatgcagatgacatgatgttatatatataaaaacaaaactaaagactctaccaaaaaactcatagaactgataaattttgaaaagttagaagatacaaaattagtatacaaaaatcagtagcatttctatgcatgaacagtgaactagctgaaaaagaaatcaaggtaaccccatttataatagctgtgaaaaaaatctaggaataaattaaccaagaaggtaaaatatttctatacaaggaaaactacaaaacactgatgaaagaaattgaaggagatacaaacaaattgaaagacactccgtactcatggattagaggaattaatatattttaaatgaccatgctacccaaagtgatctccagattcaatacaacttctatcaaaataactgacattcttcacagaaattgccaccaaaaaaaattcttaaaatttatatggaaccacagaccccaaatgccaagcaatactgagcaaaaagaccaagctggagtatcacctccagactcaaaatataatcaaa

SEQ ID NO: 539 - DNA, 791 bp, Homo sapiens
  misc_feature (708)..(708): "n" may be a, t, c, g, other or unknown
  misc_feature (756)..(756): "n" may be a, t, c, g, other or unknown
  misc_feature (781)..(781): "n" may be a, t, c, g, other or unknown
atgtacgcctttgtgcggttcctggaggacaacgtctgctacgcgctgcccgtgtcgtgcgtgcgcgacttcagcccccgctcgcggctggattttgacaaccagaaggtgtacgccgtgtaccggggcccggaggaattgggcgccgggcccgagagccccccgcgcgccccccgcgactggggcgcgctgttgctccacaaggcccagatcctggcgctggcagaagacaaatctgaccttgaaaacagtgtgatgcagaagaaaataaaaatccccaagctttctcttaatcatgtagaagaagatggagaggttaaagattatggggaagaagatttacagcttagacacatcaaggattgtctggggaaatattgatctgcagtccaagaaaatcccagctgcccttgcctgaactgattctcgttgtcctacacagagacctgaggggcggaagccgagcgaagtggcgcacaagagcatcgaggcagtggtggctcggctagagaagcagaacggcctgagcctgggccatagcacgtgtccggaagaggtcttcgtggaggcctcgccaggcacagaggacatggacagtctagaagatgctgtggtgccccgggctctgtatgaggagctgctgcgcaactaccagcagcaacaggaagagatgcgccaccttcagcaggagctggagcggactcggangcagctggtacaacaggccaagaagctcaaggagtaccgggcacttgngtctgaaatgaaggagcttcgtgancttaaccgga

SEQ ID NO: 540 - DNA, 865 bp, Homo sapiens
  misc_feature (781)..(781): "n" may be a, t, c, g, other or unknown
  misc_feature (823)..(823): "n" may be a, t, c, g, other or unknown
caccaccaggccttccttgcaagagttcctgaaggaagcactaaatatggaaagaaaaaaccattaccagccactacaaaaacacactgaagtacatagaccaatgacactataaagcaaccacataaacaagtctgcaaaataaccagctagcatcatgatggcaggatcaaattcacacataacaatactaatatcaaatgtaaataggctaaatgccccaattgaaagacagagaagtgcaagctggataaagagccaagaccgattgatacgccatgtttaagagacccatcacatgtgcaaagacacacataggctcaaaataaagggatggaggaaaatctaccaagaaaatggaaatcagaaaaaagcaggagtcacaatcctagtttttgacaaaacagactttaaaccaacaaagataaaaaaaaaagacaaagcaaggcattacataacagcaaagggttcaacaagaagatctaactattctaaacatatatacgcacccaatagcagaggacccagattcataaagtaagttcttagagacctacaaagagacttagactcccacacagtaatagtgggagactttaacactccattgacaatattagatcattgagataaaaaattaacaaagatgttgaggaccttaactcagctctggattaagcagacctgatagatatctgcagaactcttcactccaaaacaacagaatatacatttttctcatcatcacatggctcttaaaaatgatcacataatcggagtnaacacttcttagcaaatgcaaaagactgaatcatacagtctntagaccattgcacatcaattgactcagattagaaatccccaa

SEQ ID NO: 541 - DNA, 562 bp, Homo sapiens
  misc_feature (81)..(81): "n" may be a, t, c, g, other or unknown
  misc_feature (130)..(130): "n" may be a, t, c, g, other or unknown
  misc_feature (134)..(134): "n" may be a, t, c, g, other or unknown
  misc_feature (331)..(331): "n" may be a, t, c, g, other or unknown
  misc_feature (352)..(352): "n" may be a, t, c, g, other or unknown
  misc_feature (458)..(458): "n" may be a, t, c, g, other or unknown
  misc_feature (542)..(542): "n" may be a, t, c, g, other or unknown
  misc_feature (558)..(558): "n" may be a, t, c, g, other or unknown
  misc_feature (560)..(560): "n" may be a, t, c, g, other or unknown
gctgagaggcgggcgggccgggggcgccgggcgcggggccgccatgtggagcggccgcagctccttcaccagcttggtggngggcgtgttcgtggtctacgtggtgcacacctgctgggtcatgtacggnatcntctacacccgcccgtgctccggcgacgccaactgcatccagccctacctggcgcggcggcccaagctgcagctgaacgtgtacaccacgacgaggtcccacctgggtgctgagaacaacatcgacctggtcttgaatgtggaagactttgatgtggagtccaaatttgaaaggacagttaatgtttctgtaccaaanaaaacgagaaacaatgggacnctgtatgcctacatcttcctccatcacgctggggtcctgccgtggcacgacgggaagcaggtgcacctggtcagtcctctgaccacctacatggtccccaagccanaagaaatcaacctgctcaccggggagtctgatacacagcagatcgaggcggagaagaagccgacgagtgccctggatgagccantgtcccactggcgacngntg

SEQ ID NO: 542 - DNA, 865 bp, Homo sapiens
  misc_feature (700)..(700): "n" may be a, t, c, g, other or unknown
  misc_feature (832)..(832): "n" may be a, t, c, g, other or unknown
  misc_feature (857)..(857): "n" may be a, t, c, g, other or unknown
atttcaagcactgactgctaagattggcatgtctccagccacgtacatttgcaaaaagtcagatttgcaatgtaatatgtcatggagctcatgcttgttgaagagaatctttgataggctggacacattcattttagtaggaggcagaggtggcctaacagcaaactctaggttcaggatctaattttcatagccttcaaggatgaatgcaatataaactgtgtagtagattgtgatgctcattccaactagggaggcaagcatttgtacctgctatctacaaggcaccaaataatgcatgtgtcaccattgctataaattgtcctcttccaggacctaactatttgggtaaagaacctacagttcccatcaccacctatgtatgtatgtacaaacataaattagtccaaattctaattttctcttatttttctttgtggaaaaacagataagaaagctcagtaaaggaagatataagcaattaatgttacagttcttcaatataataatttgaattaaatgtactaagaagcaaaaactattagtgttgagactatcatgatgaagcttttggtttttttaatatattttcatttttatgcataaaatcttaatacatagaattccatgatgtcatcaggcattaacaatcacttaccttagaaaccaactctttttatctaggcttaacagggtttgnattaatgtattggcctagcactgggccctgctagatgctcaataaatattgcctaatcactattagacattttaaaatatcttttggctgggaacagtggctcacacctgtaattccagctctttgaaaggncaaacaggaagatccttgagcccangagtttga

SEQ ID NO: 543 - DNA, 756 bp, Homo sapiens
  misc_feature (643)..(643): "n" may be a, t, c, g, other or unknown
  misc_feature (704)..(704): "n" may be a, t, c, g, other or unknown
  misc_feature (710)..(710): "n" may be a, t, c, g, other or unknown
  misc_feature (748)..(748): "n" may be a, t, c, g, other or unknown
aactcgcacccgggtcctggctgcaccgcatcccctcctgcaccccctggatggcccttcagccaacgggggcctgggcgatggtcgaccacggagctgcgcaaggaaaagtcccgggatgcggcccgcagccggcgcagccaggagaccgaggtgctgtaccagctggctcacacgctgcccttcgcccgcggcgtcagcgcccacctggacaaggcctctatcatgcgcctcaccatcagctacctgcgcatgcaccgcctctgcgccgcaggggagtggaaccaggtgggagcagggggagaaccactggatgcctgctacctgaaggccctggagggcttcgtcatggtgctcaccgccgagggagacatggcttacctgtcggagaatgtcagcaaacacctgggcctcagtcagctggagctcattggacacagcatctttgatttcatccacccctgtgaccaagaggagcttcaggacgccctgaccccccagcagaccctgtccaggaggaaggtagaggcccccacggagcggtgcttctccttgcgcatgaagagtacgctcaccagccgcgggcgcaccctcaacctcaaggcggcacctggaaggtgctgaactgctctggacatatganggcctacaagccaccttgcgcagacttctccagctgggagcccttgactcaaaacccccgnttgcantgcctggtgctcatcttgcgaagccattccccacccangcaagcct

SEQ ID NO: 544 - DNA, 797 bp, Homo sapiens
  misc_feature (731)..(731): "n" may be a, t, c, g, other or unknown
  misc_feature (733)..(733): "n" may be a, t, c, g, other or unknown
  misc_feature (746)..(746): "n" may be a, t, c, g, other or unknown
aaatctgtgcaggatactgattgcctgcttctgaactgtgggtatggttggctgtggataatgtagaacatgtaagaaatgatggtctgctgcatgtaccaggccacatctaagagtcttattgttgagcacagccacgtttacactgaatataaactttattcaccattccaggccttgaccttatattcaggaatggcagcctggcatggtgaatagaacttattagggtgcatcgtagatttgctcagtaggggctcaggaattgacacaaatgctgacggagttggaacaagtaaattatatgtctggaagataaatatttaaataattagattaagggtggaaatgataaaagtgtactttgttataaagattggagatcccagtaagagtaatatgctctatgaaaaattgtaagttcttatattacattattagtttatgagtacttgttactgttttcacatttttgcttatactcatacggtactcctactttgctatactcacactggtttatctcccaagcctcaggtagatcatgcttccctgactcccccagacaggtttttcctgtaccctcaaaacatttatcagtgttctcattttatatttatgtgtaattttacattatgttcacctttctcataaattttgccagatcaggaaccgtgtctttggccactggtaccatccccagaaacgttgactaagtggtttatgaagtngnaagatgcttttgngaaccatttggttgggttaaataagggacccagttttgggtaagccccaat

SEQ ID NO: 545 - DNA, 808 bp, Homo sapiens
  misc_feature (729)..(729): "n" may be a, t, c, g, other or unknown
  misc_feature (744)..(744): "n" may be a, t, c, g, other or unknown
  misc_feature (758)..(758): "n" may be a, t, c, g, other or unknown
cagcaaagaaaataaaaagaaagacaaagatatgcttgaagataagtttaaaagcaataatttagagagagagcaggagcagcttgaccgcatcgtgaaggaatctggaggaaagctgaccaggcggcttgtgaacagtcagtgcgaatttgaaagaagaaaaccagatggaacaacgacgttgggacttctccatcctgtggatcccattgtaggagagccaggctactgccctgtgagactgggaatgacaactggaagacttcagtctggagtgaatactttgcaggggttcaaagaggataaaaggaacaaagtcactccagtgttatatttgaattatgggccctacagttcttatgcaccgcattatgactccacatttgcaaatatcagcaaggatgattctgatttaatctattcaacctatggggaagactctgatcttccaagtgatttcagcatccatgagtttttggccacgtgccaagattatccgtatgtcatggcagatagtttactggatgttttaacaaaaggagggcattccaggaccctacaagagatggagatgtcattgcctggagatgaaggccatactaggacacttgacacagcaaaagaaatggagattacagaagtagagccccagggcgtttggactccagtactcaagacaggctcatagcgctgaaagcagtaacaaattttggcgttccagtttgaagnttttgacttttgaanaagctgaaatattncagaagaacttgatgagaccaccagattgctcaagggaacttccaggaag

SEQ ID NO: 546 - DNA, 824 bp, Homo sapiens
  misc_feature (735)..(735): "n" may be a, t, c, g, other or unknown
  misc_feature (781)..(781): "n" may be a, t, c, g, other or unknown
  misc_feature (802)..(802): "n" may be a, t, c, g, other or unknown
tccaacacatctgttacattagtcagcttttagtgccatattatgggaatctcagaaaccttttgactgggttcaggttatctgtgaattttcatattattttatggccaccagctgcattttatgactatatattaaatgttttattttttcaaataatttttccaaatggtctcagtttcccatccaagggaaatcaagcatatgcctaaagatctactgttcagtaagttgtagctaatgcaaaaccccaaataaacaaaaaagaaacaaaaataaaaccctcctttcaaaaacaatcctgtgcaaaataccagtgtgccccaaaatctacatacctgacctttcgttatatctgttcttggttggatatgccttcaggttttaattggaacctttttcataattgttgccatttaacacatttagtctgtcaaatcataggatgtctttatagccatataataaaccctagagaacaacttctccgactgtagccatctgcaatgatcccaagagtagcttacaaaatactgacagtctttatggtaatatgatacatatggcagcccacaattatgtgtagctgcattcaattagtgttgtacaattacacagttttattgcttagttaaaacagtgaaagcactacatactgggtaatttgcctaatccctgtccctttaatagcccctcagtgtttaaaatgtgggggaacatctatagtacttaaanggaccagggatgaacattaaatcatacctcatggtggggaatactncttggactggccaattaatgnacttccactttaacgtgtgggg

SEQ ID NO: 547 - DNA, 835 bp, Homo sapiens
  misc_feature (768)..(768): "n" may be a, t, c, g, other or unknown
  misc_feature (805)..(805): "n" may be a, t, c, g, other or unknown
  misc_feature (815)..(815): "n" may be a, t, c, g, other or unknown
ttgagaaatgtccagatgatttggaaattaggttatgtttttgatacagggcaggttcctggcttcactcaggaaggaattcaagagcgagccagttgtagaggaaaacagctttattgaggtggtgacaatagttacatctctgtgactgctcccgcagagcgggactactccatataggcagtgtgctgagagcagcagctcaggaacagtctgcagtcatatttatacctgctcttaatgacatgctaattaaaagatgggtgattcacaatttgccagaaaatgtactggtgttgcttccaggtgttgccatggcaatggtaaactgtcttggtgcaagtgggtgtgtcttatggagaggtgctttccatgcctcttccctgtttcggtcagtcttcagtctggtccagagtccagtcctgtctgcctcctacctgattttcacctttgagaaatctgttgttttcaatggtgagagcaggaaacacaacgttaagggctgagtaaacagcaggtattgtcagggacggacgcagtaaaaagaaatggactaaagggataagaaggtcattagaaggtggttttacaatggggagagattgaaaacagaagaaaccagcggagaggtcacataacaacattggaagcaaggagagtggaatttagaattcaggacgtggagagtgttatcagcaatatggcagaataggagttccttgggttcacacacccaccccccaaaatgtaactagcaatgatccgcangcaaaaaatactatcctgaatatcccaaactctggantgaggctganaactttcttggactggccat

SEQ ID NO: 548 - DNA, 803 bp, Homo sapiens
  misc_feature (714)..(714): "n" may be a, t, c, g, other or unknown
  misc_feature (738)..(738): "n" may be a, t, c, g, other or unknown
  misc_feature (798)..(798): "n" may be a, t, c, g, other or unknown
acatcttgcccactccgcgcgcggggctagcgcgggtttcagcgacgggagccctcaagggacatggcaactacagcggcgccggcgggcggcgcccgaaatggagctggcccggaatggggagggttcgaagaaaacatccagggcggaggctcagctgtgattgacatggagaacatggatgatacctcaggctctagcttcgaggatatgggtgagctgcatcagcgcctgcgcgaggaagaagtagacgctgatgcagctgatgcagctgctgctgaagaggaggatggagagttcctgggcatgaagggctttaagggacagctgagccggcaggtggcagatcagatgtggcaggctgggaaaagacaagcctccagggccttcagcttgtacgccaacatcgacatcctcagaccctactttgatgtggagcctgctcaggtgcgaagcaggctcctggagtccatgatccctatcaagatggtcaacttcccccagaaaattgcaggtgaactctatggacctctcatgctggtcttcactctggttgctatcctactccatgggatgaagacgtctgacactattatccgggagggcaccctgatgggcacagccattggcacctgcttcggctactggctgggagtctcatccttcatttactttcttgctacctgtgcaacgcccagatcaccatgcttgcanatgttggcactgctgggctatggnctctttgggcatttgcattggcctggtcatcacctataatatccacttcacgcccttttntacct

SEQ ID NO: 549 - DNA, 790 bp, Homo sapiens
  misc_feature (626)..(626): "n" may be a, t, c, g, other or unknown
  misc_feature (721)..(721): "n" may be a, t, c, g, other or unknown
  misc_feature (767)..(767): "n" may be a, t, c, g, other or unknown
  misc_feature (773)..(773): "n" may be a, t, c, g, other or unknown
agcactgtccctcggagtccgagacttccacctgggtcgtgtccaaggccccggcgactccccggactcggggtgccgggccaacctccccgccgaggcccacccgccgtcgctatggcgtgcagtttgcagaagctgtttgctgtggaagaggagtttgaagatgaggatttcttgtctgctgtggaggatgcagagaaccggtttactggctcactgcctgtgaatgctgggcgcctgagacctgtctcttctaggccacaggagactgtgcaggcacagtcctccaggctgctgctgttacaccccactgctccctcagaggctttgggcctgccagacttggacctctgcctccctgcctccagcacgcccagtgctgacagccgtccatcatgcataggagcagctcccctaaggcctgtctctacttccaactgccttaacagttcccactcagcaactccactgggaagtctgtccgcaacgctccactgttcaagcacttcagcctctccaagctgctagagggaccattcagagcagccctcaaaatcgtttcccttgtcagccattccagtctccaagttcctggttaagtggcaaagctcatttacccagacctngaactcccaactcaagctgttctactccctcaaggactagctctggattatttcctcggatacccttacaacagcagcaagttggtggctttgangggcctgaacaagacgaatttgataaagtcctggcaagcatggaanttggangaacctggcattgggaa

SEQ ID NO: 550 - DNA, 753 bp, Homo sapiens
  misc_feature (732)..(732): "n" may be a, t, c, g, other or unknown
  misc_feature (734)..(734): "n" may be a, t, c, g, other or unknown
  misc_feature (736)..(736): "n" may be a, t, c, g, other or unknown
ccagattacctgatgcagctgatgaacgacaagaagctcatgagcagcctgcccaacttctgcgggatcttcaaccacctcgagcggctgctggacgaagaaattagcagagtacggaaagacatgtacaatgacacattaaatggcagtacagagaaaaggagtgcagaattgcctgatgctgtgggacctattgttcagttacaagagaaactttatgtgcctgtaaaagaatacccagattttaattttgttgggagaatccttggacctagaggacttacagccaaacaacttgaagcagaaaccggatgtaaaatcatggtccgaggcaaaggctcaatgagggataaaaaaaaggaggagcaaaatagaggcaagcccaattgggagcatctaaatgaagatttacatgtactaatcactgtggaagatgctcagaacagagcagaaatcaaattgaagagagcagttgaagaagtgaagaaattattggtacctgcagcagaaggagaagacagcctgaagaagatgcagctgatggagcttgcgattctgaatggcacctacagagatgccaacattaaatcaccagcccttgccttttctcttgcagcaacagcccaggctgctccaaggatcattactgggcctgcgccggttctcccaccagctgcccttgcgtactcctacgccagctggccctaccataatgcctttgatcagaccaantncngaccggttgtcattgcc

SEQ ID NO: 551 - DNA, 778 bp, Homo sapiens
  misc_feature (686)..(686): "n" may be a, t, c, g, other or unknown
  misc_feature (712)..(712): "n" may be a, t, c, g, other or unknown
  misc_feature (736)..(736): "n" may be a, t, c, g, other or unknown
aaatattatgtctttcaagtctatttttttggtaagtcaatttttgactaccctttctttacttattgtgccctgtgaactcttccatgtccatacccattcattgtctataatcttggcactttcttattcattaattcaacaaatatttattccctatcacctttatttatgcatttctatagatgctagagatagggtaaataaaagtatggcaaaaccagcaattacttttgcaccaacctaatatgattttttaagaaatttataatttcattagagaaatagatgtataaacaaagaaattataatacaaacattgtgataagtgcaggaagtagaaaatagtgattattgctttcttcaaacataaagtattgttagtcaggagtccttcagttgtaagtgccagaaacccaatttcaaacagcaaaagcagaaaatggaatctattggctcgcatccctacaaattccaggaatagaactgtgctaagggactcaaataatgttgttgggtcttcatagcttattctggtttatttcttgcttttggggccttgcttttttcttctgaagatggactctgaagtgaattctacagcacactacccagatgccttatttagaatcgaagcattggtttccttcaggttttgggagtgttggctgctgatggctcatagntgagtctctttctgagacaaagggangtgtctcactcaagtttatccctnctcctgagaatagcttggatccaagactgatcaatgagggat

SEQ ID NO: 552 - DNA, 761 bp, Homo sapiens
  misc_feature (603)..(603): "n" may be a, t, c, g, other or unknown
  misc_feature (714)..(714): "n" may be a, t, c, g, other or unknown
  misc_feature (725)..(725): "n" may be a, t, c, g, other or unknown
  misc_feature (736)..(736): "n" may be a, t, c, g, other or unknown
ccagccggcgcttgcgcggtggcacgggcgagtgggggggcgaggaggtggaggaggaggaggaggaggaggaggtggcggcgagaagatggcgacttcgaacaatccgcggaaattcagcgagaagatcgcgctgcacaatcagaagcaggcggaggagacggcggccttcgaggaggtcatgaaggacctgagcctgacgcgggccgcgcggctccagctccagaaatcccagtacctgcaactgggccccagccgaggccagtactatggcgggtccctgcccaacgtgaaccagatcgggagtggcaccatggacctgcccttccagaccccctcccaatcctcgggcctggacaccagccggaccacccggcaccatgggctggtggacagggtgtaccgggagcgtggccggctcggctccccacaccgccggcccctgtcagtggacaaacacggacggcaggccgacagctgcccctatggcaccatgtacctctcaccacccgcggacaccagctggagaaggaccaattctgactccgccctgcaccagagcacaatgacgcccacgcagccagaatcctttagcagtgggtnccaggacgtgcaccagaaaagagtcttactgttaacagtccaggaatggaagagaccacatcagaagcagacaaaaacctttccaagcaaacattggacaccaagaagacngggtccaaggnccaaaatcctngtaaggtcccccggaaattaaacat

SEQ ID NO: 553 - DNA, 734 bp, Homo sapiens
  misc_feature (708)..(708): "n" may be a, t, c, g, other or unknown
  misc_feature (714)..(714): "n" may be a, t, c, g, other or unknown
  misc_feature (731)..(731): "n" may be a, t, c, g, other or unknown
gcatttcgggtctgcgaggtggggtaggcgggcaaggcgggcgccgaggtttgcaaaggctcgcagcggccagaaacccggctccgagcggcggcggcccggcttccgctgcccgtgagctaaggacggtccgctccctctagccagctccgaatcctgatccaggcgggggccaggggcccctcgcctcccctctgaggaccgaagatgagcttcctcttcagcagccgctcttctaaaacattcaaaccaaagaagaatatccctgaaggatctcatcagtatgaactcttaaaacatgcagaagcaactctaggaagtgggaatctgagacaagctgttatgttgcctgagggagaggatctcaatgaatggattgctgtgaacactgtggatttctttaaccagatcaacatgttatatggaactattacagaattctgcactgaagcaagctgtccagtcatgtctgcaggtccgagatatgaatatcactgggcagatggtactaatattaaaaagccaatcaaatgttctgcaccaaaatacattgactatttgatgacttgggttcaagatcagcttgatgatgaaactctttttccttctaagattggtgagttaacattgtcgaagtattctttctttttttaaaattttattttattaatataaatagagttggggggggtttgctgggttggccangttggnctcaaactcctggcctnaag

SEQ ID NO: 554 - DNA, 667 bp, Homo sapiens
  misc_feature (651)..(651): "n" may be a, t, c, g, other or unknown
  misc_feature (659)..(659): "n" may be a, t, c, g, other or unknown
  misc_feature (662)..(662): "n" may be a, t, c, g, other or unknown
agttacacaggatgccgtcttgtgtttcctcttgtttagttacccactacagtgattttgtgatctgctaatgggttgccacccacaaccattgctttagcacttttacttcaaatcaatgaaggattgataaaagttctcctggtgtctccgcagagtgccttccaggaacagatctttgcatagaatatcagtggtttccttttttgtttcaaatagtggtcagaaaatacccagtgttgactcaccaaggcaatcagcttcctttttccctttttttgtttttttttaacattttatatttttgctttattttattttattttattttttgagacggagttccactctgtcgccaggctggagtgaagtggtacaatcttggctcactgcaacctccacctcccgggttcaagcaattctcctggctcagcctcctgagtgctgggactacaggcgcgtaccttctttagtagagactgggtttcaccatgttggccaggatggtctctatctcctgaccttgtgatctgcctgcctcagcttcccaaagtgctgagatgacaggtgtgagccatcagacccagcatttttttttttaatttaaatttaaatttttttcatttttttgagaggttttttttgttttgntttgttgntgntggtg

SEQ ID NO: 555 - DNA, 823 bp, Homo sapiens
  misc_feature (758)..(758): "n" may be a, t, c, g, other or unknown
  misc_feature (801)..(801): "n" may be a, t, c, g, other or unknown
  misc_feature (806)..(806): "n" may be a, t, c, g, other or unknown
gaatcttcatgctgggacatttttaacttggatatcttgctattcaagttgtatcggatttgtatcaaatttagcatgcttgcaacctaagcacactccattctatagtcagttccactcttgactttaatatttatggtacggttagtctccacatcttccaagttcaagcttcataaccaaagatcatcttcaccttccttctcactctgcattccattggtcagcttctgttaaaatggccttcctaaggcaggcctctgaacgatcatttatttttaggaaaacttataaaaagtcactgagatttaaaaacacccacacatatatttgcaatcatatttgtgtgcttggttaaacatgtcaacatttaacagatttgagccttctaaatttaatccagcatgaatgtcgtttttactaaaatatttgctattttactcacttagctggttccttacacaagtccagttaaatttcacatgtgaaaaaaatgactgaaaacactgaatggaatgtgatactccttgtgtagtagaaatgagttgactttcatatttaagagctgatcctatgaatgagtagacaataagctgaatagctgttacgatctgagttttaaaaatggaaaatgtttcatgttttagagaatgtaaacttccacaaggggcagagattggtaatacgttgtccccccagtggacttaaaacagtactggcacatagtaagcactcaataaatagttggtggaatggantgaatggtagggaacccatactgggaatcaatattggaagctnccttngaaaggcacccacactg

SEQ ID NO: 556 - DNA, 868 bp, Homo sapiens
  misc_feature (746)..(746): "n" may be a, t, c, g, other or unknown
  misc_feature (784)..(784): "n" may be a, t, c, g, other or unknown
  misc_feature (852)..(852): "n" may be a, t, c, g, other or unknown
  misc_feature (868)..(868): "n" may be a, t, c, g, other or unknown
ggccggatggctgcgtggggctgtgtggctgcgctcggcgcggcgcgtgggctttgctggcgggcggctgcgcgcggctgcggggctccagggccgccccgcccgcaggtgctatgctgtgggccccgctcagagcccacccacctttgggttcctgttggacatcgatggagtgcttgtgcggggccacagagtgatccctgctgctctgaaagccttccgaaggctggtgaactcccaggggcagctgcgggtgcccgtgttttttgttacaaatgctggtaacatcttacaacacagcaaagcccaggagctgtcagccctgctggggtgcgaggtggatgcagaccaagttatcctctctcacagccccatgaagctcttctccgagtaccatgagaagcggatgctggtgtctggacaggggcccgtgatggaaaatgcccagggactgggcttccgaaatgtcgtcaccgtggatgagctgcggatggcctttcctctgcttgacatggtggacctggagcggcggctaaagaccacgcccctcccgaggaatgacttcccccgcattgaaggggtgctcctcctaggggagccggtccgctgggagaccagcctgcagctgatcatggatgtcctcctcagcaatgggagccctggggctggcctggcaacacccccctacccccaccttcccgtcctaaccagcaacatggatctcctgtggatggctgaagccaaanatgcccaggtttggacatggcaccttttctgcttgtgnctgggaaaccatttaccaagaaaagtgacgggcaaaaggagcttgagataccaagggccttgatggcnaaacccagcattcttn

SEQ ID NO: 557 - DNA, 862 bp, Homo sapiens
  misc_feature (848)..(848): "n" may be a, t, c, g, other or unknown
agaagtaatacccaacaagaaactgacatggcgatcaagacaacaggatcgagaaaactgtgctatgaaaggcaagcataaagatgaatgccacaactttatcaaagtatttgttccaagaaacgatgagatggtttttgtttgtggtaccaatgcattcaatcccatgtgtagatactacaggttgagtaccttagaatatgatggggaagaaattagtggcctggcaagatgcccatttgatgccagacaaaccaatgttgccctctttgctgatgggaagctgtattctgccacagtggctgacttcttggccagcgatgccgttatttatcgaagcatgggtgatggatctgcccttcgcacaataaaatatgattccaaatggataaaagagccacactttcttcatgccatagaatatggaaactatgtctatttcttctttcgagaaatcgctgtcgaacataataatttaggcaaggctgtgtattcccgcgtggcccgcatatgtaaaaacgacatgggtggttcccagcgggtcctggagaaacactggacttcatttctaaaggctcggctgaactgttctgtccctggagattcgtttttctactttgatgttctgcagtctattacagacataatacaaatcaatggcatccccactgtggtcggggtgtttaccacgcagctcaatagcatccctggttctgctgctgtgcatttagcatggatgacattgaaaaagtattcaaaggacggtttaagggaacagaaaaacttccagattctgtttgggacagcagtttcccgaagacaaagtgcccaagccaaggcctggctgntgtgcaaaacacgg

SEQ ID NO: 558 - DNA, 862 bp, Homo sapiens
  misc_feature (815)..(815): "n" may be a, t, c, g, other or unknown
  misc_feature (821)..(821): "n" may be a, t, c, g, other or unknown
aaaaaatggttgcctaatttttcttagcctaagtcttgattaaaaatgggatggaagatgagtaagtggattttgaatccaatattctgaacacacatcacaagtgcagagaagagaaagaaatcctcccaaagaagttaaaaggagaaaacacaaaaaacttacctcatacatttttctagaacttctcttacaaacttcggtttgggactttcaggatcttgactaagacaatctgacctaaggaggaaatgtagttttatcaatgcttacatataatctgcacttacacccatttgtactataattatctgttaacttataacaacttacaagttttgttaagttataattgcacttgtaactatttgtacttaactacaaatagtttccaagaaattaaatatttcagacacttttatattacagttttaaacattagtagttttttgactacagaaaaagataaaacaaaccatcacttaccaatcttcccagctccaacggaactggaagttacttagatgatgagaaaaccaattaataaacctacgtagagaagggggaggtaggcagagaaaaaggaagaataactgggatttagaacagaaacttatataagccttcaaacagataaaacccgactttacagagttaatgaaaagcatattcccctacatgcagttgtatcttctgccaactctctttatcctttttaggtcaatgacagatataattctagtacctggtttgtgcgggcacctaacatgtttattatttaattctcacaactttcaaggtcatattattttctncatatnaaaggatgatgaaactgaagccaggaaaaaaaaaaaatttt

SEQ ID NO: 559 - DNA, 849 bp, Homo sapiens
  misc_feature (827)..(827): "n" may be a, t, c, g, other or unknown
  misc_feature (837)..(837): "n" may be a, t, c, g, other or unknown
ttctgttatgtaaggcaatttagcatcctgctccctaggaaatttcttttggagaaaacaggccatgcaaatgaaaaagtctaattgggtgattggctgcatttggtaacatgtgcttggagggcagggagattggctagttgtaaataaacatgctttctctgggcggttgacccttctgcgtggactgactctgaggtttgtccccgacagggagcaggtggggtgaatttcttgatttctccttagacaccagttactatgaaatcactgattcttttcagctggagaaggatatgctaggggttcttggaggacataccagggtgcaggatgttgggatgaagtttaataagggtggtcttggcagggtttcctggaattttctgtctgggggtgcatttttccttttttctgcccccatagcagctttctgctcattgccaaatagcccccttgtcagtgacgggagaaatttggtcttacaggccaaccttggtctctttgcacagcaaacccccacgcattacacaccactaggtacccatagaccctaactgggtggcgatactggtccgcagaagttttgcatcttgattgttaagcttttgagaacccaaggagggttagaaaggaatgaaaataaacctagacagccaccggcagctctcaaggctgtgggccacagagcagcctgaaaaaaatgtttgctgatcgatttaaaaagcaatcctaaaacagaaggaactgccgggttggctttctaccaaatattgtttggaaatgtatgacaaaggtgcatttgatactttttcctgtaaaagtgntaacaggtanactggtgacttt

SEQ ID NO: 560 - DNA, 702 bp, Homo sapiens
  misc_feature (590)..(590): "n" may be a, t, c, g, other or unknown
  misc_feature (672)..(672): "n" may be a, t, c, g, other or unknown
  misc_feature (694)..(695): "n" may be a, t, c, g, other or unknown
atttaaaactatttctatgtttctatctactacccaagtataaaaaatcaaaaggtccacaatacctttagcatatcagctgcttctttcctgcgctgtgccatgtcctcagattctgtcagaagatcatccaataaggatgatttatacagctggcctactagctcactctgaagagtgtctttcacatgattaaccaaaaaatgcattactgcctttggcacactgcaaaacacaaccaaattatggaattttagccaaaattctacttttaacaatttgggcttagatgctaacctcatgaaataaagttaagtaagaacactactactttggatatttcattaatggcataatcgccctttagatttttgcttaactgtaattaaacattaagaaaagcagttctcggccaggcgcagtggctcatgcctgtaatcccagcactctgggaggctgacgcgggtggactgcttgaggccaggagtttgacagcagcctggccaacatggtgaaacaccgtctgcactaaaaatgaaaaattggctgagtgcagtggcgcgatcttggctcaccacaacctccacctnccagggtcaagcgattctcctgcctcaccctcccgagtagctgggattacgggcatgcgccaccacgcccggccaattttgnatttttgggggagacggggttnntccatgt

SEQ ID NO: 561 - DNA, 856 bp, Homo sapiens
  misc_feature (267)..(267): "n" may be a, t, c, g, other or unknown
  misc_feature (399)..(399): "n" may be a, t, c, g, other or unknown
  misc_feature (484)..(485): "n" may be a, t, c, g, other or unknown
  misc_feature (661)..(661): "n" may be a, t, c, g, other or unknown
  misc_feature (735)..(735): "n" may be a, t, c, g, other or unknown
  misc_feature (836)..(836): "n" may be a, t, c, g, other or unknown
agaatgtggggcgcctgtaaagttaaggttcacgattccttggccaccatttccatcactctgagacggtacctgagattgggggcgaccatggcaaaaagcaagttcgagtacgtgagggacttcgaggctgacgacacctgcctggcacactgctgggtggtagtgcggctggacggccggaatttccatcggtttgctgagaagcacaactttgcaaaacccaatgacagccgtgctctccagctgatgaccaaatgtgcgcanactgtgatggaagaactagaggatattgtgatcgcgtatggacagagtgatgagtacagctttgtgttcaagcggaaaaccaattggtttaaaagaagagccagtaagttcatgactcacgtggcctcccantttgcctccagctatgtgttttattggcgggattactttgaggaccagccccttctgtatcccccaggctttgacggaagagtcnnggtgtatcccagcaaccagactttaaaggactacctcagctggcgacaagcagattgtcacatcaataatctttataatacagttttctgggcacttatacaacaatctggactaacaccagtacaagcccaagggagattacagggaactcttgcagcagacaagaatgagattntgttttctgaattcaacatcaactataataatgagccgccgatgtataggaaagggactgtgttgatatggcanaaggtggatgaagtgatgacaaaaagaaattaagctgccaacagaaatggaaggaaaaaagatggcagtgaccccggaccaggacaaaccagtgcccttgnactgggatatcatcggggat

SEQ ID NO: 562 - DNA, 841 bp, Homo sapiens
  misc_feature (722)..(722): "n" may be a, t, c, g, other or unknown
  misc_feature (766)..(766): "n" may be a, t, c, g, other or unknown
  misc_feature (795)..(795): "n" may be a, t, c, g, other or unknown
tattaattacctctctagaccagtgttagcaataacaaacacttgctagaattttaagactatataatcaatcactttgatgtcagttaatcctaccaacacaagattaaaggtttaaaaatctcatacgtgtacagccattagtgtctcctttcatactatattattttgttcattggcagctagatttttaggtagaacttgtgttcctttttgcaatgctcatttattttacctggacagaaggtgctcttctgtctcttctccaaagttaatttatctcatactatttcttgtgttaatattttccaagttcagtatgctgttctggttataagaagatcagtgtcctaatcacacacttttacattatatgaaacatcatacagagttttgtagtctgtataacaatacacagaggtagcaaaatttgtaaaagagcagactatatagtccatactgtagtaactactcaacattgccattatacgtgaaatcggctataaccaattcataaacaaatgaatttggccgtgttctagtaaaacttatttacaaaaacatgtgttaggccagatttggaccacaggctgtagatttctgacctctggcttacagcagaagtttattatgatcctggggaaggtggatatacatggaaggcagaagcgagaagatgtattccatcccatgtcatttttctgaccctcaacgtaggaagntaaactaaacatgggcagaactgctttaagcctttgaatcttgntcttaaagccaggttgagggtatgggttntaatctttatatctcctttcacttaagcttgcactagtcattggaa

SEQ ID NO: 563 - DNA, 777 bp, Homo sapiens
  misc_feature (735)..(735): "n" may be a, t, c, g, other or unknown
  misc_feature (768)..(768): "n" may be a, t, c, g, other or unknown
  misc_feature (772)..(772): "n" may be a, t, c, g, other or unknown
tgtagattccttccaaatgataggtataaaaatgcaatgaaaatgataattggagattttcaaaataaatgtaaaattaataaatagtggtgaacattttctgcctcagctcattggcataatacattccccaacatacataataattataaaataatatagtaactgttaagttatttcaactgtccaagttttctggtataggaactttgtgtaaaatattactcagatatgggaggcttaggctgggatttttcagtttgtcatacagagcatttttaatgatttgaatgtagctgaatttggcttacagtcacaagaaaacaagatgttctaaaatataaaattatacccttggaaccaagaactgtttccctgtactctggcagttagctaatgccatcacatttgaaccttgcatttaccttttatagccagtgaatctctgtctgctgtatcttaaagaacagttctgatttccctaatggaggaagaattagcttggatactctcacagtcactatcccttacagacaactgctgagttctagaaggatttctattctaccaacacagtgtcttagggagacggactagaggacaggatgattagtttagaaattatgcttctggctaggttttaagtttcttgatagcaggtattacgccgtgctgcaaggttatggttctccagatggacaccattacattttttttttttcatatttttctggngtcctctggagttatgcaatgtatataacctgngtanctggg

SEQ ID NO: 564 - DNA, 753 bp, Homo sapiens
  misc_feature (704)..(704): "n" may be a, t, c, g, other or unknown
  misc_feature (712)..(712): "n" may be a, t, c, g, other or unknown
  misc_feature (716)..(716): "n" may be a, t, c, g, other or unknown
ctcttggtttttgttccagctgagcaattttcattgccgacagcacaacatacattaggataaagcaaataaacaatgcaaggcacttggagccaggaagtcgcatctcagactagaaacacatagttttctattgacatttgggaggtgggctgctaaataggcgagccagccaccaaatagaaaaccagtggccatgaggttcttgcacttctagggaagccatttatttaatcgttagatctttgaaaggtgtctgaagttgattttgatgtaacaacagccagtttctttgtaattaaatattaactcaaaactatgtcttgggtaactgttaacctttgccatttgttgtttgccttagacatgtaattaacattcattgaatttaatttgttgttgttcacgtcttttattaactcatacacaattacttgtcttctgtttttaaaaacttttttgggaagacagggtcttgctctgtgcgcaggctggagtgtggtggcttgatcttgactcactgcagcctcgacctcctgggctcaagccatcctcccacctgagccttccaagtagctaggaccacaggcgcgcaccaccatgcctagctaattttttattttttgtagagatgggatctcgctatgttgcccaggctggtctcaaactcctgggctcaagtgagccacagtgctgagccttgncttctggnttgntgaagcagtaagtcagacaatatttgccacaataatg

SEQ ID NO: 565 - DNA, 866 bp, Homo sapiens
  misc_feature (728)..(728): "n" may be a, t, c, g, other or unknown
  misc_feature (784)..(784): "n" may be a, t, c, g, other or unknown
  misc_feature (813)..(813): "n" may be a, t, c, g, other or unknown
  misc_feature (831)..(831): "n" may be a, t, c, g, other or unknown
taagtcaatctccagttccttttgcctcctggagttcagcaggtgaggctgaaagttccaagcctcaaaaaatgtggttggggccaggtgcggtggctcactcctgtaatcctagcagtttggaaggctgaggcacatggaccacttgaggtcaagagtttgagaccagcctgaccaacatggtgaaaccccatttctactaaaaataacaacagttagctaggcgttgtggcacatccctgtaattccggctactcgggaggccgaggcgggagaattgcttgaacccgggaggtggaggttgtagtgagctgagattgtgccattgcactccagcctgggctacaagagccaaactccgttttaaaaaaaaaatgtggttgctttctctggcagctagccctcctcctgaagcagtctcggagcttgcagccaccctgttagctcaacagcatcccacatgcattcttaccatgctgcagatctgaaagaccttagaggcccttgtgtcaggaacctgggactaagactaaatatcaaaacagaaaatgctcctattacctctgtcacgaagggctttataagagctttggaagctttatgccaggaaccaggggcagagaccaaatgtatatttcttttcttatatcggagacagagtctcactctgccactgaggctggagtgcagtgatgtgatcatagctcactgcagccttgacctcctangctaaagcaatccttccaccttacctcttcagtagctggaactacaggcatgcatnaccatgtccagctgatttaattttgtaangcaggatcttcctttttncccagctgactctaattttggcttaacaatcttct

SEQ ID NO: 566 - DNA, 813 bp, Homo sapiens
  misc_feature (668)..(668): "n" may be a, t, c, g, other or unknown
  misc_feature (684)..(684): "n" may be a, t, c, g, other or unknown
  misc_feature (784)..(784): "n" may be a, t, c, g, other or unknown
  misc_feature (787)..(787): "n" may be a, t, c, g, other or unknown
  misc_feature (797)..(797): "n" may be a, t, c, g, other or unknown
tttattaagttttgcaacactaattcccttatagtagctagaaattttcaacatcaaataggcatttagtcatgttgaattgaattttaagttgaattcctgtggcttgggctttcttttttatactagtttgtataaactgttcaactcctatagctcttacgtctcactctcagtgagctggtaacagaatcttcacagacaagtggttgcacattccatttatttagcaatgccctctgtgtgtgtgtgtgtgtgtgtgtgtgtgtgtgttgtgtgtgtgtgtataggttaattttgttagtgatctttaaatttcagaaaatagtcttttagttgaacaaacaaataaatgaaatatgtcagtagatcagatgaaactgtgacccgttcggcaatagtaagtatacagtgtgtctgggctaccagatggttttagaaactgtcaatttccaaaatacagaaatctgagagagcttcataaacaatgtattgctttgctgaagatgacagatcccattgaggaaatgcccctttagttgttttagatcattaatgatactctataaacataataagattaacacggagaaacaaaatacctgtgtttgcagtattctttagttatcagattattgtctcagttctcaaaatgccaaatgtgatangataagtgcaagatangaagtacatttttaacatctattcagttagcattaatgctcaagttaaagctgggctcctaccagggacataatgggctcctggttaacatatttatgtnggntggaaaattnggaacctgctttgcag

SEQ ID NO: 567 - DNA, 816 bp, Homo sapiens
  misc_feature (780)..(780): "n" may be a, t, c, g, other or unknown
  misc_feature (789)..(789): "n" may be a, t, c, g, other or unknown
  misc_feature (816)..(816): "n" may be a, t, c, g, other or unknown
tacatggagaaaggctcaatagaaatgcaaacgtgtgtgctagaataaagaagttattggtggttttacttttgattatcccgtaaatttttttaattttaaattattctttttaaaaatgtcttctactaatctttaaacattattaagtagtgagaaatattatttctactgatttataaatatatccattcttcacattcacagtgggatttgtaaaagcaatccttggatttacaacctttttttttttttttttagcaaacaaagctctcaagttggtgatcctcaggtaacatctaacctacagatattgcaccagttatttattgctacaaaaatgctgcctaagaagccacccaaagggcagtgggttacaacaataactataccttttttcttaggagtctctgcattagttggacagctcttctggaattatcttctaagtcaactgtgggttgggtaggtggctctgctgatttttcgctggacttccacatttgggaccagttggctgtcatcagctctagaaagggtgtggctgttttacattggctgttttcctcacattcctcaagcaggtaagcttaatcatgttctcatattgaagcagaaactgtttactcatttatctatttacttactgggtctcctgggcactaggtactgtaataaagaactggagaaatacagtcagatgggaagtagcccctgctgtcaaggagcttgccatctaatgggggagacaggcaagtaaaccaaagacttcccaggcantatggaagngccatgatttgatgtgacagggcacan

SEQ ID NO: 568 - DNA, 825 bp, Homo sapiens
  misc_feature (719)..(719): "n" may be a, t, c, g, other or unknown
  misc_feature (776)..(776): "n" may be a, t, c, g, other or unknown
  misc_feature (816)..(816): "n" may be a, t, c, g, other or unknown
  misc_feature (821)..(821): "n" may be a, t, c, g, other or unknown
caaaagtactgaaaagacaaaaaggatagaagatcgaggtagtaaaggccatccacattttaaagggttatttgtcttttatataattcgtttgctttcagaaaatgttttagggtaaatgcataagactatgcaataatttttaatcattagtattaatggtgtattaaaagttgttgtactttgtctgtgaccttaattttctgcactgagttaccaaatatttccaaccaggtagtcttcagatcacctgatgaaaggagcagggaacaggaagagggtggtgtaaacattataaaaatttcacaaaccatgcctatttcattttcacttaaaactgcaatgttattttttgggtaaacacaaaagtttcactagcattttagttatacatgcttaaaaaaatgttagatgtagtgggatttctcttaagcatcaaatgatcttgggtactttaaaatacagacactatgccatttgagctgctttttccctagtcctatttatacgttggcttgttcatctctagtcttctaggagtttaaggaactggagataagagtaatttgggattccatgtggaataatgtgctcttatgagagtacgtgctgctgtcttttgcttagtagcattttgatccactgtcagtagcccatttgtcaatgccttgctgctgctttgtagatatacttagtctagtgcttaataagggagttgntttgggttttcttttaattgggacaggtaagaagtagttagcatacccaaaaatatncattggcttacattggccaaacttttgggttatataagtntcacnggtt

SEQ ID NO: 569 - DNA, 800 bp, Homo sapiens
  misc_feature (738)..(738): "n" may be a, t, c, g, other or unknown
  misc_feature (764)..(764): "n" may be a, t, c, g, other or unknown
  misc_feature (784)..(784): "n" may be a, t, c, g, other or unknown
gcatcaagctcgagaaggagttcgacctgcccccggccgcgatgcccaacacggagaacgtgtactcgcagtggctcgccggctacgcggcctccaggcagctcaaagatcccttccttagcttcggagactccagacaatcgccttttgcctcctcgtcggagcactcctcggagaacgggagcttgcgcttctccacaccgcccggggagctggacggagggatctcggggcgcagcggcacgggaagtggagggagcacgccccatattagtggtccgggcccgggcaggcccagctcaaaagagggcagacgcagcgacacttgtgagtactgtgggaaagtcttcaagaactgtagcaatctcactgtccacaggagaagccacacgggcgaaaggccttataaatgcgagctgtgcaactatgcctgtgcccagagtagcaagctcaccaggcacatgaaaacgcatggccaggtggggaaggacgtttacaaatgtgaaatttgtaagatgccttttagcgtgtacagtaccctggagaaacacatgaaaaaatggcacagtgatcgagtgttgaataatgatataaaaactgaatagaggtatattaatacccctccctcactcccacctgacaccccctttttcaccactccccttcccatcgccttcagccccactccctgtaggatttttttctagtcccatgtgatttaaacaaaacaaacaaacnaacagaagtaacgaaacttagaattntgagagtgcttgtcaccagnacacctggtttttttc

SEQ ID NO: 570 - DNA, 892 bp, Homo sapiens
  misc_feature (631)..(631): "n" may be a, t, c, g, other or unknown
  misc_feature (693)..(693): "n" may be a, t, c, g, other or unknown
  misc_feature (732)..(732): "n" may be a, t, c, g, other or unknown
  misc_feature (826)..(826): "n" may be a, t, c, g, other or unknown
  misc_feature (854)..(854): "n" may be a, t, c, g, other or unknown
  misc_feature (856)..(856): "n" may be a, t, c, g, other or unknown
aataaaaaccttcaataaattaggtatagaaggaacatatctcaaaataataaaggccgtatgtgacaaactcacatctaaatcatcctgaatgggggaaagctgaaagctttttctctaagaactggaagaagacaaggatgcctgctttgaccactcctgctcagatagtgctggaagtagttctagccagagcagtcaggcaagagaatgcaataaagggcatccaaactggaaaagaggaagttaaattgttcctcttttcagatgacatgatcttctatatagaaaaacctaaagacgtcaccaaaaaacacatttagaactgatgaataaattcattaaagtgacaggatacaaaatcaacatacaaaaatcagtagtgtttctatacaccagtaacaaactagctttaaaaaatcaagaaaaagccgggtgtgatgcttcatgcctgtaatcccagcactttaggaggatgaggtgggtgcattgcttgagcttaggagttttgagaccagcctgggcaacatggtgaaaccctatctctgcaaaaaaaaaaaaaaaaaaaaaaaaaaaattaaccaggtgtggtagcacatgcctgtagtccccagctagtagggaggctgangtgaaaagatcgcttgagcataggaggctgcagtgagctgtgattacgctactgcactccancctgggtgacagagaaagaccctgtctcagaaaaaaaangaaaaattgagaaagcaatcccttttacgatagctaccccccaaaaaactaaaaaacccaggaattaaatctaacccaggaggtgaaagaactntgcaatggaaacttttttaaaccggggntnaaaggaaattgaaaggggaccaatttaaaaatggga

SEQ ID NO: 571 - DNA, 876 bp, Homo sapiens
gaatagaatgaaatctcagtaatgaattaaagcaacaaaaagatattgattggcaaaaagcaagatataagagatgcatttgcttaacatctctacataatatttatggtctggtcagtattggtctggtcagtattgcctggctgacgtgaaatgtaaactagtaggcatgttattgatctgctaaaactaaccctctttttaagaggagatttaaggaagacgtcaatcaaaatgtcaaatatgtgtgtcagaatataaataatttttcacattgtattgttgctatataaaaaaaataatagaattggttgggtttctgaggtgaaatccagagtaagagtactagacagttcaacaagccacatctaatggcacagatagaggatgtagctattttatacctttcataacatttgagagtaagatatccttcaggatgtgaagtgattattaagtactcatacctgaaatctgttgtcaagattagaactggggttcatgttaaaaaccttccatattacctgagggtacctgtggggaacagttccttcccctgtgtggtagtattttgttggaagagaatgtttatacgaaaaatgaaattcttccaacagcagagaaactctaaaaagtttgatagtacctatcaaagtgctgtacttctgtgatagagaacatctgatgtccaatttagatctatttctttatactttttctaaccaattgcttaatagtactttggatgattatcacctttgccacttaaaatatataaatatccttttacttcatgaggaaggaggaattttttggatactgagttcagccctttgggatacttatattttgggcttacattttaactttaaagaa

SEQ ID NO: 572 - DNA, 879 bp, Homo sapiens
  misc_feature (818)..(818): "n" may be a, t, c, g, other or unknown
  misc_feature (853)..(853): "n" may be a, t, c, g, other or unknown
  misc_feature (866)..(866): "n" may be a, t, c, g, other or unknown
tgaataaattttgcttctaagagaagttactattcctaattatatggggagtaaagtctctttgaagaggaatctctactttactttttacacttgtgctttgataattttttacttggaaacctcatcttttggcgttttttttttttgagctatttctctagtgttgctatttgatttaatttctgaccttcatttttgtttcccaaccttttttttttgtttgatatgaggggttccgtgactgaggttctgagctgctgttgatgtgctatacctccttcaattctcagctatcaaaggggaaaacaactgcagaggatgggaaatgctatactgccatgcctggaaacacccacaggaaaattaccagttttgagcttgctcaactgcaagaaaaactgaaggagacagaagcagccatggaaaaattaatcaacagagtgggacctaatggtgagaggataagggcttctgatttcccatgacttaggaaacagaattaagactgtttcattcattgaagatcagaatgccctgcgtacagtctggaaaagtaacatgtgccgcctgaagagacaagagtttgtgataagcagagcacagactgtgacttctgaccaagagaaacggttgctacatcagctccgagaaatcaccagggtcatgaaagaaggaaaattcattgacagattttctccagagaaagaagctgaggaggccccttacatggaggactgggaaggttaccctgaagagacttacccaatttatgacctttcaaactgtatcaagcgtaggccagaaacaatcttggnggattaccctgacccaaaagaactttctgctgaanaaatagctgaagnaatgggaatgatg

SEQ ID NO: 573 - DNA, 833 bp, Homo sapiens
  misc_feature (782)..(782): "n" may be a, t, c, g, other or unknown
  misc_feature (816)..(816): "n" may be a, t, c, g, other or unknown
  misc_feature (822)..(822): "n" may be a, t, c, g, other or unknown
gtgttttcaaataggagtaaaggcccttgcaatttttaattaacaagcaaggcccaagggaacacatgtcctcaaaagtttttctgatccctcgccttgcacacctggcatgcatcaggcacatctgtcctacagctggcagagacagatgcctcggttctttgtcattcagattgcatttgacctcttctcatctatttatttctttatacatccagacttcatcacatgaagcctattggggttaagtttgtaagtgtttaattgtgcaaattgccaccctgtgtacctcctccatgtctgtctgcgtgttttccaccaaagaatgcaaagcagacttccaggtgtttaaattctgttcactcaacaatgccagatgaatggaagagggaacacactgagatgacttagactctggtccaccaaccagacccttggaaaggaatactaaaatcattacaaggtatggattttaaatggatgaaacttcaaattatcttatttggatagaagtctatattctagcctcatttgcatgaagtcagatagccagaagaaattccattgctggttttcacgaaattcacttgtcttttgctaataaacacatggccctttcccagattattctctagccaagccccacctttgttacgttgaaatccctcatttattttcttctcaaaatgcccattatccaaatgcagaacctctgcatctccaagccagttatgctgaatttgtcaaacttagacacccttgacaactgcctcctactgtangctcctggcatactgtcgtcttctgtgggggatnggagangttagtgtgat

SEQ ID NO: 574 - DNA, 894 bp, Homo sapiens
  misc_feature (833)..(833): "n" may be a, t, c, g, other or unknown
tattagaaccattctgccttgctaatgctgcctaccttgggggccaagaaatgatggaggtggtgaagagagatgacgaaaccataaaggagcatttatgtaagcttacattttattatggtactatagatccttggtgtccaaaagagtactatgaagacattaagaaggattttccagaaggagacattcgactctgtgagaaaaacatacctcatgctttcatcacccattttaaccaggaaatggcagacatgattgctgactccctaaaggatgacttgtccaaaatgtaaattggcctgaggaacaagcccccactgccagtacatggaggcagtcagtgtactagacttagtaggtaaatgtttaattttgaagactgatattagaaatgaagaaagtgagaacctttgtcttacaaaccaactctccgctcgccatgttataggctgaagtaaacacagttgatgaatcattccataggtttaaccatacattttccaagactcagggaacacagtgatctacacagagtcttgtgtttgcacaagatgcccagtggcaccatatggtttattttggtaggcaggatctttgcagatgaaaaaaaaatctacatgtacttgattttaattgagttacattgtagaataggctcctctggaggaaattatgaaatacctactagaaaatgtaaaataaatcagtgaatgttaagagtatagttagatatgtgaagtgtatgagattatgacaaggatacactcatgttccaggaacaggaagtgaacctgggtctcctgtaagacagaagatgaagatgagcccangctacttagcacagatcttggctgagaacatcatgggacgtctaatgacctgcctaaaaaa

SEQ ID NO: 575 - DNA, 861 bp, Homo sapiens
  misc_feature (815)..(815): "n" may be a, t, c, g, other or unknown
  misc_feature (819)..(819): "n" may be a, t, c, g, other or unknown
  misc_feature (824)..(824): "n" may be a, t, c, g, other or unknown
agcgcgcgggaggcgggattgtgcttgcacgacttcccccggcccgcggcctgtgagcccaggtcctggggtgaaccgagcgctcgctcgttcgtcagaccgtagcgctccagcggctgtccttactgtgtagtagccaaagctgagggtgatgactgtgaaccagaacagactgcctcgctgaaaagtcacttggaactcttctgtggcatctgaagcagatggacgaagccaagagggccgagagtatctcagcacctagaaatggacaaggctggttattagaacaaagatttcgcaggtggtgagtctcaaaggcgaagctgaatgaggcaagaatctgcatcaaagagccctggaagcaatcatggctcaactgtgatgcctttagaacatgaagtcctccaagaagatgccataggaatggcctccatcccagggcctggagagcagccagagacaagaagagtagcccaggagggcactggcagtcagtgctacactgtggcctgtcagtctcagagccaggatttaatcactggatctcccattaaccagtcataatgaagtaagaacaagaagatggggaagaggaagtgtaaaaccgtggcttaaatttaccaaggataagctgagtgtacttcagcagtcatttgcacagaatccttatcctaattttacaaccagggaaaaactggctggacagtctcttgtcctgtgtttgtaattgataactggtttcaaaataaaagccagaccaccacttagagagagacacagaatgttcactggccagggaactgcattgattcctnttgncaaangccacccatttaccaagaattccaggaaaaaccaggt

SEQ ID NO: 576 - DNA, 889 bp, Homo sapiens
  misc_feature (712)..(712): "n" may be a, t, c, g, other or unknown
  misc_feature (744)..(744): "n" may be a, t, c, g, other or unknown
  misc_feature (846)..(846): "n" may be a, t, c, g, other or unknown
aaggatgcggtcccgggttctgtggggcgctgcccggtggctctggccccgccgggccgttggcccagcccgccggcccctgagctccggtagcccgccgctggaggagctgttcacccggggcgggcccttgcggaccttcctcgagcgccaggcggggtctgaagcccatttgaaggtcaggaggcccgagttgctggcggtgatcaaactgctgaacgagaaggagcgggagctgcgggagactgagcacttgctgcacggtaagggtcgggcccgggggagaggcgtcagagcacattcttgactcttcgtttgacttttccactgcccacactacccgagtttgaaactctttactcacttgcagccgtttttattttggatcagaggtcaggacatcattacgtgctgtgatcccatcctctcctgtgggctctcttgtgctcctttgccacggcgctctgccgccttttacatgcttattagttgtggactcgggcaagagctcattagctcagcaaggataaataaggcactgtccctgtgatgggctccacagcggtgtttctcaaagtgtggtgtggagacccatttgcagtagtatcagggcagtgcttgttaatagcagacttaggactcagaatctcagacctatacctgggtaaaggtactaaattgggaaattcagtatggcctaagtatagaatangtgggaagatgatgtcatagaaacatgaaccngaaaaatagttaagaaccttgcaagacaaagaatttggattatttttatagaccatggaaagttacaaatgtttttaagcagagaattacgtctttgtaaanaaagttatggtggcatgccctaggataaatggatattttcaaa

SEQ ID NO: 577 - DNA, 804 bp, Homo sapiens
  misc_feature (739)..(739): "n" may be a, t, c, g, other or unknown
  misc_feature (775)..(775): "n" may be a, t, c, g, other or unknown
  misc_feature (802)..(802): "n" may be a, t, c, g, other or unknown
attttttttttctaatgtagtaaggactaaggaaaacctttggtgaagacaatcatttctctctgttgatgtggatacttttcacaccgtttatttaaatgctttctcaataggtccagagccagtgttcttgttcaacctgaaagtaatggctctgggttgggccagacagttgcactctctagtttgccctctgccacaaatttgatgtgtgacctttgggcaagtcatttatcttctctgggccttagttgcctcatctgtaaaatgagggagttggagtagattaattattccagctctggaattctaagtgaccttggctaccttgcagcagttttggatttcttccctatctttgttctgctgtttgagggggctttttacttatttccatgttattcaaaggagactaggcttgatattttattactgttcttttatggacaaaaggttacatagtatgcccttaagacttaattttaaccaaaggcctagcaccaccttaggggctgcaataaacacttaacgcgcgtgcgcacgcgcgcgcgcacacacacacacacacacacacacacacacacacacaggtcagagtttaaggctttcgagtcatgacattctagcttttgaattgcgtgcacacacacacgcacgcacacactctggtcagagtttattaaggctttcgagtcatgacattatagcttttgagttgggtgtgtgtgacaccaccctnctaagtggtgtgtgcttggaattttttttttcaagngaaaatggattggaaaacctggtggtnaa

SEQ ID NO: 578 - DNA, 893 bp, Homo sapiens
  misc_feature (778)..(778): "n" may be a, t, c, g, other or unknown
  misc_feature (862)..(862): "n" may be a, t, c, g, other or unknown
  misc_feature (867)..(867): "n" may be a, t, c, g, other or unknown
  misc_feature (878)..(878): "n" may be a, t, c, g, other or unknown
agcagatgacagtaatccaggcagaaggttagtgtcagagaagtctgtcagtgggtcatagggctccacgtgctagcctgggtttccgtgccagaattttgttcttgggaggcaggtagggaaaagcaagtcaacatctccagttccagatgagctagggcacttgaccaaatacaggtacagaagttagtccttgaggtagagcttacctgttggagaacatggcagaaatcattgtaccaaaattggagcacaggtcagaggctaaagcatggcttactgctgtggctcatggtgaacttgagcttctcatggcccctcctatctcctgaggatggctgagctcacagatggggactgttatgtaatcagaggtcaagtggtttagctggggtggcagagagccaggtgaagactgaaagtgttcaaataaggaagagaacagaattgctttatgtctgccttcatgaagacaaaccctaatagccaaaggactgaaagtttgcccaaagagacctcaatttttgaaaggaaaatgcatcttctccttatgttagaatgaccacgtctaaataaaataaactcttttgccttttgttgttacttgtcttggtatctaccattgtttgacactaaaaaaaataaagcagtgactaattattggctaatttaatctgtcatgatggcatttgtaattcaggtacatccttcattaaagcaagtataggcattattatttttaaaactttttttttctattttggatttcttctatttnggttggataattaatttggtggtactggtggtggtggggtttacagtgagacatactggttagttaactaagggtttgagtaanattcntaacctaaagncctttgggggggttg

SEQ ID NO: 579 - DNA, 892 bp, Homo sapiens
  misc_feature (753)..(753): "n" may be a, t, c, g, other or unknown
  misc_feature (763)..(763): "n" may be a, t, c, g, other or unknown
  misc_feature (808)..(808): "n" may be a, t, c, g, other or unknown
  misc_feature (860)..(860): "n" may be a, t, c, g, other or unknown
  misc_feature (888)..(888): "n" may be a, t, c, g, other or unknown
aagctacactgcagtcatatttggcatatgtgacatataggcccactgcatttccttccaaaggcaagatgccaagggaaggtgccagtaattttatgaccaatatgacaccattttgtggtgtttgtaagttgaaacaatatatttccctgcattacacaagtttataaaaaacaaacaaaaaaaagaggccccagctgtggttgatcgatgatgaattgaatagagcctaaccttccaggcttctcacttgcacaggcccttccaaggtcctgggagggcccctggaaatttttgtagtcataatttttttaatgtttttactagataaggctcaggccccacaaaatcctgaaatcatccctgggttccaatagttacaacccagtaaatctcttgaatgaagcctctatgttattgacaaatactgactggccaagttagcagggtgatagggtcagtctattttgaatctgaaatccatctcaaagacaggccaagagcttattagtggacttaactggattctgctggcccaagcgcagtaaagtcaaacaaccatatcgaggttttgcactggggaaaggaggacatttatttgcagggcatccaagcaagaaggaccaggcggctaactatcaaagtccctcactgaatgggggcaataatcatatctcttacagatgaaatcatgaatgaaatggtttatggaaaagcagcaatggttgataatcctaaatgttaagtatgttnatattttttncctgactttaaagtgcttctccttcattcctatacacaggtccanactgatggcttattttttaaaatcttttagcacttcatgggtctaacattantttagaaactggatgactttgcatggtnaaag

SEQ ID NO: 580 - DNA, 887 bp, Homo sapiens
  misc_feature (771)..(771): "n" may be a, t, c, g, other or unknown
  misc_feature (796)..(796): "n" may be a, t, c, g, other or unknown
  misc_feature (842)..(842): "n" may be a, t, c, g, other or unknown
  misc_feature (884)..(884): "n" may be a, t, c, g, other or unknown
gaacaggttggttgaacttgggcagaatcacagatacaactccacactaaagaatgaaaataagcaatgaactagacagaaggaagaaatcatgaagacttaggaagcagaattacaatctgtcatattaacaaatggagtttgccttctaagatcagatgttgctcagaaactttcattgtttacctaataatttaatatcactagtttcctagtgggtcaagcagatgcaaaatccagcttattttcttctatgtgctctcaagcttattgcttattttaaagtaaaatcctgaaaaaggaaaatattaggttggtgcgaacgtaattgcggtttttgcattgttgaaatttgccgttttatattggagtacattcttaaataaatgtggttatgttatacatcattttaagcatatttctcactttttttttgctaatgacttattgctgtttatatttattttagactatggaaatgatgttagacaaaaatcaaatttagcgattttctgagttcaaaataggttataaagcagcagagacaacacacaacatcaacaatgcatttggcccaggaactgctaatgaacatacagtgccgtgatggctcaagaagttttgcaaaggagactagagccttgaagatgaggagtgcagtggccagtcatcggaaattgataatgaccaattgagaacatcatcgaagctgatcctcttacaactataaagagagctgcccaagaactcaatgttgacccattttatggncgttcggcatttgaagccaaattgnaaaggtggaaaaagctcaataaaaggggtgccctcatgaagctgantggaaaaaattaaaaaaaattcgtgggttttgaaaggggcanttt

SEQ ID NO: 581 - DNA, 801 bp, Homo sapiens
  misc_feature (356)..(356): "n" may be a, t, c, g, other or unknown
  misc_feature (426)..(426): "n" may be a, t, c, g, other or unknown
  misc_feature (716)..(716): "n" may be a, t, c, g, other or unknown
  misc_feature (787)..(787): "n" may be a, t, c, g, other or unknown
  misc_feature (789)..(789): "n" may be a, t, c, g, other or unknown
cttgccagttacatataattggtgacttttaagttatttgtcacctggaacagacataacttctttagcataaaattcagatacaactgtcattgaatttatgtttccataaaattggtggtagaatttttagcattaggtaggagaagaggacagggaaagacagctgtgtctcaggcactgtactgttttacctattttgttaaatcctcacagcaaccctgtaggtaggtgttaactgaagcagagaggttagataacttgctcagtgttacacactgatgataaatgacagagcaagaattcaaactgtaatgtttcggttcttgttatcttttattcatcgcctttattgnttcttttctttctttctttctttctttttttttttttcttttgagatggagtcttgctcttgtcgcccangctggagtgcaatggcatgatctctgctcactgtaacctccgactcctgggttcaagctattctcctgcctcagcctcccaagttgctgggattacaggcgtctgccagcacgcctggctaatttttgtatttttagtagagacagggtttcgccatgttggccaggctggtctcaaactcctgacctcgtgatctgcctgcctcggcctcccaaagtgctgagattacaggtgtgagccaccgtgcctggccctccttgctttattttatgattccattcagtcattantcttgtcggtttttaaaaaaaggttttattgagatatgattcacatactatcaggtcactcattaaaagtntncaattcacttta

SEQ ID NO: 582 - DNA, 847 bp, Homo sapiens
  misc_feature (731)..(731): "n" may be a, t, c, g, other or unknown
  misc_feature (767)..(767): "n" may be a, t, c, g, other or unknown
  misc_feature (826)..(826): "n" may be a, t, c, g, other or unknown
  misc_feature (838)..(838): "n" may be a, t, c, g, other or unknown
gagtgtttctggtggaatgctggattgttaatcgtgttagatggaattatgaccttgttgttgtctttatgtggcagttaagtatggtttaaagagatgtttatgggtgccaagttgacaagggtagacttgtgatggttaattttatatgtcaacttgaataggccacagggtgccagatatctgtttaaacattattctgaagtgtcttgagtgtgtttacagacgagatttgcatttgaactgggggactcagtaaaggagatagccatccccaaggtgggtggacatcatccagtttgttgagggcgtaaataaaataaaaggcagaggaaggaagaattcacccccctttttttttcctgcctcattgtttgagctgtgacatctcatcttctgtcctcagatggatttacatcactggcttccctggttctcaagcctttggattcagactgaattataccacaggccttcctgggtctccagcttatagatgacagatcatgggacctcttagcctccataatcatgtaagccactttcttgtagtactggtaaaagatatattagaccaatctataaaacagatagctatgaaagagaaaggtgacaggcacaagcctaggcaaatagagaagggttcctggagagcctctgacttgcctaggtcattgtgcacacgtggcttgcctgaatgaacatgcccactgtgaaagattccatttctnaacacatgtgccagtaaggggaaataaatcaatggnggctcaaactaacgcccacacatggggtggaaccccccaggaagttgctccttatgccngggaaaaagccnggccctttt

SEQ ID NO: 583 - DNA, 825 bp, Homo sapiens
  misc_feature (783)..(783): "n" may be a, t, c, g, other or unknown
  misc_feature (787)..(787): "n" may be a, t, c, g, other or unknown
  misc_feature (804)..(804): "n" may be a, t, c, g, other or unknown
tattttaatcaacattaatttttgggttgactgttttgactgatagcataaagaaatggtggcatgctaaatctgaatttggagccataacagcagggacctgggagaagtgcctgatggactatcaacacaactacctactatctcttctctatctgggaagtagcaaagatctatctgagaacaaagaagtcgacagaataacattgatgactttttaaataattaatttatttgaagaatgcttgcatacaaaaagcttcctgcaggaattttaaacaagctgtccttggttatcccaggcaatgtcagttgatttaattaagtttacatgcaaaagagaatacaattgtaacattaattggaacattaagttggcttataagcagtatttccactgctcctacaattgattttagttatttgataatttatttaatatttgtatttagtgtggtaaactcctgtagttcataatattttcaagagtgtcatttgtatttttgttagttcttaatgaataatggaaaagttatcttataatttcattggagccaaagattttaaaataaaaataaaaacaaacacacaaataaggcaccttgtgtttgtttattttctgtcctctgatcatcacccagttaatgagcaaacaaggtaggtggcacccatgagcctgctgtgacatttaccacggggcacattctcctaagagtaactgcaaggaaatgtgtataatgataaaatggatcttacttgatttcttttaatgaacattacatnccanatgaatggtcctggttncccaacttctttggggggaaa

SEQ ID NO: 584 - DNA, 902 bp, Homo sapiens
  misc_feature (660)..(660): "n" may be a, t, c, g, other or unknown
  misc_feature (817)..(817): "n" may be a, t, c, g, other or unknown
  misc_feature (887)..(887): "n" may be a, t, c, g, other or unknown
actgattttcttagataatataattaaacagaagcgtgtaacagattaaacattatgagagagaaaaactttattgatcaaacatttggcttccaagaaaagtacctgacctagctcaatattaggtaacattatgaagtatttcctgggcatgataatgacattgtggttatatgataggtgaattatttagggtcgaagtgtcaaatcagtgtctttgtggagggataaagctttgtggagggataggggaaaatgttcgacaattgttgaatctaaatagaaggaattcacatgtttattttaacattctatcaactttttggtatactcttaacaaaaagaaaaaaaacaatgcctgacttagatgtttatatgggtgactcaagctatcaagtaatggataactcctgtgccatataaacagttccaatacactaacaaaaacttcctaatttacttgaggacattaacaaaaacctcagaagacatacctgaaattatgaatcttttgcatcagtgtgatgtctccacttttatttctgattttatttatttgagtcttctagttttttcttagtctagctaaatgtttgttaacattgtttttaccttttcaaaaactaacaatttagttgatttcttcctgtttttctattntttatttctgctctaatttttattctttccttttttctgctaactttgggcttagttttggtcttttttttctagttccttgagatgtaaaagttgagttgcttatttgagatctttcttcctttaaaaatagcaattatcattagaaactttcctnttagtcctgatttgcttcatcctgtagtggtcatttgtgggttttgcttttttaaaatttcctgattcanctttgatcactggtg

SEQ ID NO: 585 - DNA, 739 bp, Homo sapiens
  misc_feature (691)..(691): "n" may be a, t, c, g, other or unknown
  misc_feature (694)..(694): "n" may be a, t, c, g, other or unknown
  misc_feature (735)..(735): "n" may be a, t, c, g, other or unknown
gggaagtggtgtgccatgcacgtgcgtgtggcttacatgatcctgagacaccaggagaaaatgaagggtgactcccacaagcttgactttcggaatgacctcctgccctgccttccggggccctatggggccctgccccctgggcaggagctctcccacccggcctccctcttcactgcgactggtgccgtccacgctgcagccaaccctttcacggcagctcccggggcccacggacccttcctgagccccagcacccacattgatccctttgggcgtcccacaagcttcgcctctttggctgccctctccaacggggcctttggaggcctgggcagccccacattcaactccggcgccgtctttgcccagaaagaaagcccaggggccccaccagccttcgcctccccaccggacccatggggccgcctgcaccgcagtcctctgacctttcctgcctgggtccggccccctgaggccgcccggactccaggctcagacaaggagcggcctgcggagcggagggagccctccatcaccaaggaggagaaggacagggacctccccttctcacggccccagctccgagtttctcctgctactcccaaggcccgggctggtgaggaggggcctcggccaaccaaggaatctgtgcgggtaaaggaagagcggaagggaggaggcttgccgncgncgctgccgcttgttgctggccgccggccggttgccggccgncgca

SEQ ID NO: 586 - DNA, 783 bp, Homo sapiens
  misc_feature (705)..(705): "n" may be a, t, c, g, other or unknown
  misc_feature (762)..(762): "n" may be a, t, c, g, other or unknown
  misc_feature (777)..(777): "n" may be a, t, c, g, other or unknown
ttgcattgggttagaacatgctcctttaacttggaggagtttgttattacccaccttctgaagcctacttctgtcagttcatcgaactcattctctgtccagttttgttcccttgctggcgaggagttgtgatcctttggaggagaagaggtattctggtttttggaattttcagcctttttgctctggtttttcctcatcttcgcggatttatctacgtttggtctttgatgttggtgacttttgaatgggggtttctgcgtgggcgtcctttccgttgatgttgatgctattgctttctgtttgttagttttccttgtaacagtcaggcccctctcctgcaggtctgctggagtttgctcgaggtccactccagaccctgttttcctgggtatcaccagtggaggctgcagaacagcaaagattgctgcctgctccttcctctggaagtttcgtcccagaggggcacctgccggatgccagctggagttctcctgtacgaagtgtctgtcgacccctgctgggaggtgtctcccctttaggaggcgcggggttcagggacccacttgaggaggcagtctgtcccttagcaaagctcgagcactgtgctgggagatctgttgctctcttcggagccagcaggcagaaatgtttaagtctgctgaagctgtgcccacagccatcccttccggcaggtgctctctnctagggagaaaggagtttatctataacccctgactggaactgctgcctttctttcanagatgccctgcccanaatgga

SEQ ID NO: 587 - DNA, 827 bp, Homo sapiens
  misc_feature (750)..(750): "n" may be a, t, c, g, other or unknown
  misc_feature (790)..(790): "n" may be a, t, c, g, other or unknown
  misc_feature (811)..(811): "n" may be a, t, c, g, other or unknown
acgatttgaacgctctgccttgcagctcttctggaccgaggagcccaaagccctaccctcaccattcaccaggttacagttcttatccacgtgaatacacatggctctgttacgaaaaattaatcaggtgctgctgttccttctgatcgtgaccctctgtgtgattctgtataagaaagttcataaggggactgtgcccaagaatgacacagatgatgaatccgagactcctgaagaactggaagaagagattcctgtggtgatttgtgctgcagcagggaggatgggtgccactatggctgccatcaatagcttctacagcaacactgacgccaacatcttgttctatgtagtgggactccggaatactctgactcgaatacgaaaatggattgaacattccaaactgagagaaataaactttaaaatcgtggaattcaacccgatggtcctcaaagggaagatcagaccagactcatcgaggcctgaattgctccagcctctgaactttgttcgattttatctccctctacttatccaccaacacgagaaagtcatctatttggacgatgatgtaattgtacaaggtgatatccaagaactgtatgacaccaccttggccctgggccacgcggcggctttctcagatgactgcgatttgccctctgctcaggacataaacagactcgtgggacttcagaacacatatatgggctatctggactaccggaagaaggccatcaaggaccntggcatcagccccagcacctgctctttcgaacctgggggngattggttggccacatgaccngaatggaagcccccag

SEQ ID NO: 588 - DNA, 379 bp, Homo sapiens
  misc_feature (350)..(350): "n" may be a, t, c, g, other or unknown
  misc_feature (370)..(370): "n" may be a, t, c, g, other or unknown
  misc_feature (374)..(374): "n" may be a, t, c, g, other or unknown
gaaaaagaatggaaaatcttgaagccttagaattaggtaattgtggccgggcatagtggctcacccttgtaatcccagcactttgggaggacaaggtgggtggatcacttgaggccaggagtttgagaccaacctggccaacacagtgaaactccatctctactaaaaatacaaaaaattagccaggcatggtggtgggcacctgtagtctcagcctcccgagtggctgggattgcaggcctgcgccaccacgccgggctaattttgtatttttagtagagacgaggtttcatcatgttggtcgggctggtctccaactcctgacctcgtgatccaccagcctcagcctnccaaaatgctgggatcgtangcgngagcc

SEQ ID NO: 589 - DNA, 710 bp, Homo sapiens
  misc_feature (640)..(640): "n" may be a, t, c, g, other or unknown
  misc_feature (651)..(651): "n" may be a, t, c, g, other or unknown
  misc_feature (709)..(709): "n" may be a, t, c, g, other or unknown
ttaccttgtcacccaggctggagtgcagcctcaaactcctcttgcttcagcctctgagtagctggaattacaggcttgtaccaccatgcccagctaattgtcagattttttttttttgtagagggggtcttgctgtgtttttcccggctggtctcaaactcccggccttaagcagttgtcccgcttcagcctcccaaagtgctaggattacaggtgtgagccatcatgccctgcctaatatactggctttaaggaagctttcaggtgcccacactctgtcagacttgacttaattcttctaggctttaccaacacccccaaccccatggttgggggtggggcattacaaccaggctgtggtcacctctgaggcacaggtgtcagccacaatgccaccttttccggtgagtcagcgagtttgtctggaatacccctccgtaggtgagagctggggtcctgggctgggaccacgatgggccgtagcttctcaggaagccgaagctggccctggccagagctgtcttgcagacttgagatacagatggcttctttccccctcccgttttctttttgaaaatgtttttaactcggagcatgtgtcggcacggcgttctttcacgaggacagaagctgtcactgnacgcagcaganacactggttctgatccaaagccgattgtggcctgcttctgggtctaattatttggcang

SEQ ID NO: 590 - DNA, 813 bp, Homo sapiens
  misc_feature (599)..(599): "n" may be a, t, c, g, other or unknown
  misc_feature (704)..(704): "n" may be a, t, c, g, other or unknown
  misc_feature (751)..(751): "n" may be a, t, c, g, other or unknown
  misc_feature (793)..(793): "n" may be a, t, c, g, other or unknown
  misc_feature (805)..(805): "n" may be a, t, c, g, other or unknown
attttgcaatgatattaataatgtcattagattttctttggattttttgaaaaaaataatggttttagaaggaaatctggataaattttatctctgtcctgtgtcagaaaaatataaaacttgagttttttaaattaaggtactaagatgaataaattgcatctatagatattgaaatatgactgtaatttgataatgcattttcattctcagtgtcattgttcatcataatagtatctacatcaccaacttcatttagagcttgaatcttgtaacaatagagattgaaaataaattggtttataattaactctgacagagaatgatgtttttacttttatacttctctatagaagtacatgtcccttaattttaaggaatgaacaagtcagatggaagatttttactgagatcaggaatgaattgagtaatttagttttctttttaaagctggggagaaatgagcaaaatcaaggagaaatatcttgcttttgatatttattactgatgctgtgacactccctttaatcaatgttttttaatatgggtggcagtatctcagttaaccaaatagttaagtaagtagatttttgtattgnatatagtaaacagtatcctaattgttgccaaggagacaaggaattacctaatgggcaaaaatgcccttatatttatttacctcaaattcagtcacacttgactgnatctccacaaattcagatggagagctggaaaatttattggagaagancagggtttaaatctgggtttttcaaatatggttgggcatgangaaactgaatcnttaattaa

SEQ ID NO: 591 - DNA, 787 bp, Homo sapiens
  misc_feature (755)..(755): "n" may be a, t, c, g, other or unknown
  misc_feature (766)..(766): "n" may be a, t, c, g, other or unknown
  misc_feature (772)..(772): "n" may be a, t, c, g, other or unknown
gcagagcggcggcttctctcgcgaggacggacgccattatcgcatctccccgacaaacaccacgagaattccgcagcccacacggtgaccaaaagccagccccactgtgagttgaactctttcgtgttgaccggccactctccgtgctctggatgatgtcggaacacgacctggccgatgtggttcagattgcagtggaagacctgagccctgaccacccagttgttttggagaatcatgtagtgacagatgaagacgaacctgctttgaaacgccagcgactagaaatcaattgccaggatccatctataaagtcattcctgtattccatcaaccagacaatctgcttgcggttggatagcattgaagccaaattgcaagccctggaggctacttgtaaatccttagaagaaaggctggatctggtcacgaacaagcagcacagccccatccaggttcccatggtggccggctcccctctcggggcaacccagacgtgcaacgctgtgcctgggcgtcggcagaacaccattgtggtgaaggtgccgggccaagaagacagccaccacgaggacggggagagcggctcggaggccagcgactctgtgtccagctgtgggcaggcggcagtcagagcatcgggagcaacgtcacgctcatcaccctgaactcggaagaggactaccccaatggcacctggctgggcgacgaagaacaaccccgagatgcgggtaccctgcgccatcattcccttncgacatgctgnacattnagcaccaactggccg

SEQ ID NO: 592 - DNA, 805 bp, Homo sapiens
  misc_feature (650)..(650): "n" may be a, t, c, g, other or unknown
  misc_feature (736)..(736): "n" may be a, t, c, g, other or unknown
  misc_feature (750)..(750): "n" may be a, t, c, g, other or unknown
  misc_feature (803)..(803): "n" may be a, t, c, g, other or unknown
cccttccatgaagaaaaagaaggtggaggacgtgcccagccgcgtggtcagcgtgccgaacctcgcctcctatgcaaagaactttctgagtggcgatctgagttccaggattaatgcccctccaataactacatcacccagcttggacccaagccccagctgtggccggacctacaaacccaaccagtctacagatgcaaaaactgccacaaggaccccagatggtgaaacggcccaagccaaagaagcccagcagaaacagggctctccgcaccaggaatggttcaccaagtacttttctttctaagctaacctttgggatacatcacagaggatacttgaaaaacatttattttaaatcatccgattgaaggaatgaactaacaccaaccaaccaaataatatgcttatgatttatatatgatagctaaaacaaattttggcgttaacacttcatactgttctgccaggcacagcagctcacgcctgtaatcccatcactttgggaggctgaggcagatggactgcttgagtccaggaatttgagaccagcctggccaatatggcgaaaccccatctctacaaaatatacaaaaattagccaggcatggtggcgtgtgcctgtggtcccaggtacttgggggactgangcgggaggatcacttgaacctaggaggcagaggttgcagtgagccaagttcgaacttctgcattccaaccagcctgggtgacaganggagaccctgtctncaaaaaaaaaaaaaaattgacattaaaccagtggtattaaaagtcatctattngg

SEQ ID NO: 593 - DNA, 826 bp, Homo sapiens
  misc_feature (750)..(750): "n" may be a, t, c, g, other or unknown
  misc_feature (778)..(778): "n" may be a, t, c, g, other or unknown
  misc_feature (816)..(816): "n" may be a, t, c, g, other or unknown
cacttccggcctcgcgagggccgcaatcactgctccgcagttcccgcctgcattcctcgcgccgtcttcctggagtcccagctctccttcagcccgccccaacgctgacgctcagtcctcaggcgtcgagggtagctcctgtgaggggctcgcttggcgcacgcaaaacgctcagcgcgcaccacagggcgtccgccccaaccccgcccccggaggcctccagctcggccccgcccctgtcccttccccgtcgcggaggcagcctagcctcgcgccccgcccgttgcttctgccctccggccttcccgccgccgtcgccgggaccagccgctcggggccgggctgatacagccgcttcaccgtgcccctgcccgcgaccatggcctcctccgaggtggcgcggcacctgctctttcagtctcacatggcaacgaaaacaacttgtatgtcttcacaaggatcagatgatgaacagataaaaagagaaaacattcgttcgttgactatgtctggccatgttggttttgagagtttgcctgatcagctggtgaacagatccattcagcaaggtttctgctttaatattctctgtgtgggggaaactggaattggaaaatcaacactgattgacacattggttaatactaattttgaagactatgaatcctcacatttttgcccaaatgttaaacttaaagctcagacatatgaactccaggaaagtaatggtcaattgaaattgaccattgngaatacaagtgggattggtgaccaaatnaataaagaagagaagctacaaccaatagtttgactacntagatgctca

SEQ ID NO: 594 - DNA, 800 bp, Homo sapiens
  misc_feature (730)..(730): "n" may be a, t, c, g, other or unknown
  misc_feature (757)..(757): "n" may be a, t, c, g, other or unknown
  misc_feature (784)..(784): "n" may be a, t, c, g, other or unknown
ctcattgtttaattggccttctctccagtgactcttctctttagtgtaggcagcacattaacacttgaatcactgagatactattttaaggtattcttactccaggactccatataactgcaggacactgaaaggcactttcatgatctgaaaagttatttacattttattttttaattttttaaaaatttaaaaaattttgtaccccagagaaaagtcatatttacattttcactctgtgggccattcaggtgagtattgacttttatcatcactttgtaggtgatagttataaaagttaatcctcaagaacagtgtttttcagttaatgcctgggtctcatctcagacattctaattgttttgtgttttaagattttctaaattccgtggacgatttttattttgcagcctaatttgggaactttgtgctctaggctgtttattgcagtagagattctttacctgcaattagcaagtgctgccaccaggggcgtgggggtgtgcatgcctttattacttgcggcttcttgatctgaataacttgactggtgtctttaaaacttaagacctgtgtggaaattatcacatgtacaatgagaataaacactctcagaatacaaagagctcttactaaatcaaagagaaaaagatgaaccaatagaaaatgggcaaaaaataggaatagacatttcacaaaagaagaattaaaatagcccaagaatcctgtnaaaatggtcactttaccaataatcaantaaaagccaaattagagccccaatagnattttggcccattttc

SEQ ID NO: 595 - DNA, 803 bp, Homo sapiens
  misc_feature (740)..(740): "n" may be a, t, c, g, other or unknown
  misc_feature (769)..(769): "n" may be a, t, c, g, other or unknown
  misc_feature (773)..(773): "n" may be a, t, c, g, other or unknown
taagtgacttccaggaacagctgctaacttccctgatttcacagccctcattttcatgctcatcttttccctaccaccgtctggctcctcagagtgtgtgagctccctagtaggtgcagtagtaatagtaggcaccctttgctgttattgttatgaaaactgtcagctccaggatggtgctggaggtgacgatgatgttgatgacagggttgttaggaatggagttagtggcaagtggagctacagatgggcccacgggtatgagagctactaacaggaacttggcagaatcgtatttcaaatctaaattctctttccaccagctccttttgctataagggaaagccaagtggaaacgtagaggcatgtgcacccagatctcctgaaaagggcaataggagagggtagcagggaggagacaatcctctactgagctgaactggaaacgcctgattgtcatttcttccctgctttgccactgacgcccgcagcagctgatcaggaaggtatcagatgccttcactagctgtcactaacacctgcctcctgaatcctgatcggggagatggtgtcatcgggccctccacataaaatatttagtggcacttgcttcccaaagaggcaagcgtggcctctccttggcatcaggaacgctccgagttacatgtgctgggagactctcttgttcaagcgagtgtcctggagcacatacctgggttgagacttggagtgggaaaaanggaaactggtagaacagagactagcaagntttngctcttgagaaagcctgtgacaagtgactt

SEQ ID NO: 596 - DNA, 745 bp, Homo sapiens
  misc_feature (653)..(653): "n" may be a, t, c, g, other or unknown
  misc_feature (701)..(701): "n" may be a, t, c, g, other or unknown
  misc_feature (741)..(741): "n" may be a, t, c, g, other or unknown
agaaaaaagtccgggagagactagctcagatctgatctgtaccacctgggggttcccagcccatagctctgtaggccttcaaggaggaagaggaggggaagggggggaaggggctgaggctcggggactccagcctgaagtccaagcatgtgcggaagcctagaccctcccaccttaccacaaacttggctccaagtcccctctatgctgacgcatccttgccctcctcctcctccccactgccctccactagcccatcctccctcctccctcctcccctcgacacacatttatcactagtgacatctcagccccccctaccccaatccagggacacaggagggacacagtagggttagactgagggccactgatgtggcttcaccctcagtgcttgggcaattcccaagttacagcatctcagtccccagagaaggccatgctgccactgtagccgccaagggccccctggagtgcagggcacagaggaggaagggagaggatgtgagctgcaggaggcagctgaagccaagccttgggcaggctctcaggtattacatacctggtggggaggagggttctcccttccctaggctggatccctcacttgctcctagtgcctggaaccttaggtttagagagccactctactncttgaagtctcttgatgcaccttacctggggccctttccttatccctntctgcagcatttccagaaatggtccactggagggtttcancacc

SEQ ID NO: 597 - DNA, 764 bp, Homo sapiens
  misc_feature (708)..(708): "n" may be a, t, c, g, other or unknown
  misc_feature (720)..(720): "n" may be a, t, c, g, other or unknown
  misc_feature (751)..(751): "n" may be a, t, c, g, other or unknown
agatccgctgatctagtgcttctcgaaaaaaaccttcaggcggcccatggcatgccttggactttattgtgggaagaccctattatttaaaaatggctcaactgaaatatatggagaatgtggggtatgcccaagaggacagagaacgaatgcacagaaatattgtcagccttgcacagaatctcctgaactttatgattggctctatcttggatttatggcaatgcttcctctggctttacattggttcttcattgaatggtactcggggaaaaagagttccagcgcacttttccaacacatcactgcattatttgaatgcagcatggcagctattatcaccttacttgtgagtgatccagttggtgttctttatattcgttcatgtcgagtattgatgctttctgactggtacacgatgctttacaacccaagtccagattacgttaccacagtacactgtactcatgaagccgtctacccactatataccattgtatttatctattacgcattctgcttggtattaatgatgctgctccgacctcttctggtgaagaagattgcatgtgggttagggaaatctgatcgatttaaaagtatttatgctgcactttacttcttcccaattttaaccgtgcttcaagcagttggtggaggccttttatattacgcctttccatacattatattagtggtatctttggntactctggctgngtacatgtctgcttctgaaatagagaactgntatgatcttctgg

SEQ ID NO: 598 - DNA, 777 bp, Homo sapiens
  misc_feature (679)..(679): "n" may be a, t, c, g, other or unknown
  misc_feature (712)..(712): "n" may be a, t, c, g, other or unknown
  misc_feature (749)..(749): "n" may be a, t, c, g, other or unknown
aggggcagagtagcgatcgtcgccaaagcgcgcggttttatttctctccgctttggacggggcaaactagcttttgggagtgaagcgggtacgcagttatccaacaatgtctggtgagtcaggacagcctgaggctggtccctcacatgcagggctagattggccgaaccctgagaggaatcgggctggggccccgggaggggtgatccgaagagctggttcccaagggcccaggtcctggatccaaaaggttcttgagcagattatggactcacctcgccagtgtgtcaccccctcggaggtggtgcctgtaactgtgctggccgtccagaggtacctgttagaggatgagccacgcgacacggtgcccaagcctcccctttattgctatgatgtgacgatctcagatggggtgtaccaggagaagtgctacctggaccccagcttgaactctctcgtatatcaaaatattcttaaagttggcattcaaatgagaatttccagggtctcatgtctttacaatgagaaaaggataggccaggggatcctgtgcatagataacgtccactgtggggagacttcagacagtatttctttagaaactcccttcagaaatagagcgcaccaggagaaaccagagagcctttaagaggcgggaagagtcattacctggcgctgnggaataaccaagatccctatggagatatctggntacagacaagcaacctgaggaacccaactttacgatncccaaataatttccttctcatcttgaaa

SEQ ID NO: 599 - DNA, 819 bp, Homo sapiens
  misc_feature (744)..(744): "n" may be a, t, c, g, other or unknown
  misc_feature (747)..(747): "n" may be a, t, c, g, other or unknown
  misc_feature (798)..(798): "n" may be a, t, c, g, other or unknown
gcgataatgtttctgatttagaaagctgaaatacaacttgtttttataattctgagggcattttatgattcataacaagtgcaaatgacattttctagttaatgttaagaaaaaaaaagcactgaaaattaattttgtcagcagtgttgagttttggaaatgcaaactaagtcaacttacttcctttccctagaagtgctgccactgttgtgacattgtgtttcattttgtaacccatctactacttaggccagatatgcattttctggatgcaatctgttggtttccaatggtttactacatggtgggctctattgacaagtaggtgacaaaatctttggcacactaactagtgtagtgtcctgtggtttgtcatgtgctgtgccttgttactgcatgatgagtgtaatttgccgtgtcagtattgcaaatatgatatattttgcatgtagagcttatgttctcgtgttatacatcttgtattaaactttctgagtagtaatctattgttgaattaaaacaaatcttgctgcatgtcaattttgtcagttttgctcagtttctaatgctgttttagttttgtgtcatctataacaacattattactattgacatagtggtagagaaaactaaagttgcaatattgtgatgcattgatagcgttacgataacttctggaaactttgaaataatttagaaatgctcattttaacttagatttataaattggagcaattcctttanagnttcccttgggcacatgtcagagttataattctaaaatattggtaatgaaanggcatatgggttaatccttag

SEQ ID NO: 600 - DNA, 760 bp, Homo sapiens
  misc_feature (673)..(673): "n" may be a, t, c, g, other or unknown
  misc_feature (718)..(718): "n" may be a, t, c, g, other or unknown
  misc_feature (739)..(739): "n" may be a, t, c, g, other or unknown
ttaatcaatttgtctatctctttatctttacaaactcatctttaatcttttgtttctttaaaacagtctggtttttaaagattttagttttgaacatcgaattttgtgatataaatttatggggtcatgtatgaagaattttgtcttcatacttgaagtcaaaggatgaaaaatttgatccctaaagagttcttttcacaatttttaaatttcaataaaataaagaatggtaggactgtgattgaaaaatgtgatactaaatttttctattgaatgatgcatatttatttttaaaatccttctctgtacttattcattcaacaaatatttattaagtgctcagtttgtgccagccactatagtaagcactgtggagtaaaaacagacttggtctgtgcaatcttcggatttaggttattggcagggtaggaggcaggtattaataaaataacacaaaactgcagtgaagacaagtatgattatgagcagtatggtgctgtatagataatatggtgatttgacttaataagaggccagaaaaatggtttgtttatttatttatttattaatgacagagtcttgctctgttgcccaggctggaatgcagcattgcaatcttggctcactgcagcctcagcgtcccgggctcaagtgattctcatgccttagcctnccgagtagttgggactacacgggccagcgcctggctaatttttgnatttttagtagagatggctgnattaggcaggattctcttaga

SEQ ID NO: 601 - DNA, 828 bp, Homo sapiens
  misc_feature (792)..(792): "n" may be a, t, c, g, other or unknown
  misc_feature (807)..(807): "n" may be a, t, c, g, other or unknown
  misc_feature (825)..(825): "n" may be a, t, c, g, other or unknown
gtctgcgtcagttggtcacgtggttgttcggagcgggcgagcggagttagcagggctttactgcagagcgcgccgggcactccagcgaccgtggggatcagcgtaggtgagctgtggccttttgcgaggtgctgcagccatagctacgtgcgttcgctacgaggattgagcgtctccacccatcttctgtgcttcaccatctacataatgaatcccagtatgaagcagaaacaagaagaaatcaaagagaatataaagactagttctgtcccaagaagaactctgaagatgattcagccttctgcatctggatctcttgttggaagagaaaatgagctgtccgcaggcttgtccaaaaggaaacatcggaatgaccacttaacatctacaacttccagccctggggttattgtcccagaatctagtgaaaataaaaatcttggaggagtcacccaggagtcatttgatcttatgattaaagaaaatccatcctctcagtattggaaggaagtggcagaaaaacggagaaaggcgctgtatgaagcacttaaggaaaatgagaaacttcataaagaaattgaacaaaaggacaatgaaattgcccgcctgaaaaaggagaataaagaactggcagaagtagcagaacatgtacagtatatggcagagctaatagagagactgaatggtgaacctctggataattttgaatcactggataatcaggaatttgattctgaagaagaactggtgaggattctctaatggaagactcagaaattggcagtgtgcttnaaggactggatcttnctttacggtgccaaagcntgt

SEQ ID NO: 602 - DNA, 847 bp, Homo sapiens
  misc_feature (650)..(650): "n" may be a, t, c, g, other or unknown
  misc_feature (730)..(730): "n" may be a, t, c, g, other or unknown
  misc_feature (801)..(801): "n" may be a, t, c, g, other or unknown
  misc_feature (821)..(821): "n" may be a, t, c, g, other or unknown
  misc_feature (834)..(834): "n" may be a, t, c, g, other or unknown
tggatgaccatttgatgccagttgggaaagagactgttaaatatgaagaggagcttgatttgcatgatgaagaagagaccagtgttccaggaagaccaggttccacgaaacgaaggcagtgctacccaaaagcagttagtattgattccagagtgtttgagggatagttatcccagacctgatcagccctgttacctgtatgtgataggaatggttttaactacacctttacctgatgaactcaactttagaaggcggaagctctatcctcctgaagataccacaagatgctttggaatactgacggccaaacccatacctcagattccacactttcctgtgtacacacgctctggagaggttaccatatccattgagttgaagaagtctggtttcatgttgtctctacaaatgcttgagttgattacaagacttcaccagtatatattctcacatattcttcggcttgaaaaacctgcactagaatttaaacctacagacgctgattcagcatactgtgttctacctcttaatgttgttaatgactccagcactttggatattgactttaaattcatggaagatattgagaagtctgaagctcgcataggcattcccagtacaaagtatacaaaagaaacaccctttgnttttaaattagaagattaccaagatgccgttatcattccaagatatcgcaattttgatcagcctcatcgattttatgtanctgatgtgtacactgatcttaccccacttaagtaaatttcctttccctgagtatgaaacttttgcagaatnttattaaacaaagtccaccntggcctaccaatnttaaccgccctgg

SEQ ID NO: 603 - DNA, 798 bp, Homo sapiens
  misc_feature (705)..(705): "n" may be a, t, c, g, other or unknown
  misc_feature (765)..(765): "n" may be a, t, c, g, other or unknown
  misc_feature (779)..(779): "n" may be a, t, c, g, other or unknown
tgaagttaatgagacaggcctcttacttccttgcaaaatatgctgtaggctttccagaatcccgtgtgctcttgcaagtctcatctactccttacaaatctgaatttgataggtttctgccatgcatgagaagctggtgcctatattcagtttttattgcccatatgccttattgtaggtacttgtattgagggaaaaaccttatatgtccaggtaggctacagagtcaaagaggcttgtccaaagtgttatttgtagtaggtgagtgacactgcatctgcgtgtttttcttttttattggcctttggtagtcagacttttatgatttgttgaattataaaatacatgtaaactgtaaacctgctttactcagtttgtttgacttcatttgcacttgctcataatgattgagtttggcccccacgtccaaaagacttgagttcaaattgtggttctgtcacattctctcaaccactgtatcaattaggactggaattggttggaatatagtggctttgacagtttcattttttgctcaggcaagtaagtccagaagtcattagggccccaagaagcttctgcccactatatgtagactttaagcttatggtccaaaattagtgccagagctcctgccatcacttctgcattccagatagctggatggtgaaagggcagaagaagagtgtgcttcccttctggaanacttggaagacttactaattatatctcatttactagaatttgacatgctggcattcctanctgcaagaaactgngggaaatagtttttactta

SEQ ID NO: 604 - DNA, 725 bp, Homo sapiens
  misc_feature (691)..(691): "n" may be a, t, c, g, other or unknown
  misc_feature (693)..(693): "n" may be a, t, c, g, other or unknown
  misc_feature (701)..(701): "n" may be a, t, c, g, other or unknown
agatgctgcgcagcagtctccgattccccatcaccaattcggctggcgtctccgagaccgcggactcccgtagggtccccgtggccccgagttgtagtcgggacaccccggccgcgggtgatcgtcgggtctccacgcgcccgggtcgctgacgcggatccggcctcggcgccttctcagggcgccctgcaaggccgcaggcaggatgaacattctggcacccgtgcggagggatcgcgtcctggcggagctgccccagtgcctgaggaaggaggccgctttgcacgggcacaaagacttccacccccgcgtcacctgcgcctgccaggagcaccggacaggcaccgtgggatttaagatctccaaggtcattgtggtgggggacctgtcggtggggaagacttgcctcattaataggttctgcaaagacacctttgataagaattacaaggccaccattggagtggacttcgagatggaacgatttgaggtgctgggcattcccttcagtttgcagctttgggataccgctgggcaggagaggttcaaatgcattgcatcaacctactatagaggagctcaagccatcatcattgtcttcaacctgaatgatgtggcatctctggaacataccaagcagtggctggccgatgccctgaaggagaatgaccctttcagtgtgcttctcttncntgaggttncaagaaggatcttgagtacccctg

SEQ ID NO: 605 - DNA, 723 bp, Homo sapiens
  misc_feature (609)..(609): "n" may be a, t, c, g, other or unknown
  misc_feature (631)..(631): "n" may be a, t, c, g, other or unknown
  misc_feature (706)..(706): "n" may be a, t, c, g, other or unknown
  misc_feature (714)..(714): "n" may be a, t, c, g, other or unknown
aacatggggctgtacgctgcggtggcaggcgtgctggccggcgtggagagccgccagggctctatcaaggggctggtgtactccagcaacttccagaacgtgaagcagctgtacgcgctggtgtgcgaaacgcagcgctactccgccgtgctggatgccgtgatctccagcgccggcctcctcagtgcgaagaagctgcagccgcacctggccaagggtgctagtgtatgagttgttgggaaagggctttcgagggggtgggggccaatggaaggctctgttgggacggcaccaggcgaggtgttgagttggctcggctcaaggttcttcggggtgtgagctggcatgaggacctgttggaagtgggatccaggcctggtccagcctcccagctgcctcgatttgtgcgtgtgaacactctcaagacctgctccgtttatgtagttatttcaagagacaaggtttctcctatcagggtcgggcttccaggctggatggagtgccctggcgcgatctcggctcaccgcaacctctgcctcctgggttcaagcgattctcctgcttcagccttctgagcagctgggattatgaaggggtggcctgcccctncacatctgtgggatatctcatnagcctcgatgacttacgagccctcaaggggaagcattttcttctggaccccttgatgcccgagctgctgtggttnccgcccanacagatctg

SEQ ID NO: 606 - DNA, 852 bp, Homo sapiens
  misc_feature (801)..(801): "n" may be a, t, c, g, other or unknown
  misc_feature (809)..(809): "n" may be a, t, c, g, other or unknown
  misc_feature (816)..(816): "n" may be a, t, c, g, other or unknown
agacaatgctgtaattaggtgaactctaaaactgcaacatctgacaaatagctttaaaaatacaatgattataagtatggaatcagtgaaaatatttagtttgtatttttatgtccaaacttttccattttagattcctttatagacacgtcagcctaaaaatcagcctattcgggtgttcttttgaatatctcctggcatttttgtatctaactttgttcaatctgggaatttcagttttcaatatccttgaaaatggcttaagtgataacttccgtttcagttaaaaggaagcccgaagttgtgtttgtgctgcccacaggacagtgggagttacagttcatatcaggatgaccctacatacccaggtcagattgacgggaccagaagggaacatcgacttctaatccagctttcttgtttaattatgacctaaatctaatttacttccactgaaccatccaagacctctggcaggcagggaaatgggcagtgatgcaaaaaagggagactctttggagcttttatgaatagttcatggtgaggacagaacttttctactttcagacagactgcttgctagttttatgaattcagcacacgaattatgctgtgttgctcacattcaaaccaaaccaacgactatgtttaatgaactcagtattcaaatttattatatatgcgtatatatgtatatatggatcccttatatttagatttaactcgtagtttatttgaagtagaaaagactctacaaaccggaagaatggcttcttcctctgctctaaaaggcattgaatnaaactaanatgaatntgaaggcatcttaatactgcctcacactattaaatg

SEQ ID NO: 607 - DNA, 868 bp, Homo sapiens
  misc_feature (846)..(846): "n" may be a, t, c, g, other or unknown
  misc_feature (861)..(861): "n" may be a, t, c, g, other or unknown
caataataatattataatgtgtttctcttctaaaataaacagattttatactcattattttaaaatgtgatcaaaaccacataattgtttttagtcttctgattgcgatttttaaaaagaaaattcaaagtttggcattaaatatattttctgtaagataatataactacatatgataaaatgattaagtactctgatagtgtcactatttcaataccattattatctttaacatatgttaaaacactccagtacataactaataaagaggaattcacatggccagcaattttaaactggtgcagcaaacttatcttttgtgtttgcaaacataagagaactgaagaagcaagatgcaaacaatgtctccgttgttcagcatgtgttttatgatataatacattcgttcatgttgtgttatacaaattttgcagggagggtcgctcgttttatcaatttgtgtattttttatttcatattttgtacgcaatcatgagcatttttcttataaattgtacacaacaagaacctgttgaagattagaaggaaggagcagcacatacttttagcaatccttttatcttaccaatcactggaagaaaatgatgccaagaagccatgtgagatatcatctctgctgtcatgttttcagaacagagtgtggcttactaatgttgccattgcaggctatgctttgtcaagtgaatcgggtttcatcttaagggggatagtaagccagatgttagcaatactcactcatcttcagatttcattggcaaatatactaatatttcaaaaatatgggtttcatctagaaaaaaaatggagaatttgagtggacaaatntagcccatggcaggntaaatta

SEQ ID NO: 608 - DNA, 819 bp, Homo sapiens
  misc_feature (591)..(591): "n" may be a, t, c, g, other or unknown
  misc_feature (743)..(743): "n" may be a, t, c, g, other or unknown
  misc_feature (799)..(799): "n" may be a, t, c, g, other or unknown
  misc_feature (807)..(807): "n" may be a, t, c, g, other or unknown
actctccctgcaggtgactgacggcgccggccgcccctgcccgtcgcccgcccgctgctgccgcccgcccggggtgtggagcccggccgctgctcgcgggctgagtgtctgtcgctgctgccgcctccacccagcctccgccatggacctcttcggggacctgccggagcccgagcgctcgccgcgcccggctgccgggaaagaagctcagaaaggacccctgctctttgatgacctccctccggccagcagtactgactcaggatcagggggacctttgctttttgatgatctcccacccgctagcagtggcgattcaggttctcttgccacatcaatgtcccagatggtaaagactgaagggaaaggagcaaagagaaaaacctccgaggaagagaagaatggcagtgaagagcttgtggaaaagaaagtttgtaaagcctcttcggtgatctttggtctgaagggctatgtggctgagcggaagggtgagagggaggagatgcaggatgcccacgtcatcctgaacgacatcaccgaggagtgtaggcccccatcgtccctcattactcgggtttcatattttgctgnttttgatggacatggaggaattcgagcctcaaaatttgctgcacagaatttgcatcaaaacttaatcagaaaatttctaaaggagatgtaatcagtgtagagaaaaccgtgaagagatgccttttggacactttcaaagcatactgatgaanagttccttaaacaagctttcagccagaaccttgcctggaaagatgggtccacttgncactgtgntctggcttgtaa

SEQ ID NO: 609 - DNA, 865 bp, Homo sapiens
  misc_feature (632)..(632): "n" may be a, t, c, g, other or unknown
  misc_feature (744)..(744): "n" may be a, t, c, g, other or unknown
  misc_feature (778)..(778): "n" may be a, t, c, g, other or unknown
  misc_feature (834)..(834): "n" may be a, t, c, g, other or unknown
  misc_feature (861)..(861): "n" may be a, t, c, g, other or unknown
gttttttgtttttaattaaaaaaaatttttttagctgattgtgttgggttgaggttgctttctggggaagaaaaggtgtaggagttgagacatctggagatagcaggaatggctgagtttttcttttgtgtctcctttaagaaaacatcctactaaagccctgggaaaagagacaaatggtgaagaggagaatgaaaggttgcaggagggagctcctgttttagccctgccacctacctgggggccctctggctaccagtgtccttggaggggcttccttgctgcttctcccactaaggtagattttccccaccctgcttaaggctccacagggccaagggtcttcagctgtcagaacccgggttctgagtagcatagggcaagaaagcacagaagtatagattgggccctatgggactgtttgtgcttacagtggcagggggcaggactggtatccatgctgtggctggctggagacttggcactgctcccagacaactcccacccaagctctttagctgcctctatttcccttcagcatgagcatttggggaatgatggtgactggtgacacctctgccctgagaaccccgccacagaacctacttctttccctctcctgccctggcctncccactcaccacctttctgctgtgtccctaggagctctggagccttaggaccatggacgctctcaataggaaccaaataggccctggatgccagacccagaccatggtgcanaaaggacccttggacctgatcgagacaggcaaanggctgaaagtgcaaacggacaaacccccactggtgagcctgggcagtgggcgactnacacagccataaccttctgccgtggangaag

SEQ ID NO: 610 - DNA, 825 bp, Homo sapiens
  misc_feature (765)..(765): "n" may be a, t, c, g, other or unknown
  misc_feature (774)..(774): "n" may be a, t, c, g, other or unknown
  misc_feature (809)..(809): "n" may be a, t, c, g, other or unknown
aattgtgactatatcgaataagttcacaatacttattaggatgtggtgaaactgaattatttgaagtaggaagacccgaagttcttcgcctatgagactggtgaagtgatttgtagccaacatgctccaacccatctattaagaaaactatggcatctattaagaaaattcaaaatcttaaacagagaaatccatatttagaaaacatggccagattaaatagggggtgggttattttcttaaatacgttttgtcaatttcacgtgaaaaatgaaaacccctagttcatgttacatattacatttctgttaagatgtatgttcctctgtttctaatagaagttgtggtggtttggaagtgaaaattgaatgtgagcacaggccatgtaaaggaaggagaaagtgtaaatgttaataacaggaaaactgaatttagctctcatgaggcagtcaaggaaatcattcattgaacatgttgggaaatacttttcatttggtgaccaaatacctacaaattcatttacaaaaaagaaaaatgaaagttacctcagaactaaactcagaaatatgtcccacatgggttcttgtaatgtttcttggtgaatgtctttatagaaagaagtgggcatgaaatgatgactcagtaattaaacacatgggggaagggaggctgtagaaaacactggattctatatttaaaatttcattcagttcactaatttgtttttactgaccaaagctttctatcctatgtagagtgtctganaactagaanggcccatcagttgccacttcggatgatccttttgnctcttttcagataagg

SEQ ID NO: 611 - DNA, 869 bp, Homo sapiens
  misc_feature (561)..(561): "n" may be a, t, c, g, other or unknown
  misc_feature (704)..(704): "n" may be a, t, c, g, other or unknown
  misc_feature (736)..(736): "n" may be a, t, c, g, other or unknown
  misc_feature (849)..(849): "n" may be a, t, c, g, other or unknown
  misc_feature (869)..(869): "n" may be a, t, c, g, other or unknown
tgtcacatgacgaaagggagcaagagagagaatgggaggtcccagacttttataaacaaccagatctcacgtgaactgagtgagaacacacttatcaatcaccatggggactcatgagaggaccaccccctaccccatgattcagtatctcccactaggccccacctctgacattggggatcacatttcaacatgaaatttgcaggggacacacatccaaaccatagcatatggttaaggaagattaagaaattcaatagcacattgcctttattatcatcgaggatgaagatgttacggttttcatatgtcattaagtaaacaaaatgacgtgtgccacacatagtagctcatagttcactgggaacgcagttacttgttcagtctgttttctacaaagtcatgtgagatactgatttttccttcgcattgttgatatctgggtgagaataaggtatttgttaaattggtatttcccttttttgtgttttaagtgatagtggtgtcattcaacttatctttgcagttgaatgaagaatgaatgacattgagcattattgntttgtttatccatgtccattattagtttttctttgcttttgccagcagtgtgactattggccctgcccagagccatttgcaatcttacaatagttaagtgttagcactgaaagatactaatgttaagaacagatgtctactgnctgattattgggaaaatattagtgtttcttantagaagcaacacagttttttttaatactagatttctcattctgagtctatacacaattttctatgaatcataaaactttgataattatgatagtctaatattttactagttgnaaaaatgaaacttattttgn

SEQ ID NO: 612 - DNA, 866 bp, Homo sapiens
  misc_feature (822)..(822): "n" may be a, t, c, g, other or unknown
  misc_feature (866)..(866): "n" may be a, t, c, g, other or unknown
gctggtcccagaagatggcggaggcgggggatttctgctgtgattgggttattatacccctgcattgacagacatctaggagaaccacataaatttaaaagagagtggtccagtgtaatgcggtgtgtagcagtctttgttggtataaatcatgccagtgctaaagtggatttcgataacaacatacagttgtctctcacactggctgcactatccattggactgtggtggacttttgatagatctagaagtggttttggccttggagtaggaattgccttcttggcaactgtggtcactcaactgctagtatataatggtgtttaccatacgaatgtaaagttatcgcagaaaaaatctcatcaggaatgaagaaggcaaaaaatatcttttgtacagaaaagcaagatgaaaaggatgtgaaatggtagatataccaacaaaacttcagactgtaaaattgccaggatgcagttttccccttgattggcgtgtgtgtatatatggataaatatatatatacacacacacatattactgcaatctgtgattgcttcatctgtaaatcagttgtaaacctttacatatttgacttaaataactgtaagatatatatgtactacattaaaaagtgttgattaatagatgaaatttttaaattaattttttaaaacatgccatacattgtatcacaatgttaatgtgccaagatattggtcctgtcatgcagagtataagaatgctttgaacaatttgtagacttagtgaaataaaataagaggaaagccaaaaacaaacaaccaaaagcatatggggagctgnattttctctttaacttactggtgggccttttattttctaatccn

SEQ ID NO: 613 - DNA, 684 bp, Homo sapiens
  misc_feature (657)..(657): "n" may be a, t, c, g, other or unknown
  misc_feature (664)..(664): "n" may be a, t, c, g, other or unknown
  misc_feature (672)..(672): "n" may be a, t, c, g, other or unknown
agttgggtttggaggcggccgccaggcccaggcccggtggacctgccgccatgcaggacggtaacttcctgctgtcggccctgcagcctgaggccgagactgccagaggcacatccagggggcagtaccacaccctgcaggctggcttcagctctcgctctcagggcctgagtggggacaagacctcgggcttccggcccatcgccaagccggcctacagcccagcctcctggtcctcccgctccgccgtggatctgagctgcagtcggaggctgagttcagcccacaatgggggcagcgcctttggggccgctgggtacgggggtgcccagcccacccctcccatgcccaccaggcccgtgtccttccatgagcgcggtggggttgggagccgggccgactatgacacactctccctgcgctcgctgcggctggggcccgggggcctggacgaccgctacagcctggtgtctgagcagctggagcccgcggccacctcacctacagggcctttgcgtacgagcgccaggccagctccagctccagccgggcaggggggctggactggcccgaggccactgaggtttcccgagccggaccatccgtgcccctgccgtgcggaccctgcagcgattccagacaagccaccggacccgnggggtangcgggcantgccgggggccg

SEQ ID NO: 614 - DNA, 716 bp, Homo sapiens
  misc_feature (673)..(673): "n" may be a, t, c, g, other or unknown
  misc_feature (675)..(675): "n" may be a, t, c, g, other or unknown
  misc_feature (700)..(700): "n" may be a, t, c, g, other or unknown
tttggtggtggtggttttgttttgttttggagacggagtctcactcttgtcgcccaggctggagtgcaggcttggctcactgcaacctccacctcccgggttcaagcaattctcctgcctcagcctcctgagtagctgggattacaggcacccgccaccaccccccgctaattttttgtatttttatttttattttatttttttatttttttttgagacagagtgtcgctctgttgcccaggctggagtgtagtggtgcgatctcggctcactgcaagctccgcctcctgggttcgcgccattctcctgcctcagcctcctgagtagctggggctacaggtacccgccaccgcgcccagctaatttttttttttttgtatttttagtaaagacggggtttcacggtgttagccaggatggtctcaatctcctgacctcgtgatccgcccgccttggcctcccaaagtgctgggatcacaggcgtgagccaccgcgcccggcctattttttgtatttttagtagagactgggtttcatcatgttggtcgggctggtctccaactcctgacctcaggtgatccacctgccccgccccccaaagtgctagtgttacaagtgcgagccaccgtgtccggccgattctgaacagttttaataccattgctatttttgngnttttcctgggccttttttttttttnttttttttttgagaca

SEQ ID NO: 615 - DNA, 856 bp, Homo sapiens
  misc_feature (709)..(709): "n" may be a, t, c, g, other or unknown
  misc_feature (733)..(733): "n" may be a, t, c, g, other or unknown
  misc_feature (800)..(800): "n" may be a, t, c, g, other or unknown
  misc_feature (846)..(846): "n" may be a, t, c, g, other or unknown
  misc_feature (855)..(855): "n" may be a, t, c, g, other or unknown
cataactccaccttttctacaattcagtggaaccaatttaatcaaagtgccctacttagggagaacattgctagaaatgacagggattgggaaaccatatggtgcttggcagaggacccgaaaccaatgtagaaactgaggagcttgggcaaagtgtgtcatttatcgttctggggctagggctgagtcaggtccaagaactgaccccctctcagagctgggacttcatcaaggctttggctctggtttgaacgtggtacttgcaggctcttgtcgtagcaccgggagactcctctcccagcaactcaggactcctaggaccagtgaggcctgtgctatcataatgaattatgagtggatccatctgacctataacaaataccacccataaacaacactgcggtgctaagcaaaaatgcctgaagaccatagacagagagaatgggatttttaaagaaacatttataaatagaaatcaaaacatgtgaagctcagaatgaatttgggaaacatgatgggaactgggattcactgagcacgtgctgcactaggtcaagggcagagtgtcagggtgtggcccaacatcaggcgcatgggctctccaggccactctgcactgaagcaaattgcgccattctgtatggtgcttggtcatacacactgcccacagggctctaataatttagaggcactggactgagcttctganggcaggagcattcatctctgtggncacatgtttggtccagggtctgcaaataacattcacttgtaggaccagtgagagccgacatcctttntcaggaacaaggccatccctggggactgttccctggagtcccaggncctaactgng

SEQ ID NO: 616 - DNA, 781 bp, Homo sapiens
  misc_feature (741)..(741): "n" may be a, t, c, g, other or unknown
  misc_feature (758)..(758): "n" may be a, t, c, g, other or unknown
  misc_feature (770)..(770): "n" may be a, t, c, g, other or unknown
gacaaacacttaaccagctgaagaatcaggtccactcagctgttgaagaaatggatggattagatgatgttgaaaacagcatgttgtactataatcaagcagtcattctttatcatctgcggcagtatacagaagccatatcagttggtgaaaaactttatcagttcatagagccttttgaagaaaaatttgcccaagcagtgtgttttttgcttgtagacctgtatatattaacctaccaagctgagaaagctttgcatcttcttgctgtcctagaaaaaatgatttcacagggtaacaataacaaaaatggaaagaatgagactggtaataacaacaacaaagatggatctaatcataaagctgaaagtggagctctaatagaagctgcaaaatcaaagatacatcagtacaaagtacgagcttatatccaaatgaagtctctgaaagcatgtaaaagggaaatcaagtcagtcatgaatacagctggaaattccgcaccctctctctttcttaaaagcaattttgagtacttaagaggtaattatcgaaaagccatgaagctattaaatagttcaaacattgctgagcatccaggattcatgaaaacaggtgaatgcttgagatgcatgttctggaataaccttggttgcatccattttgccatgagcaagcacaatttgggaatattctactttaaaaaggctctgcaagagaatgacaatgctgtgcacagctcantgcaggtagcactgatncaggtaaaaaantttcaggaaga

SEQ ID NO: 617 - DNA, 724 bp, Homo sapiens
  misc_feature (683)..(683): "n" may be a, t, c, g, other or unknown
  misc_feature (702)..(702): "n" may be a, t, c, g, other or unknown
  misc_feature (708)..(708): "n" may be a, t, c, g, other or unknown
cgagcgaagatggcctcggtgccggtgtattgcctctgccggctgccttacgatgtgacccgcttcatgatcgagtgtgacatgtgccaggactggtttcatggcagttgtgttggtgttgaagaggagaaggctgctgacattgacctctaccactgccccaactgtgaagtcttgcatgggccctccattatgaaaaaacgccgtggatcttcaaaggggcatgatacacacaaggggaaaccagtgaagaccgggagccctacgttcgtcagagagctccggagtaggacttttgacagctcagatgaagtgattctgaagcccactggaaatcaactgaccgtggaattcctggaagaaaatagcttcagtgtgcccatcctggtcctgaagaaggatgggttgggcatgacgctgccctcgccatcattcactgtgagggatgttgaacactatgttggttctgacaaagagattgatgtgattgatgtgacccgccaggctgactgcaagatgaagcttggtgattttgtgaaatactattacagcgggaagagggagaaagtcctcaatgtcattagtttggaattccctgataccagactttctaaccttgtggagacaccgaagattgttcgaaagctgtcatgggtcgaaaacttgtggccagaggaatgtgnctttgagagacccaatgtncagaantactggctcatgaatg

SEQ ID NO: 618 - DNA, 768 bp, Homo sapiens
  misc_feature (738)..(738): "n" may be a, t, c, g, other or unknown
  misc_feature (751)..(751): "n" may be a, t, c, g, other or unknown
  misc_feature (767)..(767): "n" may be a, t, c, g, other or unknown
tttttctgatcttggcaaaaatgtttccccacgtacaaactgatgtccttgtgcgggtcaagggacctttgctagctgcctgttcttcagagagccgtgagctctgttttgttgctctttgtcatgtacgccagatcttgcatagtttaccaggtcactttagcagccactacaaaaagtttttttgctcctactcggagccccactacatcaaactacagaaagtggaggtgctgtgtgaactggtgaacgatgagaatgtgcagcaggtgctagaggagcttcgagggtactgcacggatgtgtctgcggactttgcacaggctgccatctttgccataggtggcattgccaggacttacacagatcaatgtgttcagattttaacagagttgctgggtcttcgacaagagcacattaccacagtggtggtgcagactttccgagacctggtttggttgtgtcctcagtgtactgaagctgtatgtcaggccctgcccggctgtgaagagaacattcaagatagtgaggggaagcaagcacttatttggctacttggtgtccatggggaaagaattcctaatgctccttatgtgttagaggactttgttgagaatgtgaagtcggaaacatttccagctgttaagatggagctgctcactgctttgctgcgccttttcctctcccgacctgctgagtgccaggacatgctaggacgtttggtgtattactgcatangtgggtttttcanaaggaaatatatttgnc

SEQ ID NO: 619 - DNA, 866 bp, Homo sapiens
  misc_feature (782)..(782): "n" may be a, t, c, g, other or unknown
  misc_feature (819)..(819): "n" may be a, t, c, g, other or unknown
agcagacgctgccctttaaggagggccatatcctacaggactttgaaggaagagtgatcgttgccacaagtaaaggagtttacatcttggttccattacctttggaaaaacaaatacaggatcttctagcaagccgcagagtagaagaggctttggttttagcaaaaggagcccggaggaacattccaaaggaaaaatttcaggtaatgtacagaaggattctgcagcaggcgggatttatacagtttgcacaacttcagttcctggaagctaaagagctcttcagaagcggccagcttgatgtccgggagctgatctctctctaccccttcctgttgcccacctcctcctccttcacccggtcccaccctcctcttcatgagtacgcagacctgaaccagctgacccagggggaccaggagaagatggccaagtgcaaacgcttcctcatgagctacctgaacgaggtccgcagcacagaggtagcaaatggctacaaggaggacatcgacacagccttgctcaaactgtatgcagaggctgaccacgacagcctgctggacctcctggtcactgagaacttctgtcttctgacggacagtgctgcctggctagagaagcacaaaaagtattttgcacttggactgctctatcattataataaccaagatgctgctgcaagttcagttgtgggtgaacattgtgaatgggcgatgtccaggactccacacgctcagacctgtatgaatacatcgtggattttcttacctactgcttagacnaggaactagtgtgggcctatgctgatgggtcctgcanaaaagtgaagaggtcgtttcaggtttcaccaagagacctttggatga

SEQ ID NO: 620 - DNA, 855 bp, Homo sapiens
  misc_feature (826)..(826): "n" may be a, t, c, g, other or unknown
  misc_feature (848)..(848): "n" may be a, t, c, g, other or unknown
  misc_feature (853)..(853): "n" may be a, t, c, g, other or unknown
tgcattatccaacaggtgaagttccatttccaagaggcatgaaagggcaagactttgaaaaatcagatcatggttcttctcaaaataccagcatgtctagcatctatcagaattgtgcaatggaggttttgatgtccagttgttcacagtgtagagcttgtggagctttagtttatgatgaagaaattatggctggatggacagcagatgactcaaatttgaatacagcttgtccattctgtaaaagcaacttcttgcctcttctcaatatagaattcaaagatttgagaggttctgcaagctttttcctgaaaccaagtacctctggtgacagtttacaaagtggaagcattccattggcaaatgaatccttggagcacaaacctgtatccagtttagcagaacctgacttgatcaactttatggacttcccaaaacataaccagatcataactgaagaaacaggctctgcagttgaaccaagtgatgaaataaagagagccagtggagatgtccaaactatgaaaatttcatctgtgcctaatagtttatcaaagcgaaatgtgtctttgactcgaagtcacagtgttggaggcccattgcagaatattgactttacccagcgaccgtttcgtggcatctcaacagttagtcttccaaatagtctgcaggaagttgtggatcctttaggaaaaagacccaatccttcccctgtttctgtgccctacttgagtcctctagtacttccgtaaagaacttggaatctttgctagaaaatgaaaggtgatcaaggtgattcatacatcttctttcatcaatcaacatncaatcattttctgggaaccctnggttngg

SEQ ID NO: 621 - DNA, 758 bp, Homo sapiens
  misc_feature (703)..(703): "n" may be a, t, c, g, other or unknown
  misc_feature (732)..(732): "n" may be a, t, c, g, other or unknown
  misc_feature (742)..(742): "n" may be a, t, c, g, other or unknown
atgtacttactcatcacccagcttcaacatttatcaacatcttgccaatcttactgaatctatccttccttaccttttttaaaaatgtttccagagtgtgtcaaagctcatcccagatgtcctaatgtttctagtaaatgtttctgcacaattctaaaagacaaggatgtttttaaacccagccccgacactatcatacctcacaagattcatgctaattcctcagtgtcttctagtcccaagtccatgctcaagtgtccccccctgtccaggcaccctcttcaggggtcctccatgtttcatagcgagaaggggccctgagagttgggcaccccgggcaggctggctggagggggctttggaaaggaaggctttggccagcgtgtgagggtgcaggtctcaccagctcctgtttggtctgtttcaggaacaaatgtggtatctggggctggcggtctgagaagatggaaactgttagcggctacgaggccaaggcaggagaggctaggggtggggggctgggggtaggagatgaggtccaggaactcagctcctctccacatccatcccagagtagcccctgggctctggaaaccctgagcatttgtgggaactcagcgggcctgagtgcccagcccctgcggagtacacagggctcacccacatcatgggcccctacccagggtaccgagatcaaaaagangagtgtgtcctcttgacccctggggctgnatctccttgntggtgacttcctgggg

SEQ ID NO: 622 - DNA, 764 bp, Homo sapiens
  misc_feature (680)..(680): "n" may be a, t, c, g, other or unknown
  misc_feature (730)..(730): "n" may be a, t, c, g, other or unknown
  misc_feature (755)..(755): "n" may be a, t, c, g, other or unknown
gcgatctggtaggcggtgctgccgtctgttgtacctgagaggcttgcgcatgccgacgcacggattcgaggcggggagcatgggaagaagcggccaggagtatgacctgatcattgtgaccaccgctaggggaagggaggagagggtgtagaaacggggacgagggtgggggaagggcaaggaggcgctcgagctggtgcgcggagcatcctgggagacgtagtccagcgggagggggaagtcgaagactgcgcgtgctcaggagcgcggagcggcccgctgagcgcagaggtgagggcggggtcctcttaaccgggagggctatcgtgtggacgggggcggtggctgcagactcggggattccggctccccagtgagaccggaagcgcggggaacgaatccgggcagtccttgcgggagcgcccagggctagagcgagaggcttgtcaatcactactcgttgccacgacgacaggctttgggagccccgcccccggttgcctaggcgtcgtctggacctaccttggcaccctggagcggaagttgccgcctggacttctgggaagtgtatttcgggaccctccgtaggtacctgccatcttggctatgacccaagtctctcccagggtttcaggttgacttggcaccttgaagaatggaggcttggcccccaggatgangcggcctcgaaatcatgccacccacgggggaatgattctgcggtgccatnccctttattaaacgcagattccttnctaaagccc

SEQ ID NO: 623 - DNA, 800 bp, Homo sapiens
  misc_feature (610)..(610): "n" may be a, t, c, g, other or unknown
  misc_feature (731)..(731): "n" may be a, t, c, g, other or unknown
  misc_feature (765)..(765): "n" may be a, t, c, g, other or unknown
  misc_feature (789)..(789): "n" may be a, t, c, g, other or unknown
tgtctgcagaagtgtggcacattttgcctagaatgacagaaggctgctatcaaagagcatgagagaaagagaaagagatcatctaacattctaagaagtgattattacatttgagttttaaaaatgttactattcgaagcagtgtttttatcataattttctattttatcaaatcagacttgagttttttttctgattctgttatttaaccatacacaattttccctgtgtaattaagtaatggaacacttggaggcatatgaagtcccgctaagtagggagcatttgagtcagaaaagtgggtactctcttcctttatgtgatgtccatctgccattgtatttggtaaggaatagtgaggtgttaccatactgtgtacagatttccctcacttttccacctctcactttcctaaacttgggaactaaacattggattaatacagtgtctttgctgttcagattcacttgccagattttatcaaatgtagacttaaataggttttattgtgatagatatttacttgctccctaaaactgctctcttaaccagccttacaataaagtcaaaagtcaaagtggtaggcttcaagatgaaacataagatctgntgactccttcctctatttagtatatattttcataatattcagccttttcttgccccagatatcatatctattttacctacccaatatttaagtagtttccatgttgggattaagaaaacanaattaccataattacctagattattgctaattgngacatatggaaaggctattaatgnaataaatctcc

SEQ ID NO: 624 - DNA, 877 bp, Homo sapiens
  misc_feature (755)..(755): "n" may be a, t, c, g, other or unknown
  misc_feature (847)..(847): "n" may be a, t, c, g, other or unknown
  misc_feature (853)..(853): "n" may be a, t, c, g, other or unknown
  misc_feature (862)..(862): "n" may be a, t, c, g, other or unknown
gagtgaccacaggtgtccccgtcgtgctcacctgcaccggctgcgaggagcagggagctcctcaaagagctcaggaacggacaggacatggacacagtggtctttgaagacgtggttgtggatttcacgctggaggagtgggccttgctgaatcctgctcagagaaaactctacagagatgtcatgctggagaccttcaagcacctggcctcagtagataatgaggctcagcttaaagccagtgggtctatttctcagcaggatacttctggagaaaaattatccctcaaacagaaaatagaaaagttcacaagaaagaatatatgggcctcccttttaggaaaaaattgggaagaacatagcgttaaagacaagcacaacaccaaggagagacatttgagcagaaatccaagggtggagagaccgtgtaaaagcagtaaaggtaataaacgtggaagaaccttcagaaagactcgaaattgtaatcgtcatctgcgcaagaattgttgtactagtgtaagacggtacgaatgcagtcagtgtggaaaactcttcacccattcctcatccctgataaggcacaaaagagctcactctggacaaaaattatataaatgtaaggaatgtgggaaagccttcagtcgcccttcctacctacagacgcatgagaaaactcacagtggagagaaaccctatgcctgtcaatcttgcgggaagacatttcttcgttcccactctctcactgaacatgtaanggctcacactggagagaaaccctacgaatgtgggcagtgttgggaaaggcttcagttgtcccaaatccttttgcgcccatgtgatgatgccnccgganggagaccgntgaatgcaacccttg

SEQ ID NO: 625 - DNA, 794 bp, Homo sapiens
  misc_feature (715)..(715): "n" may be a, t, c, g, other or unknown
  misc_feature (768)..(768): "n" may be a, t, c, g, other or unknown
  misc_feature (773)..(773): "n" may be a, t, c, g, other or unknown
gaaaagttatttgcaaaagataacatggatttgctgcaaaccgccaggggtctgcactgtgattctcctttcagggctggttgaaggctccatacagtatctctatctgccttggacacttcaggcatatgtgccatatatgacagaacatcttgcacaacagtctgaatttgctgcaacccttctcttgctctgggccccactcaaaaccggcagacttacaaattccttcgtaaatgggccagggcagcatggtaaaatgtgctgtatattacctcctaaaacacccgtcaagtatttttttttaactctttcctagcataggagtacatgatgcagcaatttgttttcatttgaaggagataaccaacatgcctcaggccactgaactcctagaaatgtcacatgctcaacatattatccatataatggactagttctgcattttatgggatgttgtgattatcaagacccctgaagccttgcttatgacagaacaggagagttgccatagacctgagctcaaatcgtgaagatgtactgctgtccctgccatgtgaaagcaaacaccttccaaaagtgcctgtaaccaatacagcaggaaaaaaagtatattttacataaatagctgcatcccacatgtcaaaagccattttgatttactctagtaagaataacatatttgaaacagcagcagcaatcaattaaatattgntaataagcaatggagagatacaggaaatcaccgtagaatatatcattggttgncaaanattctggcttcttttctactg

SEQ ID NO: 626 - DNA, 744 bp, Homo sapiens
  misc_feature (684)..(684): "n" may be a, t, c, g, other or unknown
  misc_feature (732)..(732): "n" may be a, t, c, g, other or unknown
  misc_feature (742)..(742): "n" may be a, t, c, g, other or unknown
actgggtaccgaggactgggtgtgtttaaggcagacagccaggtgaggatcccagctactggggcctgctgtcatctcctgggagtacccgggggtcaggagcctaggggactcttgcacttcacatccagccatgctaattacactttttggcaaaggaaacagctaggagcagtttctttcactcctacagccccgttttctcagtgtttagacctcgaattattactgggctagagggaaggcagcctctgaagtgtggcaggaggaggggaagtctgcctgcatcttggtgtgtctgtcagatgccagcactaataacctggcttctgtgaggcctgtcagtgctctcaggaatgaaaggggacccctgagaggtgctcagtaccagcaggctgtgaatgctctctacccaccaccctcacctcctcgttaaagatggtgctacctgccacacagcagacatctggtcgctgcacacccgaaagaccccaaggcagtctgccccttgtccagccacacgccagcacccaccctcctggcccctgcctcggcctccccagaccagctgcacccagcccccaacacgcaccccttctccagatgtgtgcagggcctcattttgcagagcaaagacagatgtttcaaccacacgctttattaacttctaaaacctgtgctcangacactcttcaacagtcatgaaaagtttgatcacttgccacaagtcanggacctttgngt

SEQ ID NO: 627 - DNA, 895 bp, Homo sapiens
  misc_feature (691)..(691): "n" may be a, t, c, g, other or unknown
  misc_feature (697)..(697): "n" may be a, t, c, g, other or unknown
  misc_feature (734)..(734): "n" may be a, t, c, g, other or unknown
  misc_feature (856)..(856): "n" may be a, t, c, g, other or unknown
  misc_feature (863)..(863): "n" may be a, t, c, g, other or unknown
  misc_feature (872)..(872): "n" may be a, t, c, g, other or unknown
agcccactgccggcggctgggcgctgccgaggctcggggcgcgcgcagttggcgtctgccagtgccaagactgtgccgcccccacagccgaggcgcgaaagggggacgcccggcctctgggccgctgccttcgctttctcttcgttgttgcgaacgccgtccgctcaggaggcgccccgcgaccggcgcgatgagtgccaacgaggaccaggagatggaactagaagcattacgctctatttatgaaggagatgaaagtttccgggaattaagtccagtttcttttcaatataggataggtgaaaatggtgatcccaaagccttcttaatagagatttcctggacagaaacatatccccaaacacctccaattctatctatgaacgcttttttttaacaacaccatatcatcagctgtaaagcagagtatattagccaagctacaggaagcagtagaagctaatcttggaaccgctatgacctatacattgtttgaatatgccaaagacaataaagagcagtccatggagaatcacaatcccatcaattccgcaacatcgataagcaatatcatctcaattgaaactcctaatacagccccatcaagtaagaaaaaagacaaaaaaagaacaactttcaaaagcccagaagcgtaagctggcagacaaaacagatcacaaaggagaacttnctcgangctggaactgggtttgatgttgtgaagcatttaagcnaaactggctctaaggatgatgagtagcacttggaatttgagacaaggaaagacattctttaaagagtaaactgggttcaaaaactttcattactaatttctgggatttgaggcgactttttntaaaccncaatttttnggagggtccttacattaaaaagg

SEQ ID NO: 628 - DNA, 751 bp, Homo sapiens
  misc_feature (158)..(158): "n" may be a, t, c, g, other or unknown
  misc_feature (193)..(193): "n" may be a, t, c, g, other or unknown
  misc_feature (251)..(251): "n" may be a, t, c, g, other or unknown
  misc_feature (689)..(689): "n" may be a, t, c, g, other or unknown
  misc_feature (700)..(700): "n" may be a, t, c, g, other or unknown
  misc_feature (702)..(702): "n" may be a, t, c, g, other or unknown
atttttaggtttacaacaaaattgagcagaaagcacagaattcccatataccccctgctctcatacatgcataacatcccctactgtcagcatcccacaccagaggggtacatttgttacaatcagtgaacctacgttgatacatcattatttgaagnccatagcttacattagggttcactcttggtattgnacattcaactgctttgacaaatgtgtaatgacgtgtgtctaccattatagtaccatanagaatacttgcactgccctaaaaatcctctgtgctccacctgttcatcccaccctccttcctaatccctggcaactactgatcttgctacttcctccatagttttgccttttctggaatatcatacagttgaaatcatatatatgtagtcttttcagattgggttttttcactttgtaatatgtacttaagtttctccatgtcttcatggtttgatatttcttcttaccactgaataatattaattgtctggatgtaccacagttgtttatccattcacttaatgaagaacatcttggttgcttccaagtttcagcaattagaaataaagttgctgtaaacatctatatttaggttttcatgtggacattagttttcagctgatttgagtaaataccaagaagcatgattggtggagtatactagtactattctaagnggttcatatgnantatctcatttaaacctctttaaacctctgggagtaccaagggaagtagg

SEQ ID NO: 629 - DNA, 734 bp, Homo sapiens
  misc_feature (656)..(656): "n" may be a, t, c, g, other or unknown
  misc_feature (686)..(686): "n" may be a, t, c, g, other or unknown
  misc_feature (723)..(723): "n" may be a, t, c, g, other or unknown
tcaaacatgtgacaacattaagcaccctggtagaggcaagatttgccaggcggctctcacatacccctgcctcccacaatactacccccgcctcccatgatatgatgagatgacaaggcactttacctctgcattatactccacaaaacccgtaatcccagacaatcatgagaaaacatcagacaaacccagatcagcagacattctacaaaacaccgagtccttcccaacactgtccacggaatgaaaaacaaggaaaatctaagaaatggtcacagacgagagaagactacaagaggcatgatgactgaatgcaagggtctcactctgctgtccaagctggagtgtggtggtgccatcatgactcactgcagccttggcctcccgggctcaggcgatcctcctgcctcagcctccagagtctctgggactacaggagtctcgctctttcgctgaggctggcttgcaatggcacgacctcggctcactgcgacctctgccttctgagttcaagcgattctcctgcctcagcctcccaagtagctgggattacaggagaaaagactgcagaaccacacaaggctcacgctgcccagggagaacgtcatctcagttcccatatgagtcccgatgaaaatatgacagagaaattctgncctggaccacgagcatcttttcatcttcgnatcctaacagccagcaggcacttggtgaaaaagctgntcaacgaattt

SEQ ID NO: 630 - DNA, 740 bp, Homo sapiens
  misc_feature (691)..(691): "n" may be a, t, c, g, other or unknown
  misc_feature (698)..(698): "n" may be a, t, c, g, other or unknown
  misc_feature (737)..(737): "n" may be a, t, c, g, other or unknown
agttctgtggagcagcggtggccggctaggatgggctgtctctggggtctggctctgccccttttcttcttctgctgggaggttggggtctctgggagctctgcaggccccagcacccgcagagcagacactgcgatgacaacggacgacacagaagtgcccgctatgactctagcaccgggccacgccgctctggaaactcaaacgctgagcgctgagacctcttctagggcctcaaccccagccggccccattccagaagcagagaccaggggagccaagagaatttcccctgcaagagagaccaggagtttcacaaaaacatctcccaacttcatggtgctgatcgccacctccgtggagacatcagccgccagtggcagccccgagggagctggaatgaccacagttcagaccatcacaggcagtgatcccgaggaagccatctttgacaccctttgcaccgatgacagctctgaagaggcaaagacactcacaatggacatattgacattggctcacacctccacagaagctaagggcctgtcctcagagagcagtgcctcttccgacggcccccatccagtcatcaccccgtcacgggcctcagagagcagcgcctcttccgacggcccccatccagtcatcaccccgtcacgggcctcagagagcaaccgcctctttcgacggnccccatncagtcatcaccccgtcatgggtcccccgggatctgatgnccg

SEQ ID NO: 631 - DNA, 478 bp, Homo sapiens
  misc_feature (424)..(424): "n" may be a, t, c, g, other or unknown
  misc_feature (434)..(434): "n" may be a, t, c, g, other or unknown
  misc_feature (437)..(437): "n" may be a, t, c, g, other or unknown
ctcttcgttaagtcggccttcccaacatggcgcagtctattaacatcacggagctgaatctgccgcagctagaaatgctcaagaaccagctggaccaggaagtggagttcttgtccacgtccattgctcagctcaaagtggtacagaccaagtatgtggaagccaaggactgtctgaacgtgctgaacaagagcaacgaggacggaatttcgctctgtcgcccaggctggagcgcaatggtgagatcttggcttactgcaacctccgcctcccgagttcaagagattcttctgcctcagtctcccgagtagctgggactttaggtacgcgccaccacgaccggctaatttttgtattaatagtggagttgggggtttcaccatgttggccaggctagtctcgaactcctgacctcgtgatccgnctgcctcggnctnccaaagtgctaggattacattacaggcgtgagccactgccc

SEQ ID NO: 632 - DNA, 724 bp, Homo sapiens
  misc_feature (587)..(587): "n" may be a, t, c, g, other or unknown
  misc_feature (651)..(651): "n" may be a, t, c, g, other or unknown
  misc_feature (684)..(684): "n" may be a, t, c, g, other or unknown
  misc_feature (717)..(717): "n" may be a, t, c, g, other or unknown
tttgctgagtttgctgagggaagactgttttctgttctctctctcacacacagagtggatgaggatgaggatgacctggaggaagaacacataactaagatttattactgtagtcggacacactcccagctggcccagtttgtgcatgaggtgaagaagagcccctttggcaaggatgttcggctggtctcccttggctcccggcaggtaaacagtagccagtatttccaccaggggccatcctgctcctttcgccacaactttgtcctgctcgtccaggccttgggagacgctgggtctgtgacaggctgaaccgtgtgaggagcagccccctccctgacctggccggcccagcactggaaggcaaaggagaggtggcggggcaggtccacatgtgttggtaggatgtcatttagctggcaccatctttttgcctctttctttctcctttgctgcagaacctttgtgtaaatgaagacgtgaaaagcctaggttctgtgcagcttatcaacgaccgctgcgtggacatgcagagaagcaggcacggtagccactgggaccgtggtgtagccgcaggtggtctgganagagtgaggcagggggtggcagtgactgaagaccattaagtgtctttcatagaaagaatggcanaggagaccccaggttcttcctgagtcccctctncttgggaaaaagtgttcctactctctgggtcantgtctgg

SEQ ID NO: 633 - DNA, 677 bp, Homo sapiens
  misc_feature (513)..(513): "n" may be a, t, c, g, other or unknown
  misc_feature (587)..(587): "n" may be a, t, c, g, other or unknown
  misc_feature (637)..(637): "n" may be a, t, c, g, other or unknown
  misc_feature (669)..(669): "n" may be a, t, c, g, other or unknown
gttaaaaaccaaggacctgatatcttataattcagtttaagcctaatacagttcatgtaaactccttttttggcaatttaacatatacatggatcaagtttagtaggtttagaggaaaatgaatgtcttgttctgaaaaaatagcagtaccagctgagctttggggaggtgacagattgagtcacttcacagcttaattctgttatgaactggtcccatgggcatggattgtcaattagggagacttgaatcttttagatattaaatctacaggcagacaacaaagaacacattattcttttgtaaaaatagaggaacctggctgtctactacagaactagaggaacctagcttagacagaagctcatcccacttcagcacctacaacagatttgatacctttgagcaagattggatacttttctcaaagtaaatactgggttggtaccccagagttatgcaccactgaacatggattttaacttaaaatacttaagggcagatttttactgntagttttcttgactaacagagcaacccagtgcagttcctaaagacttctgattttgtgtagcaccagctcctgntgcattttctgaatgaattagtattaaaaatggagccccaagaagctggntaaatttttagccttctgcatttaagctgtancccagctg

SEQ ID NO: 634 - DNA, 817 bp, Homo sapiens
  misc_feature (752)..(752): "n" may be a, t, c, g, other or unknown
  misc_feature (774)..(774): "n" may be a, t, c, g, other or unknown
  misc_feature (816)..(816): "n" may be a, t, c, g, other or unknown
gtttggataaattttctctgatttgcctgttcttaccctttgctcatgtatctattgatgtttttcattataaatttgtagaaattcttactacatagtgcatattaatcatttgtagctctaatgtgttatgacgttttcatcttgactttattgatgatatattttcctttaaaatttttaaactttttaggtagacccttatctcttttatagattttggtttcctttttttatcacatggatgcccccaccaaagtcatacaaatattcacctacattttcttctaataactttattatttttaatgtttaaatgtttgatccatctgaaatttatttttgtatatggtgtaagatggggatccagctataacattttgttcacattggatacctgattgtgacatttatttaaaatgttacccattttcaaatttctgagccaatatcatgatttaattatagtggcttcatcgtaagttttagaatccgataaagcaagtcccacttcattagttttttttttctttatataatatgtcctagacattcattttttcatgtgaaaaaatgaaatgcagaattttaataaaattctaattatgatggctgacatcacaattaaaatcctgcatttttgtttagagggctctttagtaatattaaatcttagcactcaagagtcttcgtacatcattgaaatcttttggtcttggtattggaatattcttcacgtaagtatatcatanctaactgaatttatttctaagnatttttaccggtttattcatattttgacattggggaattggnt

SEQ ID NO: 635 - DNA, 794 bp, Homo sapiens
  misc_feature (751)..(751): "n" may be a, t, c, g, other or unknown
  misc_feature (788)..(788): "n" may be a, t, c, g, other or unknown
  misc_feature (793)..(793): "n" may be a, t, c, g, other or unknown
gcgcaatgggaagcaatatactggagctgagtgtggatagaaagagcaactttagaaggagcaagcagctaatgcttgcttcctaggaacccataatgaatttgctttctaagtacattcccggtgtttctgcattgggtacgattgtgttcgtttcagaagaaatacgccataaaagcatgcttccactttaatgtttcagttggttcattttattggtctcagtcttctcgtctacttatgcccatcaggaagagtccaatcacaagtgcgcaggtaactttgaaacttgcaacaagcatgctgtctactatctttggttatcccaaaagtattttgtctgggtgtcctcaacatccttttctgtcatttacctcacttcttaaagatgctctccctctcagatttctcttgttctcttctacaatgaacttctgcttcattcactgttactgaattttcctttgccggcattgcactattttattgtgctcactaggtcactggcggtgacattcaagttctgcagatttccagcaatgccacagtactgggcattggctgaagctaatctagatagtaatccaaagagttcaatgaaaagttgagaatcagaacattaggtaaacaggtgtgtgagtgcttgtctgggtgtgggtagaggtttgactgtctggggtctgtaaaagctgacaaagtctccatgctgcccaacttctctgacaacaagtacttctctgtgcgacaaggncagcttgtcaaataagatgcttcatgagcatatatgnactgnt

SEQ ID NO: 636 - DNA, 894 bp, Homo sapiens
  misc_feature (772)..(772): "n" may be a, t, c, g, other or unknown
  misc_feature (820)..(820): "n" may be a, t, c, g, other or unknown
  misc_feature (889)..(889): "n" may be a, t, c, g, other or unknown
  misc_feature (892)..(892): "n" may be a, t, c, g, other or unknown
aaggtcagataagtagtaattatgatgatgccatgcagttttcaaagaaaagaagatatttaccaactgccagcagcaacagtgccttttctataaacgtaggacacatggtctcccaacagtctgtcattcagtctgcaggtgtcagtgttttggacaatgaggcaccattgtcacttattgactcctcagctctaaatgctgaaattaaatcttgtcatgacaagtctggaattcctgatgaggttttacaaagtattttggatcaatactccaacaaatcagaaagccagaaagaggatcctttcaatattgcagaaccacgagtggatttacacacctcaggagaacactcagaattggttcaagaagaaaatttgagcccaggcacccaaacaccttcaaatgataaagcaagtatgttgcaagaatactccaaatacctccaacaggcttttgaaaaatccactaatgcaagttttactcttggacacggtttccaatttgtcagtttgtcttcacctctccacaaccacactttgtttccagaaaaacaaatatacactacgtctcctttggagtgtggtttcggccaatctgttacctcagtgttgccatcttcattgccaaagcctccttttgggatgttgtttggatctcagccaggtctttatttgtctgctttggatgctacacatcagcagttgacaccttcccaggagctggatgatctgatagattctcagaagacttagagactttatcagccttncagtcctcatctcagaaattgactagccagaaggaccagaaaacttanagcttcacaggctttcagattcatcttaggagttacttgccccgatagatcctcagaaaggccttgaanctnaa

SEQ ID NO: 637 - DNA, 904 bp, Homo sapiens
  misc_feature (779)..(779): "n" may be a, t, c, g, other or unknown
  misc_feature (855)..(855): "n" may be a, t, c, g, other or unknown
  misc_feature (858)..(858): "n" may be a, t, c, g, other or unknown
atgctgagactacataagtgtccttcaaataatgcagaagaaaaagatcataggcaggcaaaaattacttaataaattaagctttttaaagaagtgaaagaattatatccagaaccaacagctcttaaatattctatttcaataaaaacaatttctatacaattgcggtgaaacttatttttggcaaatactcttccgtaagttatgaacatttctcttgataaattttatactaggtatataagttcctttattggtgttttggatgacagcaaatgactttccataaggcagatgtagattttattcacacaacttttcaggagtagctttatgttaatatgttaggactgtccttccttgagctttacagttaaccaatgaaagtgagttattttagggaatggttagatttggacatggaccaaaattagttttctaatgagtggtgttaaagatgtgtaactactattacagagataatgtaaatggccttctactttttaattctctgattctgatcttgttttgtagtaagaaaggctcagtatgaatttgaggtacttaactaacttgttacagtggtggtcagtgaagaaagattctatcgggcaggactctctggaatgcatgtgtcagaagcccagcccaaattggcctcagcagaaaacaaaacatagcgaaaagcaaatgacaattcattggctaaagcaatggaaaaataccagggatatctagcttgagactcagctagagccaaatattcaaatctgggcatncaacattggattgggctctttcaatttaccttagctgggctaaacactggtggcttggttttggggcacgttcttnttnaaacatgggggaaaagtggcccctaacaccggccaaaaatggatcc

SEQ ID NO: 638 - DNA, 895 bp, Homo sapiens
  misc_feature (833)..(833): "n" may be a, t, c, g, other or unknown
  misc_feature (893)..(893): "n" may be a, t, c, g, other or unknown
attctcccaaagtgttgggattacaggcgttagccaccgtgcctggctcttcaagtttttcagtgtatcccttgtcagatggatagtttacaaatatattcttcgatactgtaggttttctcttcgctttgttgtttcatttgctatgcagaagctttttagcccattgtaattccattttcctatatttgcttttgttgcttgtgctttgtaggtcttacccaaaaaatcttgacccaggccaatgtcctataacgtttctccaatattttcttctagtagttttatagtttctttcctgactgtgcagggacttgctgggagacgcaagcctctctgagccaacaagacctggtcccccagtgttggcctgacagcaacctcctcaggggcccagtctcagctccaaccattctactgcattccatctgtgctgaaacctgctgggagacatgcaccagcctgagccaaggagaaaggggtctcctttttggttttagaaaagagagggagaggatactgttttctgagtactgactttgatgaggtgccaagcaaccttagaaagctgctcatctgtctcatcttgtgtcacatgtcaagagtttcccacttttgcactaggtgtttgtagcattaacctaagtcctttggattgcctaataacactagacctgaagcagttgaatagacttatgattatgtgtttctattaaagaacttagatacctatctgaaatgtaataagtttgcaagttcccaatttaatttactattcatactttaaattagttaggaagactggaagaagtttaaatgcaactactgacctnatttcaagtttcaggcaacttgcaaattttcaagtgacagcacttttgagaaaacggggntt

SEQ ID NO: 639 - DNA, 855 bp, Homo sapiens
  misc_feature (699)..(699): "n" may be a, t, c, g, other or unknown
  misc_feature (716)..(716): "n" may be a, t, c, g, other or unknown
  misc_feature (813)..(813): "n" may be a, t, c, g, other or unknown
  misc_feature (853)..(854): "n" may be a, t, c, g, other or unknown
actaagagacagatcatgagaggaaagagaactagaggccaataaataaaataattgttcatatattaatgttcacatgtgaactacatatctaaaatcttggagaaaaatcaaggcaagaatttccagaactgtcctcaaatagctcatttatttaagttttgttaaaaagcaaaagcgaattgattacatttgattaacttttcctattccatgcacaagttaccttaaaacatgataaaaaccttatgggcattacctatcacacagtacttatgcataaacttataatagtaaaattactaatgtttgataaaataagatggaggcattacaaatagtctacagtttgtattttaaggaattggacatgaagaattctagatcattttgtgtctataaacccgactttctatcttgccttgggcaaactttctgtgcctcaatgtactctttaaatatgtgaaggatgctctttttgattaagtgttttgcactcctgaataaagggcatagtataagcacaaagtatgacttaatttatcacaaatattacacatcctatgttcttgaatgtgcacacttttttctcaataacaaaatatatcttaagtcagtttttttaatgctgtcaaaatttgtagaattttctttgagtatggcatgatctcttcccaaatgcattttacagttttttgngtgttctatagactatngagtcaaaatcaagagtattttgagaggatcagaagcatttaaaaatctatttttttctagtatctttcacagatctaaatatttagatctctttgncttttctcatggaatacgggggatcaaattcctaatccgnnt

SEQ ID NO: 640 - DNA, 837 bp, Homo sapiens
  misc_feature (656)..(656): "n" may be a, t, c, g, other or unknown
  misc_feature (768)..(768): "n" may be a, t, c, g, other or unknown
  misc_feature (786)..(786): "n" may be a, t, c, g, other or unknown
  misc_feature (792)..(792): "n" may be a, t, c, g, other or unknown
gtaaagcattgcttgaggttgcccaggtagtttcgccttacacttcttgtcccagtgcaattattagtagagctccctttcactgtcaaatttccggttggggataaattgcattgtcgttttggtttgagataggaagatgaggggaggaaggaggtgaggcggtaaggggcgttctctctcttgggtcccgcgcccaacttccgctggcccaaagaaactataattttgaaccaacagacctctgctggcatctgcgattgcatttttcctgttttaacaacggctgtgctagacgaagtggtgaagcccaaagacttatttttgagctcgctgtaagactgagaaatcacgtagtccttcctgaaaccactaagaggaaaaatgtctgtgacactgcatacagatgtaggtgatattaaaattgaagtcttctgtgagaggacacccaaaacatgtgagatggagtctcgctgtgtcccccaggctggagtacaatggcgcgatctaggctcactgcaacctccgcctcctgggttcaagcaagtcttctgcctcagcctcccgagaactggaagaggaggcaacagtatttggggcaagaagtttgaggatgaatacagtgaatatcttaagcacaatgttagaggtgttgnatctatggctaataatggcccgaacaccaatggatctcagttcttcatcacctatggcaaacagccccatttggacatgaaatacaccgtatttggaaaggtaatagatggnctggaaactctagatganttgganaaattgcccgtaaatgagaaagaccttcccgaccttttaaggatg

SEQ ID NO: 641 - DNA, 893 bp, Homo sapiens
  misc_feature (799)..(799): "n" may be a, t, c, g, other or unknown
  misc_feature (824)..(824): "n" may be a, t, c, g, other or unknown
  misc_feature (857)..(857): "n" may be a, t, c, g, other or unknown
ttcagtgtgtgcgtgtgttttaaatatgttctactttgatcatttcattttgttctatgagttctgcagtgactcagaagttccatgatactataactggagtaattttgctgtatttttagccatgtcctccaagcctcccagtatatgctgtgatctttgccaaacagaatctgatcagtgttacaggggaaatgatgtgtgaggctctacaaggagagggtctccagggcccacacctgagtcatgccttgaagcaacctcagcacacttagcctcccagtgattctgtgcaagtctgtctcaatcttttgagcttatgttagttctttgggggaaaaaaaatagaaacaacttctgaatagggcagtatgtttggggcagctttgtgaatacatatctaaaattacctccatttgccattttttaaatcaattttttttcaagcaatcagattcttttctcctagaggagctgtgggcaagaaaactaatgaattctacatccttctcatcacctggtttaaattgttttctgctctgagtaaacagtaattactgtttaagtacatctcagcagaattttatcccaattgcaacagttcatgttcctcctaatgtaatctctgcggaggaaatgatcgtcaagggaagcaggctgacctgctcacgggatggcgttcttacaatctgcatcttatgtaatggtgattctgtgtgcctgtgtcataattattggaatattattttatgcttttttttttttgagacggagtctcgctctgtcgcccaggctggantgcaatggccgactcagctcactgnaagcttcccttccaggtcacgccattctggctnatcttccaagtagctgggactacagggcccgccacc

SEQ ID NO: 642 - DNA, 898 bp, Homo sapiens
  misc_feature (756)..(756): "n" may be a, t, c, g, other or unknown
aaacatatgtgctgctaataacagagccctagaatgcataaagcaaacctgacagaattgaagggagagagagatagttctacaataatagttgaggactttaatacccaactttcagtcatagatagaataactggacacagaatcagcaaggaaatggaagacttgaacaacactgtaaactaaatctaacagacatctctagaatactctacttaatagcagcaccatacaggttgagtatcctatctgaaatgcttgggaccagagtgtttttatattttgaagtatttgcattatacttaccagttgagcatcccaaatccaaaaatcacagattcaaaatgctgcaaaacgtttctagcaaactccagtgggcattttctttgagtcatcatgctgcactcagaaagttttagattttggagcattttggattttcaggtttggggtgctcaccctgtattcttaagtgcacatgaaatattctctggggtagaccataggatagtctataaaacaagcctcagctggatgcggtgactcacacctgtaatcccagcactttgggaggctgaggcaagcagattgtgaggtcaggaggttgagaccaacctggctaacatggtgaaaccctgtctctactaaaaatacaaaaaattagctgggtgtggtggcacacgcctgtagtcccagctactcgggaggctgaggcaggagaatcgcttgacccaggaactgagacggtgccattgnacttcacctgggcgacagggcgagactcatctcaaaaaaaaaaagcctcaatacatttaaaactggtgaaattagacaaagtagttttctgactataatggggtgaaaatagaaaccaggagttgagaaaatgttttaaatt

SEQ ID NO: 643 - DNA, 744 bp, Homo sapiens
  misc_feature (661)..(661): "n" may be a, t, c, g, other or unknown
  misc_feature (703)..(703): "n" may be a, t, c, g, other or unknown
  misc_feature (706)..(706): "n" may be a, t, c, g, other or unknown
ttgtttgttttttgagacagagtttcactcttgttgcccaggctggagggcaatggcgcgatctcagctcactgcaacctccgtctcctgggttcttgattctcctgtgtcagccttctgagtagctaggattacagatgcctatcaccatgcctgggtaatttttgtatttttagttgagatggggtttcaccatgttggccaggctggtctcgaacttctgacctcagatgatctgcccgcctcagcctcccaaagtgctgggattacaggcatgagccaccacgcccagccatcaatgcattttttttattttttttttgagacagagtttcgcacttcttgcccaggctggagtacaatggtgcgatcttggctcactgcaacctccacctcctgggttcaagcgcttctccagcctcagcctcctgagtagctgggattacaggtatgtgccaccatgcctggctaattttgtatttttagtagagacggggtttctccatgttggtcagactggtcttgaactcccgacctcaggtaatccgccgcctcggcctcccaaaatgctgggattagaggtgtgagccactgtgcccagcccatcaatgtgttttaaagctagctgtcagggttccacttaatttaaagctgggcaggnagatgtgtaatgatttcaaaggtaacacctgtttggtttctnaanggcatgccaagtcctgctgtatcaaggaaagtatcctg

SEQ ID NO: 644 - DNA, 755 bp, Homo sapiens
  misc_feature (663)..(663): "n" may be a, t, c, g, other or unknown
  misc_feature (698)..(698): "n" may be a, t, c, g, other or unknown
  misc_feature (735)..(735): "n" may be a, t, c, g, other or unknown
aatttggaaaatacagaaactacctataatttttccattgttaacatttgagcatatttcttgtcacttttaatggtgctttaaatatgtagcaaatgtatcatttcgtattttaaaaaaatgctaggtaagcatttcctcctgtccttaaaaagctcttttaaacaactttaaaatattgtatagatagatgtacacaattttctgaataattggagttatatttacatcttttcactctttaggaaaggactggcctgtttctgtgttgggttccttcctgagtgtggcttccagctcagtggctcagacttcaagatgaagacttcagtcctggttgtgtatggtcttgggccagttaccatatgtctaatgaatacttagttttgtcatctacaaaatgaaaatagtaatatttgcctcaaagactattatttgggaggatctagtgcaaatgttagtaatgtggatattgtgtagtgtcccaggatattaatgtttttagcctcttggcttttattctgtattgttgccccaaaagatgatgctcacttatctttcatccagtgtaaggatatctggaaagacaacagaaagtatagctgttttcatttcaaaagtgatcagctgcttgagctagcaagcaaggcttgcactagcttncaggcgcagtcacgcagtttcacagcaggcgcggntccctcggagcacccagagctgccctgcggtagtcancagtgtgctgggctgactgc

SEQ ID NO: 645 - DNA, 733 bp, Homo sapiens
  misc_feature (677)..(677): "n" may be a, t, c, g, other or unknown
  misc_feature (694)..(694): "n" may be a, t, c, g, other or unknown
  misc_feature (729)..(729): "n" may be a, t, c, g, other or unknown
aactcgcacccgggtcctggctgcaccgcatcccctcctgcaccccctggatggcccttcagccaacgggggcctgggcgatggtcgaccacggagctgcgcaaggaaaagtcccgggatgcggcccgcagccggcgcagccaggagaccgaggtgctgtaccagctggctcacacgctgcccttcgcccgcggcgtcagcgcccacctggacaaggcctctatcatgcgcctcaccatcagctacctgcgcatgcaccgcctctgcgccgcaagaggagcttcaggacgccctgaccccccagcagaccctgtccaggaggaaggtggaggcccccacggagcggtgcttctccttgcgcatgaagagtacgctcaccagccgcgggcgcaccctcaacctcaaggcggccacctggaaggtgctgaactgctctggacatatgagggcctacaagccacctgcgcagacttctccagctgggagccctgactcagagcccccgctgcagtgcctggtgctcatctgcgaagccatcccccacccaggcagcctggagggcttcgtcatggtgctcaccgccgagggagacatggcttacctgtcggagaatgtcagcaatcacctgggcctcagtcaagctggagctcattggacacagcatctttgatttcatncaccccttgtgaccaanaagagctttaaggacgcccttgaccccccaacttnaaca

SEQ ID NO: 646 - DNA, 789 bp, Homo sapiens
  misc_feature (714)..(714): "n" may be a, t, c, g, other or unknown
  misc_feature (735)..(735): "n" may be a, t, c, g, other or unknown
  misc_feature (788)..(788): "n" may be a, t, c, g, other or unknown
gttacacttaagaaagttaacaataattttataatatcatataatatctttctcatttcggttttaatgtattccagaataggaagcctggtgtctgttttgatatattacgcaacacttattgtggtgttggcattcactagccacttaaaaatgtttgattcaatggagtattttcatataataccttctatggtaaataagagttaaacaatctaaaacatcatctcatagttcagtgttttcagatgaaggaaatgagatgcagagctgttctgtgcagagctgtgactagagaccaggtcttaagtctcagtgtagttttcttttggcattatcaaaattatcattcataatttatgcattgtttaggtatgtattaagtcttagggctaaatgctaaatacttaccagaagtatcttctgaacatttttcttaattgatacgtgcgcatatgtcgggttttcaaaattatattctataagattatctgatttcttatttctaggttgctgtcttaaacattatgttttataaattggagattcttactatatttataattttggcaaactaaaaattagtccttatccatgattattttctgcctttacatctatatagttactggattactttggtgattaagattacatctggaatcttttcaaattgccatttttattgatacctttgaggtatggtgacctggntttaattattctttaacatangcttttaagtatataaaagttcaaaaaataataatttaacttctttttataant

SEQ ID NO: 647 - DNA, 792 bp, Homo sapiens
  misc_feature (651)..(651): "n" may be a, t, c, g, other or unknown
  misc_feature (745)..(745): "n" may be a, t, c, g, other or unknown
  misc_feature (778)..(778): "n" may be a, t, c, g, other or unknown
  misc_feature (790)..(790): "n" may be a, t, c, g, other or unknown
agcgctggtcggcgtctggcggttgtttttagaggtaatacacctagtttgtggctcagcatgtcaattgtaacagtgcaacttggtcagtgtggcaatcagattggttttgaagtttttgatgctttgcttagtgactcacacagttcccagggactctgctctatgagagagaatgaggcatatcaagcatcttgcaaagaaagattcttcagtgaggaggagaatggaggtattgataggcatgtatggcctcctttatcaggacttcctcctcttagtaaaatgtctctcaacaaggacctgcattttaacacttccattgctaacttggtcattcttcgtgggaaagatgtgcaaagtgcagatgtggagggatttaaagatccagctctgtatacttcctggttgaagcctgttaatgctttcaacgtgtggaaaacccagcgggcctttagcaaatatgagaagtctgcagtgttggtcagcgacagccagttcttagtaaaaccacttgatatgattgttgggaaggcatggaatatgtttgcttcaaaagcctacattcatcagtacacaaaatttggaatcgaagaagaggactttttagacagtttcacgtcattagagcaggttgttgccagttactgnaatctctgatcttgaacaatgggaaaagtataccttaaggcatttctggactaaaatattttcaatactattttctctgtaaaggtttcaaagntcttcatcctggctacacggtgaaacaccgctntaccagaaaatncc

SEQ ID NO: 648 - DNA, 847 bp, Homo sapiens
  misc_feature (605)..(605): "n" may be a, t, c, g, other or unknown
  misc_feature (777)..(777): "n" may be a, t, c, g, other or unknown
  misc_feature (783)..(783): "n" may be a, t, c, g, other or unknown
  misc_feature (842)..(842): "n" may be a, t, c, g, other or unknown
aaaaataaaataggcacatttagaattcagagccaatatgtgcttgcttattagttttttagctagcaacatatttgaatcaggctggtaattcgggtaacccaggtagcacagatttttaatgacatatctaaagatacgtaacagctaaaattctgccagtgagaaattttcctgtttgatattcttacaaaagatgtttatgtccaccattatctcatcagggctgtgctgaatatttgataatgagactgatcattccgctttttctttcttaaaaatattagtcagagttaagcaaattaattatagctatctttaagctataaatgtgttaacatgtatatataccatttattatgttctactttagtgatataccttaatttagtgggctttggcagggcgggggagggggaacgttcattaatctctgaggaaaacaaaacctgttttctacttgagtctaacatatggtcccaatttattaatacttctgttaaatttgatgtcaggtcaacatttttcagaaatgtatttattctcagaaacagaaccagagagaagttaaacaaaaggttatgtaactggtcctttaatgttgnaattgaaaacttggtttagcgtcttttttttctttctctttttttttcttaaaatgccaactaaaataattagaaagtagcttatttattgcatgcttatacattgatattggaattggaattgggtggtaatttctggtactggctttgctagaatcatatggcataaatnaccctnatatttatcatcttgggggctggtctgggatcaatacatgattttgctctcttttaatntctag

SEQ ID NO: 649 - DNA, 761 bp, Homo sapiens
  misc_feature (538)..(538): "n" may be a, t, c, g, other or unknown
  misc_feature (654)..(654): "n" may be a, t, c, g, other or unknown
  misc_feature (720)..(720): "n" may be a, t, c, g, other or unknown
  misc_feature (754)..(754): "n" may be a, t, c, g, other or unknown
  misc_feature (756)..(756): "n" may be a, t, c, g, other or unknown
attttttccttcatttcaaccttggtgaatctgacaattatgtgttttggggttgttcttcttggggagtatcattgtggtgttctctgtatttcctgaatttgaatgttggcctgtcttgctagattggggaagttctcttggataatatcctgaagtgtgttttctaacttggttccattcttgtcctcactttcaggtaccccaatcaattgtaggtttggtcttttcatatactcccatatttcttagaggctgtgttcgttccttttcattcttttttctctaatctagtcctcgtgccttattttggtaagttgatcttcaatatctgatatcccttcttctgcttggtttagctattgatacttgtgaatgcctcaggaagttctcatgctgtgtttttcagctccatcaggtcatttatgttcttctctaaactggttattctagttagcagttcctgtcaccttttatcaaggttctgatcttccttgcactgggttagaacacgttcctttacctcagaggagtttgntattactcaccttctgaagcctacttctgtcaatttgtcaaactcattctccatccagttttgtgcacttgctggagaggagttgtgatcctttgtaggagaagaggcattctggnttttggaattttcagcatttttgcattggatttatcctcatcttcatggatttatctacccttgancttgagctgatgacctttggaaggggttttttgngnggggg

SEQ ID NO: 650 - DNA, 779 bp, Homo sapiens
  misc_feature (719)..(719): "n" may be a, t, c, g, other or unknown
  misc_feature (747)..(747): "n" may be a, t, c, g, other or unknown
  misc_feature (774)..(774): "n" may be a, t, c, g, other or unknown
tctcgagagccggcatctcctaggagctagtcctggtcctcggctaggcggcttggggtcgcggcgtaactggggagccagcctgacgccggcggaccccgcctgtgatcctggcaacgatggatgatgacttgatgttggcactgcggcttcaggaggagtggaacttgcaggaggcggagcgcgatcatgcccaggagtccctgtcgctagtggacgcgtcgtgggagttggtggaccccacaccggacttgcaggcactgtttgttcagtttaacgaccaattcttctggggccagctggaggccgtcgaggtgaagtggagcgtgcgaatgaccctgtgtgctgggatatgcagctatgaagggaagggtggaatgtgttccatccgtctcagcgaaccccttttgaagttgaggccaagaaaggatcttgtagaggtataccatacttttcacgatgaggtggatgagtatcggcgacactggtggcgctgcaatgggccgtgccagcacaggccaccgtattacggctatgtcaaacgagctactaacagggaaccctctgctcatgactattggtgggctgagcaccagaaaacctgtggaggcacttacataaaaatcaaggaaccagagaattactcaaaaaaaaggcaaaggaaaggcaaaactaggaaaggaaccagtattgcccgcagagaataaaggtaccttcgngtatattcttctgaattttatgtgaccnttactatgatgtaaagacatactggcnttaaa

SEQ ID NO: 651 - DNA, 861 bp, Homo sapiens
  misc_feature (750)..(750): "n" may be a, t, c, g, other or unknown
  misc_feature (787)..(787): "n" may be a, t, c, g, other or unknown
  misc_feature (842)..(842): "n" may be a, t, c, g, other or unknown
  misc_feature (858)..(858): "n" may be a, t, c, g, other or unknown
agatgtccggccggtctaagcgggagtctcgcggttccactcgcgggaagcgagagtctgagtcgcggggcagctccggtcgcgtcaagcgggagcgagatcgggagcgggagcctgaggcggcgagctcccggggcagccctgtgcgcgtgaagcgggagttcgagccggcgagcgcgcgcgaggccccggcttctgttgtcccgtttgtgcgggtgaagcgggagcgcgaggtcgatgaggactcggagcctgagcgggaggtgcgagcaaagaatggccgagtggattctgaggaccggaggagccgccactgcccgtacctggacaccattaacaggagtgtgctggactttgactttgagaaactgtgttctatctccctctcacacatcaatgcttatgcctgtctggtgtgtggcaagtactttcaaggccggggtttgaagtctcacgcctacattcacagtgtccagtttagccaccatgttttcctcaacctccacaccctcaagttttactgccttccagacaactatgagatcatcgattcctcattggaggatatcacgtatgtgttgaagcccactttcacaaagcagcaaattgcaaacttggacaagcaagccaaattgtcccgggcatatgatggtaccacttacctgccgggtattgtgggactgaataacataaaggccaatgattatgccaacgctgtccttcaggctctatctaatggtccttcttttncgggaactacttttttgggaagaaagacaatttttangaaccatcaaacgttctttcaaggggaatatcaatggtccttgttgggtcccaancggttcttggaaaagnccc

SEQ ID NO: 652 - DNA, 726 bp, Homo sapiens
  misc_feature (680)..(680): "n" may be a, t, c, g, other or unknown
  misc_feature (690)..(690): "n" may be a, t, c, g, other or unknown
  misc_feature (693)..(693): "n" may be a, t, c, g, other or unknown
ccgcgttggggagcaagagccaggctggggacccaggcttggtgtcagcctacggtcctgggctcgagggaggcactaccggtgtgtcatcagagttcatcgtgaacaccctgaatgccggctcgggggccttgtctgtcaccattgatggcccctccaaggtgcagctggactgtcgggagtgtcctgagggccatgtggtcacttatactcccatggcccctggcaactacctcattgccatcaagtacggtggcccccagcacatcgtgggcagccccttcaaggccaaggtcactggtccgaggctgtccggaggccacagccttcacgaaacatccacggttctggtggagactgtgaccaagtcctcctcaagccggggctccagctacagctccatccccaagttctcctcagatgccagcaaggtggtgactcggggccctgggctgtcccaggccttcgtgggccagaagaactccttcaccgtggactgcagcaaagcaggcaccaacatgatgatggtgggcgtgcacggccccaagaccccctgtgaggaggtgtacgtgaagcacatggggaaccgggtgtacaatgtcacctacactgtcaaggagaaaggggactacatcctcattgtcaagtggggtgacgaaagtgtccctggaagccccttnaaaagtcaanggncccttgaatcccaaaagtgccttcccagcttaa

SEQ ID NO: 653 - DNA, 646 bp, Homo sapiens
  misc_feature (631)..(631): "n" may be a, t, c, g, other or unknown
  misc_feature (638)..(638): "n" may be a, t, c, g, other or unknown
  misc_feature (644)..(644): "n" may be a, t, c, g, other or unknown
ttttttttttttttctttcttttttgggccctcataataagcattgttactattggaagttgttttcacattctttccaatattaaatatgtatttttttaagtaatgataatattttccagtggctcatttggatgagaactaccctctatttttaatattaaaactacatccaactcatcatttagcctttggttgtacagttgtgtaatgggctatggactgttacacaccttaccacctctaggcctatgttttttctttccccatatattctgatggggataaatactgttttgcctctcccataggaatggaatacatttattctaaaatgatctttcacagaagtaagagagagggaaacctaaatatacctctaaattgtttgaagttggtcccagcagcataaaatgggttggccccaaagggttggagggtgggcttggttatcagtatttgttttcagaatgagatgggagcatctttcctttgccacgtgctttgtgcttgataacatcatgcttggttcaaacgacaactcagcacaaagccttgagtataaattgttggaatcaaaacatctcattctgatgacgtggtttaattttttaatttttttttttaatangggtggnagggangg

SEQ ID NO: 654 - DNA, 735 bp, Homo sapiens
  misc_feature (414)..(414): "n" may be a, t, c, g, other or unknown
  misc_feature (434)..(434): "n" may be a, t, c, g, other or unknown
  misc_feature (677)..(677): "n" may be a, t, c, g, other or unknown
  misc_feature (683)..(683): "n" may be a, t, c, g, other or unknown
  misc_feature (711)..(711): "n" may be a, t, c, g, other or unknown
atgctctgtacacatgctgtcaacaaaagccagctctaggaacctgagtgccagaatgcctgagggagctacagctgggcttagttggctgggattgagctcgctgtctgagggagctcgctctgtctctctcacactggcagtttacaccagccggcagccctgagcagcagtgggtgtaactttttataaataaggattcattgattcattcatattctcaatatttcttgaagacctaccccgagccaagcatggtgccaggcagtggggatgcagtggagagcaaacagccctgcccatgcaaagtgtcctgtacggtgagaagtgtgagctgcacccacaaagggaaagagcccagtgcagcttttgcaaaatgcagggaaggatgctgctagcctcagggtgacctanaactttaagctcatctttgntttcaggagcccagtgcctcccctccacccctaaagaatatctcaaagacgtggattttcatttcagtaagatttaggggtgcatgggcaggcagtgctggaggaactgggaggcaggtttggaggctgcagtgggaccactggcccctcctggctacagtttcaggccaggagcttgttggcacctggtgcaaactcccaaacctgaggggtccccacaaccccccagcccatcttaacctnctcttnccccaagctatctggtgttggaaagccngcatctaatgtggaaacaagcttt

SEQ ID NO: 655 - DNA, 910 bp, Homo sapiens
  misc_feature (816)..(816): "n" may be a, t, c, g, other or unknown
  misc_feature (855)..(855): "n" may be a, t, c, g, other or unknown
  misc_feature (888)..(888): "n" may be a, t, c, g, other or unknown
aaaacatgttgatcccaatgatgtgatcacttttgaacctttccattacaaagcattgtatagataactttttaattcagtaggaggagaaagttcattcttggcctgttggctttgattattatgggtactttaaagtcagtatttatcaagaaagggaacttgaccaccattggcacatgtgacatttaagctcttcagccttttcctttttagttgtaggtgtttacatttcatttctaagccaactctgtatttatgagagaagtttaagccttacatcatttgatactaaagggttatttgtggtaaatgaaaaatgaccccaaaattacagaggaatatgccagtttaagaaatggctacttaaagttgcttctctctttccttcttactcatgaaattaattggtcttcttcaagtttctttagattccattaaatgattaaatcactattaagagccattcatcaacgtgatttgtgtgttagccaatgaatctgtctcagcttttgaccaaatgggttttagacaaatgcaaagatctgcctctagtccatatggctctttttgagtgctagtattttgcatttcacataatgtagttattttgagcttttaaagagagcatttagacaaagaagcaaagagaggaagggaccaatcaactcatcagttccatgcatcaacaaagcatagctagtagaggaatataaatgacagattgacaaactgtaggaaacactggtactctctttctgaagtttcaagcaccatcctatgtgaaagtcccttctgtccaaacaagctcaaggnccatcttctccctatacaaggcaaacctgtaagggcttnctttccaagaggtccattgctttgggtttcttnctaaattcctaatgggaattaa

SEQ ID NO: 656 - DNA, 784 bp, Homo sapiens
  misc_feature (698)..(698): "n" may be a, t, c, g, other or unknown
  misc_feature (759)..(759): "n" may be a, t, c, g, other or unknown
  misc_feature (769)..(769): "n" may be a, t, c, g, other or unknown
aatcatgtgatccgagggaaccgccccatcaaaactgagatggcccatcagctatatgtccttcaagtcctaacctttaaccttctggaaggaaggatgatgaccaagatggaccccaatgaccaggctcaaagggacatcatatttgaactgaggaggattgcatttgacgcagagtctgatcctagcaatgcccctgggagtgggaccgaaaaacgcaaagccatgtacacaaaggactacaaaatgctgggatttaccaaccacatcaatccagccatggactttacccagactcctcctggaatgctggccttggacaacatgctgtacttggctaaagtccaccaggacacctacatccggattgtcttggagaacagtagccgggaagacaaacatgaatgcccctttggccgcagtgccattgagctcaccaaaatgctctgtgaaatcctgcaggttggggaactaccaaatgaaggacgcaatgactaccacccgatgttctttacccatgaccgagcctttgaagagctctttggaatctgcatccagctgttgaacaagacctggaaggagatgagggcaacagcagaggacttcaacaaggttatgcaagtcgtccgagagcaaatcactcgagctttgcccttcaaacccaactctttggatcagttcaagagcaaattgcgtancctgagttactctgagattctacgactgcgccagtctgagaggatgagtcaggatgacttncagtccccgncaattgtggagctga

SEQ ID NO: 657 - DNA, 875 bp, Homo sapiens
  misc_feature (35)..(35): "n" may be a, t, c, g, other or unknown
  misc_feature (846)..(846): "n" may be a, t, c, g, other or unknown
  misc_feature (864)..(864): "n" may be a, t, c, g, other or unknown
  misc_feature (873)..(873): "n" may be a, t, c, g, other or unknown
atggcggaccgtggcggcgtgggtgaagccgcagntgttggagcgtctcctgcatctgtccctggcctaaacccgacgctaggctggagggagcgactgcgggccgggctggcggggactggggcctcgttgtggttcgtggcggggctggggctgctttacgccctgaggatccctttgaggctgtgtgagaatttggcagcggatatttgaatggtggtacttccataagcatggcacatcttttattgagcaagtatctgtaagccatttgcaaccactgatgggaggaatttggcagcatttcagaaccaggttctccttcgaggaacagagaaaatgaaaccagcagacagaatttgtcagaatgtaaggtatggagaaaccctctaaatcttttcagaggagcagaatataggagatacacttgggtgactggtaaagagccacttacatactatgacatgaacctgtcagctcaggaccatcagacctttttcacctgtgacacagattttttacgtccttcagacacagttatgcagaagcttggagggaaagaaatcctccagctcgaatcaaagcagcctatcaagctttagaattaaacaatgaatataagccttccaaagtcagcagcaatctgttacacagcagcactgttgaagacaaggactgtttcagaaaaattctctccagaaacagccttcagaagaggattaagcacagcagaaattaatgcccgtggaagcaattcatagactgtggaatttaatcctcatgtttccaaacttttagaatgattccatacccgtagagaaaggacatctattttcccttatccancttgcccagaagaccggntgattaganag

SEQ ID NO: 658 - DNA, 815 bp, Homo sapiens
  misc_feature (677)..(677): "n" may be a, t, c, g, other or unknown
  misc_feature (724)..(724): "n" may be a, t, c, g, other or unknown
  misc_feature (795)..(795): "n" may be a, t, c, g, other or unknown
  misc_feature (798)..(798): "n" may be a, t, c, g, other or unknown
aggcgggagaatcacttgaaccggggaggcagaggttgcagtgagccgagatcacgccgttgcactccagcctgggcaacagagtgagactccatctcaaaaaaaaagaaaagaaaatatctcacagacactagtgagcaatcactatgtacgttttttcctgccacttacccactgtgtgacttggcaagtcacttaacctctctgagccccaggctccttgccggtacaccagagacaacagtgtgatgcttggggttcagtgtgcgcagtgactaagaggcccttcgcagaacagaggcccgcgtgggcatgtgaggagtgaggtgccagtgcccgcttggatgtccgtctaccccaccgttaagcatgttgctgcagctgctgcttttctgctgtagggaccaaagcatcatgaggagctaacatccttgaagttggcaagtgttgaagtggctgccactagggattcagataaagggcagggagaggcatcagggctgggagtgcgggtgagagggaagcatggagacccgtctcaggagcactgagtcagcagcacagtggggcgcaattgatccacataaagcctcacattgttcctgcagcagtcaggacagtggtgacctttgggattcggctgacagagcactgctctggggaggggctgggggcangagcactgtctggtgagtggttgtgctatgcccaagacaagcagctntgtcaggctaccctgagggatctgctctatatgggcgctagtcctggcactggcttggatggctgctgctntgnggatcatcaccgtctgt

SEQ ID NO: 659 - DNA, 923 bp, Homo sapiens
  misc_feature (732)..(732): "n" may be a, t, c, g, other or unknown
  misc_feature (754)..(754): "n" may be a, t, c, g, other or unknown
  misc_feature (812)..(812): "n" may be a, t, c, g, other or unknown
  misc_feature (900)..(900): "n" may be a, t, c, g, other or unknown
  misc_feature (909)..(909): "n" may be a, t, c, g, other or unknown
  misc_feature (922)..(922): "n" may be a, t, c, g, other or unknown
aatagagccttccaggctgaaattttcctgtcagtggaaaaaactttggaatacagttaacttaaattcttagcatatttttattgttaattgtggttgagataatccaatgccttttaaagggattagtagctagcttttgttttcaacctaaactgtggtgttcttgcctaccttatgcaattaatgaacttgtgaaaagtatgtataaatccgtttttgtagtataagtctttaatttgtaatggggagttggctttataaaaggatattctactagagtgaatgttcagcgcttcatttatttcctgtattaaggttatttttaaaataaggcacatcaagttgattggaaaggtgttcatagagctagaagtaagagggaaagggctatgaaatggcgaccaggcatatcttatcaatcaggagacagaaagcacagtttccatgaacagagaaagttgaatgtaaagaaattaaacataacaggagtaatgagggattgactggtaagaactaaagagagctctgaagattaagaaccacggatagggctgggcgcagtggctcacacctgtaatctcagcactttgggaggccgaggcgagcagattgcctgaactcaggagttcaagaccagcctgggcaacacggtgaaaccctgctctactaaaatacaaaaaattaggcccggccgtggtggctcacgcctgtaatcccacactttgggangctgaagcgggctgatcacganggcagatcgagaccatcctggctaacaccggggaaacccctgtctctactggaaaatnccggaaaaattaacctgggccttggtgggcaccttgccctgtaagtccaaactggtcgggaaaactgaggccaggaaaaatggccttnagccccggnaagccggaacttnc

SEQ ID NO: 660 - DNA, 808 bp, Homo sapiens
  misc_feature (791)..(791): "n" may be a, t, c, g, other or unknown
  misc_feature (806)..(806): "n" may be a, t, c, g, other or unknown
  misc_feature (808)..(808): "n" may be a, t, c, g, other or unknown
agaagttaggggctgcagcggcgctggctttaggtgaacgacgtggtgaggagtgggtttcgggcatgagaagtcacagggccgtttcctagtctctcttcacttctttgggtcttctcagagaaagaaggctgccgtgggtaggctgggggcggagactatcgggaagagaaaattacttttcccactgaaacacacccaagtatatgcccagccttcatgaaagtgaacagagaaacgaagcgcctttatgtgggtggccttagccaggacatttctgaggcagacctacaaaatcagttcagcagatttggagaagtttcggatgtggagatcatcacacggaaagatgaccaaggaaacccacagaaagtttttgcatatatcaacatcagtgtagcagaagcggacctgaaaaaatgtatatctgttttaaataaaacaaaatggaaaggtggaacattacaaattcaactagcaaaagaaagctttctgcacagattggcccaagagagagaagcagcaaaagctaagaaagaagaatcaacaacaggtaacgccaacttgttagaaaagacaggaggagtggatttccatatgaaagctgtgccagggacagaagtgccagggcataagaattgggttgtgagcaaatttggaagagtcttacctggtcttcaccttaaaaatcaacataaacgtaaaatcatcaaatatgatccctcaaagtactggcacaacctgaagaagataggggaggatttcttaaacaccatttcctatattccagncctgacttggggaantn

SEQ ID NO: 661 - DNA, 746 bp, Homo sapiens
  misc_feature (722)..(722): "n" may be a, t, c, g, other or unknown
  misc_feature (726)..(726): "n" may be a, t, c, g, other or unknown
  misc_feature (735)..(735): "n" may be a, t, c, g, other or unknown
agtggccagagcgactcttcagggaggtggcaggaaaggcttggaacagctgccggaggtgacggagcggcggccccgcccggtgcgctggaggtcgaagcttccaggtagcggcccgcagagcctgacccaggctctggacatcctgagcccaagtcccccacactcagtgcagtgatgagtgcggaagtgaaggtgacagggcagaaccaggagcaatttctgctcctagccaagtcggccaagggggcagcgctggccacactcatccatcaggtgctggaggcccctggtgtctacgtgtttggagaactgctggacatgcccaatgttagagagctggctgagagtgactttgcctctaccttccggctgctcacagtgtttgcttatgggacatacgctgactacttagctgaagcccggaatcttcctccactaacagaggctcagaagaataagcttcgacacctctcagttgtcaccctggctgctaaagtaaagtgtatcccatatgcagtgttgctggaggctcttgccctgcgtaatgtgcggcagctggaagaccttgtgattgaggctgtgtatgctgacgtgcttcgtggctccctggaccagcgcaaccagcggctcgaggttgactacagcatcgggcgggacatccagcgccaggacctcagtgccattgcccgaaccctgcaggaatggtgtgtggctgtgangtcntgctgtcangcattgaggaa

SEQ ID NO: 662 - DNA, 864 bp, Homo sapiens
  misc_feature (689)..(689): "n" may be a, t, c, g, other or unknown
  misc_feature (796)..(796): "n" may be a, t, c, g, other or unknown
  misc_feature (799)..(799): "n" may be a, t, c, g, other or unknown
  misc_feature (858)..(858): "n" may be a, t, c, g, other or unknown
ggcttaatgactggccctgcattcttcacaatatttttccctaagctttgagcaaagttttaaaaaaatacactaaaataatcaaaactgttaagcagtatattagtttggttatataaattcatctgcaatttataagatgcatggccgatgttaatttgcttggcaattctgtaatcattaagtgatctcagtgaaacatgtcaaatgccttaaattaactaagttggtgaataaaagtgccgatctggctaactcttacaccatacatactgatagtttttcatatgtttcatttccatgtgatttttaaaatttagagtggcaacaattttgcttaatatgggttacataagctttattttttcctttgttcataattatattctttgaataggtctgtgtcaatcaagtgatctaactagactgatcatagatagaaggaaataaggccaagttcaagaccagcctgggcaacatatcgagaacctgtctacaaaaaaattaaaaaaaattagccaggcatggtggcgtacactgagtagtttgtcccagctactcgggagggtgaggtgggaggatcgcttcagcccaggaggttgagattgcagtgagccatggacataccactgcactacagcctaggtaacagcacgagaccccaactcttagaaaatgaaaaggaaatntagaaatataaaatttgcttattatagacacacagtaacttccagatatgtcccccaaaaaatgtgaaaagagagagaaatgtctacccaaagccagtattttgggnggnataattgcaagcgcatagtaaaataattttaaccttaatttggttttaatagtggttanatggaa

SEQ ID NO: 663 - DNA, 872 bp, Homo sapiens
  misc_feature (511)..(511): "n" may be a, t, c, g, other or unknown
  misc_feature (719)..(719): "n" may be a, t, c, g, other or unknown
  misc_feature (807)..(807): "n" may be a, t, c, g, other or unknown
atcaaaagaagttcaatactaaagataaagagttttccttattgaaatatatattgttaagcttttaaaccaaatgaaagtatgagtggtcatatttatactgtagtaggttttcataatagattttccagattaaaaccatttgttgaaatcatcaaagagatgttaatcctgctttagcattgatgcaaagttaaaataactgacattaaaaaaatcatttgggaagctttattgaatatattgagataaggtttattgtagtccttctcttcatgcatactgctgttacaattccaggaggtttcaaaatccatgtgaatgaccccattcaaccctcaaactgtccaattcctggcctaattcaccttcactctgctgtagctaccagttgcaggactagctgcattttggccagaactgcatcaccctggaaattttaaacacactctctctcttctgattgccctctttttctggttccatctcagctttattcccactgcattgntctttatctttggagctctctaaatccctagctgtgctagtggtggatgaggtgtttaacaaaggaaatgtaagatcttcctttagttgccagttcagtgtagttttttggaattagtttgctaaatttcttttaaagtgatcagtttagtatccaagaagtaaaatggagcaagttgaaaaattgtcctgcctgtgtttcagtttangttggtcctaggcgcactgctgacttctcttatgacccttgggtagattcagtctttattggtatttgaacttttaatggctggtggngtactctccttagacacatttaaaactttaagcatttggcagggggaatgggtaaggatccagtt

SEQ ID NO: 664 - DNA, 873 bp, Homo sapiens
  misc_feature (674)..(674): "n" may be a, t, c, g, other or unknown
  misc_feature (766)..(766): "n" may be a, t, c, g, other or unknown
  misc_feature (819)..(819): "n" may be a, t, c, g, other or unknown
  misc_feature (873)..(873): "n" may be a, t, c, g, other or unknown
cttattttcaatagttttcctctgatgttctgctgggtatgtaggattttacctcgatttttcttttttcgttcatgcaagtgtcccctttggttttcattataattatcattataatgataattgaaaatgaaacttccccatctatttctaattatttaatggtcacagagctatgtttattactgaagctaaatgtaacaactatgaaatgtataattgccactctgaagtctaaacttgcaaatgaaatttgatatctgagaagatatagcaaaccaaaaattgctaactgtagaattaacattttatagctaagacagactgtaagtggtatagtttctgtatagtttcttttttgtttaaaaaaaatgtacttactcatttggaaaaaatttttaaaattcacattaaaaagttcttataaaatacccttcataaataaccactgttaaaattttgctatgtatcattctcttatgtttttctatgcatttaaattcttatcataccaagaaggcagtgattaagagctcagtttctggagtctgacaggcctgatgatgaatcacttaatacatgtgtggctttcaaaaagttacttcacctctataaccttaattatctcatctgtaaaatgaaaaataatgatactatttgcttcatagggttgncttaagaatttaagttaaaaatgtatataaatcacagcacaatgattaaaatataagtctcattaaacagtagcccattattattaaattgnctatagcttttaacctatcttgcttacttagtaatatgagcatctttctatgncatgaacatctttatatggtggaaaattccttctacaatattacttggattttn

SEQ ID NO: 665 - DNA, 871 bp, Homo sapiens
  misc_feature (817)..(817): "n" may be a, t, c, g, other or unknown
  misc_feature (819)..(819): "n" may be a, t, c, g, other or unknown
  misc_feature (861)..(861): "n" may be a, t, c, g, other or unknown
acattcttataacacagcacagtgactttcttctttcaagattgtagctcagagaaaagatacaggattcaattgggggttcaataggatagaaatggagagattcctttgtgttgtagtagaggcattttcctaaggagtatagatttatactttgcattttcattcatcatcccccagaatcatggtcaaggtgtaggtcactccacacagctgatgctcaggttattcccttgtgagaattatgagaataaagctcccaagatatgtgaaagtgcttaacacagtacctggcacacagcactcaataaaagtttggctctattatgggatggttcaattctggtttaaggagggaagaaaggttattatatatgtaccactaagcaaatatatatatatatatatatatttgggtttttttttccctaatattatttgggtgtcccctgtgcttctttaggatgtagttataactaaacctgttatacttgaacatcactaagagaagtaaattattatgaagctagcaaaaatcttgaggccaaagttgtttcttaacagctttaataatgcttgttgattttgaataatcctttaaaaagtggaccatttgcttattttaatatcacgtcagtaaaatgttagtattaaaaagatcagctttttatggcattgaagaatgtatctgctaagacacaaaaattgcatggtaagtataataggtggaggaggaaaggttgtaggccggatgaaaatttaactgactagaacatttattcaggagtgtaattattttcccttaccccaatcctgngnacgtgttgggtatagttccacatttatccggatttgcaaatngacccacttt

SEQ ID NO: 666 - DNA, 872 bp, Homo sapiens
  misc_feature (693)..(693): "n" may be a, t, c, g, other or unknown
  misc_feature (763)..(763): "n" may be a, t, c, g, other or unknown
  misc_feature (788)..(788): "n" may be a, t, c, g, other or unknown
agtgcttttcatgtcttcaattatccaagtaccccaagcctgtggtttgcctcagtttgggtgggcatagccaagggggttccagggccgtccagccttcactcaaggatgactttccctaggctgagggcagtggacccttgacaaaatttaattaccgtctctgcttatggctggacctcagctggcagggtctcgggggctttaaacaaaagcaggagcctctccagaagtagattagggagatttgcattcaggccagggatttgtacatggtgttaattctcctccaggcagatatctgcttgggaaagggctgtgtgaccctatttagaaaaatggctacactttgttaacctttttcccttaagaaggaaaaatcattaatggcagaagttcaggccccagaggggattttctgggtgattctttgtttcaagagtcatgtttccccagatgtgattaaattgtccgtaacttttaactcttccctcccccgtgctttagttgaaaaataaaatctctgttcatatttcttgcatatcataggcttatgtctctttccagctctataagtcaaggctaaagattttttttttaagaaagaggaaaaaaaagacatttatttgagaagacatttttgtgtgtgccctgctcccaccatgcattcattcggtgctggaaagtggttangggattctaagcagcccccttgctatagctggactgtgacgcttgcccttactgcaagtctgcttggctncttcagacctgatgcagatgcttgnccgttcccacacaagcccttctttttctctggtcccggaacactggttgcttctggtactgagaaggcaatctgggtaaaggaa

SEQ ID NO: 667 - DNA, 870 bp, Homo sapiens
agagctgctcgtctgaggctgctgaggcgacggccggtgtcgtggtcgcggtacctgttccaacacggctcgcgggcccgtgccggctccggtccccggcgcggctgtccgagcccctgcggcgggcggacgatggtgtggcggagcacgcggacgcgggcggcgcggcggcgggcatgaaggaggatggaagggcaggacgaggtgtcggcgcgggagcagcacttccacagccaagtgcgggagtccacgatatgtttccttctttttgccattctctacgttgtttcctacttcatcatcacaagatacaagagaaaatcagatgaacaagaagatgaagatgccatcgtcaacaggatttcgttgtttttgagcacgttcactctcgcagtgtcagctggggctgttttgcttttacccttctcaatcatcagcaatgaaatcctgctttcttttcctcagaactactatattcagtggctaaatggctccctgattcatggtttgtggaatcttgcttcccttttttccaacctttgtttatttgtattgatgccctttgcctttttctttctggaatcagaaggctttgctggcctgaaaaagggaatccgagcccgcattttagagactttggtcatgcttcttcttcttgcgttactcattcttggggatagtgtgggtagcttcagcactcattgacaacgatgcccgcaagcatggaatctttatatgatctcttggagttctatctaccctatttatattcctggatatcattgatgggaatgttggtacttacttaccaaatcttcaagggattcagaaacagccaagccttctgtaatggcatcagaaagcctggag

SEQ ID NO: 668 - DNA, 693 bp, Homo sapiens
  misc_feature (650)..(650): "n" may be a, t, c, g, other or unknown
  misc_feature (665)..(665): "n" may be a, t, c, g, other or unknown
  misc_feature (684)..(684): "n" may be a, t, c, g, other or unknown
ggactctggctttgaggccccacgcctgggtgagcagggcggggactttggctacggcgggtacctctttccgggctatggcgtgggcaagcaggatgtgtactacggcgtggccgagactagccccccgctgtgggcgggccaggagaacgccacgcccacctccgtgctcttctcctcctcctcctcctcctcctcttccgccaaggcccgcgctgggcccccgggcgcacaccgctcccctgccacttccgcgggacccgagctggccggactcccgaggcgccccccgggagagccgctccggggcttctctaaacttggtgggggcggcctgcggagccccgcagccggcgggcgggattgcatggtctgctttgagagcgaagtgactgccgcccttgtgccctgcggacacaacctgttctgcatggagtgtgcagtacgcatctgcgagaggacggacccagagtgtcccgtctgccacatcacagccacgcaagccatccgaatattctcctaagccccgtgccccatgcctccggggcccactccactgggcccaccctggacctgttttccactaaagccttttggaaagcggtgatttgaggggcaaggtgcttagagatactcgctcgctggggaangggggagggaggcantggtggcttgaagggtgcnccactttca

SEQ ID NO: 669 - DNA, 817 bp, Homo sapiens
  misc_feature (804)..(804): "n" may be a, t, c, g, other or unknown
  misc_feature (809)..(809): "n" may be a, t, c, g, other or unknown
  misc_feature (817)..(817): "n" may be a, t, c, g, other or unknown
taaacaacaaaagcaactgaacccatgtatgcacagaaacaatcaaacactagctcattttatagtgcccaggaaaatgttccttcttttaaaatggattttatttgaaagcgcagaaaatgaaaactagtgagatatatttttggtattataataggcaattggttgaggttcaagtttagtttcaggtaatattatcagggaagattccatgttttaaaatagtatttatggatcatgggtaggttaagaaagatgcattggcatatagtcttgatagttaagtccacgattatcattttagaatccaggctatgcttgctgctctttttatccacattttaaattacaattgcattttttacttgttcagtgcacactttgatgcaccacaagtgcattaattttgaatcgtgtgcaatatagaaatattttgagactcacaacattgaaacaaggtgacaccctagttgactttatcactaatgtgatttgaacattatttaaacaaatctagactgaacatgaaagaaaggagttttgggcagtgacatttttcacagaatgtatatctcaaaggtgaaagcagagtttttccagtgcaataaaaagaacagaatatgcagattttgagctactcgctctatagaggataacctaacacggctgaaaattgagctgggacattcagacgaaagtgcaatccatggacagaatagggaataacaggtgtgaagagaacaaacttatcactggaatggtttgccaaacctgggttaaggcataacccttgaatggctcttntaacnaactggtn

SEQ ID NO: 670 - DNA, 667 bp, Homo sapiens
  misc_feature (193)..(193): "n" may be a, t, c, g, other or unknown
  misc_feature (254)..(254): "n" may be a, t, c, g, other or unknown
  misc_feature (334)..(334): "n" may be a, t, c, g, other or unknown
  misc_feature (450)..(450): "n" may be a, t, c, g, other or unknown
  misc_feature (481)..(481): "n" may be a, t, c, g, other or unknown
  misc_feature (614)..(614): "n" may be a, t, c, g, other or unknown
  misc_feature (642)..(642): "n" may be a, t, c, g, other or unknown
  misc_feature (667)..(667): "n" may be a, t, c, g, other or unknown
agtgcgcatccggacgtaggaggtggaggttgtggaattcgccgttcgaaagcagggactaaaagccccacttcgtcttacgttccgaaaggaaggcgtctgttgagcctttctctcagtcgtgagggaggcgtcgacggcgtgcggaagtcctgagttgaggcttgcgggatcctttccggagaaagcgcangctaaagccgcaggtgaagatgtccaactacgtgaacgacatgtggccgggctcgccgcangagaaggattcgccctcgacctcgcggtcgggcgggtccagccggctgtcgtcgcggtctaggagccgctctttttccanaagctctcggtcccattcccgcgtctcgagccggttttcgtccatgagtcggaggagcaagtccaggtcccgttcccgaaggcgccaccagcggaagtacaggcgctactcgcggncatactcgcggagccggtcgcgatcccgcanccgccgttaccgagagaggcgctacgggttcaccaggagatactaccggtctccttcgcggtaccggtcccggtcccgtagcaggtcgcgctctcggggaaggtcgtactgcggaagggcgtacgcgatcgcncggggacagcgctactacggctttggtngcacagtgtacccggaggagcacan

SEQ ID NO: 671 - DNA, 687 bp, Homo sapiens
  misc_feature (18)..(18): "n" may be a, t, c, g, other or unknown
  misc_feature (129)..(129): "n" may be a, t, c, g, other or unknown
  misc_feature (146)..(146): "n" may be a, t, c, g, other or unknown
  misc_feature (161)..(161): "n" may be a, t, c, g, other or unknown
  misc_feature (575)..(575): "n" may be a, t, c, g, other or unknown
  misc_feature (643)..(643): "n" may be a, t, c, g, other or unknown
  misc_feature (646)..(646): "n" may be a, t, c, g, other or unknown
  misc_feature (684)..(684): "n" may be a, t, c, g, other or unknown
attgtgggatctgtcggnttgtcaggtggtggaggaaaaggcgctccgttatggggatccagacggtaagaccctcattcagtatcctccactgggggacccctccccatctggttctggccactcagntccggaccaggggctgncgctgccgaccccgncccgcagggctctgggcccaccgtggatgctggggtcccgatcccgcacatccgggctcgggactccgccaggttacccctctgcccttggcatgcctccgcgctggagctcgggatcgccacccctgggacggtcaccacccaagccccgggctcttacccagcctggcggtcacgctgcctcctctacccacagagccccgtcctgctggcctccctgggggtggggctggtcactctgctcggcctggctgtgggctcctacttggttcggaggtcccgccggcctcaggtcactctcctggaccccagtgaaaagtacctgctacgactgctagacaagacggtaagttggggaagaaagggccagggtgaaggaggggaccagagtgctcctggcatgtagggtacagnacccacggtggttgggatgcccaagggacgtggcaagcgccaggcgcgcttggtgaaacacttgtgtnctncacccttcagactgtgagccacaacaccaaagaggttnccg

SEQ ID NO: 672 - DNA, 812 bp, Homo sapiens
  misc_feature (733)..(733): "n" may be a, t, c, g, other or unknown
  misc_feature (745)..(745): "n" may be a, t, c, g, other or unknown
  misc_feature (799)..(799): "n" may be a, t, c, g, other or unknown
aataaacacttaataaataacaaaactacctttctgaatataaatctttgcaaatgtatccagataacttccattttgtgcctgtgttcaggcatgatttattttgcagttgccctaccattaacagacctccatttgtctcgtgtgtccacacgccccacttgtaggccagaaatagggcttcagacacagaggcttattttttccatatagactggagtggggaaaatttggccttagggaggacagacacaagtccaatgggtaaaccagcgagtagtaggtggacagccgtcccacacaagggtttgtatctgggctacacagattcccttcagaaaagcaccaatggtgagagagttcttcactcagtaacttacattccctggtctggtgcctttaaaaaaccatcagcaatgaaaaggaagtgcatacacatgacaaaaaaattcaaatagggcaaaagtcagagacagcatctcctttccattcttcatcccagtaccccaggtcctctccccagaagtaaccactcttacccagttttagtgtctccttcagacattcaaagcacattcgtataaatgtgtcttttaaaagtggtagtgacctatatgtgctgtgacatgcttttttccctttgtatgtggacatttcacgttagtgtatataggtctacccattctttcagtgactgcttgatagcctactcctaatgatggagttgactttnctcatacattgngctacactggcacatgtgcccataaatcggggagcacgtagtactgggacaaanggtacgtatttaa

SEQ ID NO: 673 - DNA, 882 bp, Homo sapiens
  misc_feature (831)..(831): "n" may be a, t, c, g, other or unknown
  misc_feature (857)..(857): "n" may be a, t, c, g, other or unknown
  misc_feature (860)..(860): "n" may be a, t, c, g, other or unknown
attaaagtttcctgtagtgaaagtcagttacaaagccagtgtggacaaatgaaacagacaaatattaatttggaaagtaggttgttgaaagaggaagaactgcgaaaagaggaagtccaaactctgcaagctgaactcgcttgtagacaaacagaagttaaagcattgagtacccaggtagaagaattaaaagatgagttagtaactcagagacgtaaacatgcctctagtatcaaggatctcaccaaacaacttcagcaagcacgaagaaaattagatcaggttgagagtggaagctatgacaaagaagtcagcagcatgggaagtcgttctagttcatcagggtccctgaatgctcgaagcagtgcagaagatcgatctccagaaaatactgggtcctcagtagctgtggataactttccacaagtagataaggccatgttgattgagagaatagttaggctgcaaaaagcacatgcccggaaaaatgaaaagatagaatttatggaggaccacatcaaacaactggtggaagaaattaggaaaaaaacaaaaataattcaaagttatattttacgagaagaatcaggcacactttcttcagaggcatctgattttaacaaagttcatttaagtagacggggtggcatcatggcatctttatatcatcccatccagctgacaatggattaacattggagctctctttggaaatcaacccgaaaattacagctgttttggaggatacgttctaaaaaatattactttgaaggaaaatctaccaaccttggaacagaaatagacgtcttattaaacccacatgactagacngaggacaagaaacctaaacaagcctnttntcataaagagacaaagccccca

SEQ ID NO: 674 - DNA, 897 bp, Homo sapiens
  misc_feature (884)..(884): "n" may be a, t, c, g, other or unknown
  misc_feature (886)..(886): "n" may be a, t, c, g, other or unknown
  misc_feature (897)..(897): "n" may be a, t, c, g, other or unknown
atttcacaaagaactttacttttgagcagagtgtaccaggtggtaagttggggaatgacggagaagaagaatgttgtgtgaagttagcagcagggcgcgtgtggtttggtgtggctgaagaaaggggcacattttcttggagtatagagtagaagtcagagaagatagtgttgaaaaatgtacacaaaggcctctttcttgttgtattgtctctttaaaaaaattctttctaattgtttattgttttaaaagaaaagcagagaaatgaatctagaaggaacgaatctagacaaacttccaatggcctcaacaatcacaaaaatacccagtccgttaataactgaggaaggacccaacttgccagaaatcagacacagaggccggttcgctgtggagtttaacaaaatgcaggatcttgtcttcaaaaaacctacaaggcagaccatcatgactacggagacactgaagaaaattcagattgataggcagtttttcagcgatgtgattgcagataccattaaggagttgcaagattcggccacttacaacagtctcctgcaagctttgagcaaagagagggaaaacaaaatgcatttctatgacatcattgccagggaggaaaaaggaagaaaacagataatatcacttcaaaaacagctaattaatgtcaaaaaggaatggcaatttgaagtccagagtcagaatgagtatattgctaacctcaaggaccaactgcaagagatgaaggcaaaatccaacttggagaatcgctacatgaaaaccaataccgagctgcagattgcccagacccagaaaaagtgtaaccagaacagaggaactcttggtggaagagattgagaaactcaggatgaaaaccgaagaanangcccggcctcn

SEQ ID NO: 675 - DNA, 838 bp, Homo sapiens
  misc_feature (770)..(770): "n" may be a, t, c, g, other or unknown
  misc_feature (821)..(821): "n" may be a, t, c, g, other or unknown
  misc_feature (834)..(834): "n" may be a, t, c, g, other or unknown
agcagagatgcatggtatagagctatcctgtgcattacgatagctgctagccacatgtggctgttaacactgcagtgtgctaggtctgaattgagaggtgccgtcactgtaaaatacataacaggtcttgaagatttatatattaaaacctgttcatcatctcaataatttttagattgattatatgtagaaataatatttttgtagtttgaatttaataagatattattaaaactggggccaggagtaggggctcatgcctgtaatcccagccctttgggaggtcaaggtggaagaatcacttgaacccaggagttcaagatcagcctaggcaacataatgatacctcatctctacaaaaaaataaaaattgaaaaattaattacacttggttgttttcatatttttgtgggattacaagataaaatttgaaaaatagatgtagcttgtgtttgtggcttgcattattttgctatttgaaagtccaagtatagagtgaggcacagcatagactggaggcacattgcttcacttcaaatcctgatccttccccctactcgttttgtggtctttggcaatttactaaatctgtctttcattctttgtcttatcatcttgtaaaatcaagatagtgatagtacctaactcaaaatattgttatgaggatagtttatatgtctaaatcatttagaacagtatctggcatagagtgcatactcttcaaatgtttggtgaataagtaaataaacccactggtcatgtgcaccttnaccccagtaggtagaattatcaaagaagtaatgcagtttttaaagtagcantttccgggaatanccgg

SEQ ID NO: 676 - DNA, 541 bp, Homo sapiens
  misc_feature (313)..(313): "n" may be a, t, c, g, other or unknown
  misc_feature (350)..(350): "n" may be a, t, c, g, other or unknown
  misc_feature (483)..(483): "n" may be a, t, c, g, other or unknown
  misc_feature (522)..(522): "n" may be a, t, c, g, other or unknown
  misc_feature (540)..(540): "n" may be a, t, c, g, other or unknown
agttgggcatggtggcgggtgcctgtagtcccagctgcttgggaggctgaggcaggagaatggcgggaacccgggaggcagagcttgcagtaagccgagatcacgccactgcactccagcctgggcgacagaccgagactccatctcaaaaaaaaaaaaaaaaaaaaaaaaaaaaaaaaaaaatatatatatatatatatatatatatatgtataggctgggtgcagtggctattcagaggctcactcattgtgcgcatggtgcttatggtgcctggaatagctggcactacaggcatgtgttctgtgccagntcaagtcttcaattttgcttcaaatctttaacttttnaattgtgaaatataactgtatgcagaaaactgcataaaacacaaaggtactgaataacaaataattataaagtgacatctgggtcaataactagaccacagtcagacccctgaagctccctctgtgtctagtntagtcacatccccctccccttgctcaaaaggttttcagnaatcacatcctttttttnt

SEQ ID NO: 677 - DNA, 639 bp, Homo sapiens
  misc_feature (598)..(598): "n" may be a, t, c, g, other or unknown
  misc_feature (625)..(625): "n" may be a, t, c, g, other or unknown
  misc_feature (634)..(634): "n" may be a, t, c, g, other or unknown
tacagagatgaaaaatcatctggaattcggaaaagggaactaattccatggctggcagcgatcgcacccgtgcacggagccacatacatgtgcgacatacgtgtgcgctcacatgctataggtcccggccctcttgctggtcttgccaccatcttcctacccagcttggtgacctccctcatggccttgctcggtccaccccatgtgtgtgtggcacctgccctgggacacccctgcaggccctctttctctccaaggggcgcccatctcaatccccacttctgggaagcttgcgtaccccgtgatcacccacgctgattcctgctcttgggggtgtagctggcgcccagggttggggaggatggagagctggggaccagcacacctgggctgtggagcctgcagggagggggtggaagggggggacttgaagcccagcttctattcccagcctgcccaggggagccctttctcctggggggcctagtaggaccctgtgggcacgttggggaggagcctacaggcgcctcagctgcacgggagtgtgtttgcatccagcagtttgggcccccggccggtggcgtctcacctgcacgtnaggctgtgtgatgcttgcaggcatctnggtgggganggtgg

SEQ ID NO: 678 - DNA, 726 bp, Homo sapiens
  misc_feature (685)..(685): "n" may be a, t, c, g, other or unknown
  misc_feature (702)..(702): "n" may be a, t, c, g, other or unknown
  misc_feature (715)..(715): "n" may be a, t, c, g, other or unknown
tgccatcaccaaccctggctggcagccaccacgtgagagcacagccttcctaggcttcctcaaggagcaggttcagcgggatggagcagctgctagcctcgcccaagggggtctgctccctgaaaatgccctctttacgtctatccagtccttacaatctgagtctgagcccctgagccttatcgcaaatgtggtagctggctcatcctgccggggccctccactgcccagagacctgcagggctccaggcacagggctgaagtcgcctctgccctgcgctccttctccccgctgcaacccgggcaggcgcccacaggccgggctcacagcaccatgacaggctctggggtggatgccaggacagccagctccgggagcagcgtgtgggaaggacagctgcagagcctggtgctgtcagaatatgcatccacagagatgagcctgcatgccctctatatgcaccagctccacaagcagcaggcccaggctgaacctgagcggcatgtatggcaccgccgggagagtgatgagagtggagaaagcgcccctgatgaagggggagagggcgcccgggccccccagtctatccctcgctctgctagctatccctgtgcagcaccccggcctggagctcctgagaccaccggcctgcatgggggctttcagaggcgctacggtggcatnacagatccttggcacantggcccaggggtnccttttcattt

SEQ ID NO: 679 - DNA, 893 bp, Homo sapiens
  misc_feature (875)..(875): "n" may be a, t, c, g, other or unknown
  misc_feature (893)..(893): "n" may be a, t, c, g, other or unknown
aaaaaaaaaaaaaaatatatatatatatatatatatatgtatatgcacacacacatatattcgtatgtatatatatacacacatatacacatatgtatacatatatttatgaaaaggacatagaggtggcatatgatcgcatatgtatacatatatatatatatatatatatgccacttataatagctcaaaaaaattaaatggttagatgtaaacctagcaaaccatgcacaagacttctgtgctgaaaactgcacaatgctgatgaaggaaaccacagaatatttcaataagtggggagacatactgttttcatggatggaaaactcaacctagtagagctgtcacttctttccagattgacagacagttttaccacaattcctatcaaaatctcagcaagatttttttgtagatatagacaacataattctaaaatttatgtggaaaggctaaggaaccagaatagccaaaacaactttgagaaagaattaagtggaaggaatgaggttacctaatttcaagacttattgtatagctacagtcatcaagactgtggtgtggatggaggaacagacacttaggttcatgaaacagagtagagaacccagaaacaggcctacacagatatgcccagctgatttttttgacaaaggtcagaagcaagtcggggaaggtcagcctttcaacaaatgatgcgggggcacctgggcacccacaggcaaaacaatgaacagccaccaaaggctcacactttatacaaaaattaacttaaaatggatgatggacttaaatgtaaaatgtaaaacatagtattttttaaaatgggagaaaatctttgggatcactaggccaagagttatgaggttaggacnaaagcctgaacccttaan

SEQ ID NO: 680 - DNA, 731 bp, Homo sapiens
  misc_feature (638)..(638): "n" may be a, t, c, g, other or unknown
  misc_feature (705)..(705): "n" may be a, t, c, g, other or unknown
  misc_feature (726)..(726): "n" may be a, t, c, g, other or unknown
cgagattactgaattttacaagcttgacattttctattggctttataagctcttctcatgtttttattaccctcacatccaatccgttcgagctacacgctaaatcaaattggtattttatatttttatttttttagaggcaggatctcgctctgtcacccaggcaggagtgcagtggcacagtcatggctcgctgcagccttgacctcgcctcagcctccccagtagctgggaccacaggctcatgccacgcacgcccggctgaagctagttttaactgaagaaaactcaaagtgttctctcgccgttaacctttattattgaggcattggctctgctataggaaaacgaggtgacgttaatatcggtggttgacattaaccactggcaagtgacagtgtggctccttgacaagtggttgctgctcataaatgtcatgaaacaaaaacactgattttagagaagtgggattctacagttaatatcgccagcaaacttttattaagctctcactctgtgccaaacacatgcttgaagttggggtgaatccgtgaccattaagatgttggctgttcatgggcacgttatcaagcaactggggtgtgagagcgaatgataagagggtgaatctggatgangagggacttccagggcacaggtggaggagaggcattgcagccatagagaggcccaagggaacagtcnagacaaggcggggacagtggncaaga

SEQ ID NO: 681 - DNA, 751 bp, Homo sapiens
  misc_feature (690)..(690): "n" may be a, t, c, g, other or unknown
  misc_feature (721)..(722): "n" may be a, t, c, g, other or unknown
atcatggcgtcaatgcagaaacgactacagaaagaactgttggctttgcaaaatgacccacctcctggaatgaccttaagtgagaagagtgttcaaaattcaattacacagtggattgtagacatggaaggtgcaccaggtaccttatatgaaggggaaaaatttcaacttctatttaaatttagtagtcgatatccttttgactctcctcaggtcatgtttactggtgaaaatattcctgttcatcctcatgtttatagcaatggtcatatctgtttatccattctaacagaagactggtccccagcgctctcagtccaatcagtttgtcttagcattattagcatgctttccagctgcaaggaaaagagacgaccaccggataattctttttatgtgcgaacatgtaacaagaatccaaagaaaacaaaatggtggtatcatgatgatacttgttgatgccactgttatcatcctcctagcagaagatagtcctactgagaaaatgagcactttgatcattcagtctttgaactttaacctttgactggaagtgacctataggcaatgaagactacttccttttactgcatttttactcgtgtgcattctgggcgcatgttgatcgctggttcagtccaggcaactgacatgcttttattagtcatacagtattaatgcaggtgtcangaaatgtcaaatataattccattttttattnntatttttttaagcttttggaaaagcttca

SEQ ID NO: 682 - DNA, 798 bp, Homo sapiens
  misc_feature (785)..(785): "n" may be a, t, c, g, other or unknown
  misc_feature (787)..(787): "n" may be a, t, c, g, other or unknown
  misc_feature (791)..(791): "n" may be a, t, c, g, other or unknown
taaaaaatgtttacagtaatggggtctcactacgtttcccagcctggtcttgaacccctggcctcaagcaatcctctttcctcagcctcccaaagtgatgggattacaggcataagccactgcgcccagctccccgttaattgtatgctgaacaaaccttccattccaggaacaaatcccacttggtcgtggcttataatccttttcatatgctgaatttgatttgctagtattttgttgaggatttttgcatcaatattcatcggagataatggtctgaagttttctttttttgtggtgtctttgtctggctttggaatcagggtaaagctggcctcatggaatgagcttggaaatgttccctcctcttcatttttttggaagagtttcaggaggattggcgataattcttctttaaatgtttggtagcattctccgatgaagccatctggtcctgggcttttctgtgttgggaggtttttgattactgattcaatctctctcattattggtctgatcagactttccatttcttcatgattcaatcttggtaggttgtgtgtttcctctagaaattggtccatttcttctaggttattaaatttgtaggcatacaattcttcataatattctcttataatcctttttatctctgtcgtattggtaagtaatgttccctctttcatttctgattgtagttattgaatggtctttttttttcttaatctagctaaggatttgtcaatttgggttgatcttttcaaagaaccaactttttaattttngntggntggaatt

SEQ ID NO: 683 - DNA, 854 bp, Homo sapiens
  misc_feature (780)..(780): "n" may be a, t, c, g, other or unknown
  misc_feature (782)..(782): "n" may be a, t, c, g, other or unknown
  misc_feature (847)..(847): "n" may be a, t, c, g, other or unknown
actatataatttgtcacaattcaatctaatcagctaaagttaaatgtagttagaattagccacaggagaatgtaaagcatgctttgacgaagctatcggtaacacatattgaatgtctttgagactcttagattgtactatttgcttaatagattaatgaaatttatcagatacaacctgtatttccaaaaacaagctagaaggaacctgaggaatgtggtttacatttgagatccaccttactgtgttttctactttcagaaaagattctgtagttttggtttttggcatctttcttatactcagttttttctgccttaattcccatttacctgcagttaactcatgtttattgtgctttcatgcattgtgatatggaatgtgtttagtaatttactccttataaatatggtaaagtacagtggtatggttattctatgcattaagttaatgacattaataagcttggttatgaggggttggagccatacatgtaatttaagagaacagttaaaagtgtaacatagttttagcttggtgtctaaataatgggcagctgataaaacagcttggaccatattgttttaaagagagcctacaagcacagaaactagttatagatctaatgtggaattgctgaactcagaactaggccatggaagtctgaaaagcaaatatggctgtttcaaactcatttttttggcagcttttttatttttaacactttattgaggtataaattgacttgaacacacaggtaaaacatacaggtttaccagngntttgacctacaacttaagtggaaccttaatctaattatttccccccgaaatttcttgggttcccnttttaag

SEQ ID NO: 684 - DNA, 868 bp, Homo sapiens
  misc_feature (643)..(643): "n" may be a, t, c, g, other or unknown
  misc_feature (725)..(725): "n" may be a, t, c, g, other or unknown
  misc_feature (822)..(822): "n" may be a, t, c, g, other or unknown
  misc_feature (850)..(850): "n" may be a, t, c, g, other or unknown
  misc_feature (852)..(852): "n" may be a, t, c, g, other or unknown
taaacaaatgaacaaaaaagagtgggagatgaaaataagtgtaacggggaaataatgcatgcaaggaaaaaggtttggagtagggggatttcagttttaaacagtatgatcagggtggtttcattgagaaggtgatagctgagcaaagacctggagtgtcccaggcagagagaacagcaagtgcaaaggcccttaggtggggactgtatctatcttttttggggtgtggggggacagggtgtgtcttgctctgttgcccaggctggagcacagtggtgcaatcacagctcactgcagccttgaactcctgggctcaagcgatcctcccatctcagtctcccaagtagctgggactacacttgtagctgggactacaagtgcgcttcattacgtctggctaattttttaatttctgtagagaaagaggtcttgctatgttgctcaggctggtctcaaactcctgggctcaagtgatcctcctgcctcagccttccaaagtgctgagattgtgcctggctgtctctgtcttctttggggaaaagcaaggccaatgtagctgaagcagagaggagagaaaggtgagggctgactgcatggagcctctgtggggcattgtgatggctttgaagtcaccttgcttgangaggctgcctcaaggcctttgcatatcctgatccttctgcctggcatacttttccctctggtctttgccatgttaccacatnctttagatctcaaaccaaatattactccttacacaaagccctgcctaacttcatacgctcatgggttataacacttcataattacacaggcctttgnggcataatttgatgactgctggcttctncnttgggtattaaaactt

SEQ ID NO: 685 - DNA, 713 bp, Homo sapiens
  misc_feature (499)..(499): "n" may be a, t, c, g, other or unknown
  misc_feature (672)..(672): "n" may be a, t, c, g, other or unknown
  misc_feature (695)..(695): "n" may be a, t, c, g, other or unknown
  misc_feature (704)..(704): "n" may be a, t, c, g, other or unknown
aggtgcggctactcccccggccccggcagacctgcgactggcccagtcgcccctggggccctttgccactcccttggcaaggagagccgagacctcagttcccggcggctcttgcggggcacaggtgagccctggctgcgcgcgcggcccctcctccccggcgcctcccagccagggccccagcccctatgatgaaagcgaagtgcacgactccttccagcagctcatccaggagcagagccagtgcacggcccaggaggggctggagctgcagcagagagagcgggaggtgacaggaagtagccagcagacactctggcggcccgagggcacccagagcacggccacactccgcatcctggccagcatgcccagccgcaccattggccgcagccgaggtgccatcatctcccagtactacaaccgcacggtgcagcttcggtgcaggagcagccggcccctgctcgggaactttgtccgctccgcctggcccagcctncgcctgtacgacctggagctggaccccacggccctggaggaggaggagaagcagagcctcctggcgaaggagctccagagcctgcagtggcacagcgggaccacatgcttcgcgggatgccttaacctggctgagaaacgcaagctgcggcttgacagctggcctggcctgtntcgcctgaggcctgatgcgggcntccctgacnatgggcagt

SEQ ID NO: 686 - DNA, 842 bp, Homo sapiens
  misc_feature (683)..(683): "n" may be a, t, c, g, other or unknown
  misc_feature (744)..(744): "n" may be a, t, c, g, other or unknown
  misc_feature (793)..(794): "n" may be a, t, c, g, other or unknown
ttctaatgaggacataagtgagggacactggaaagaccaaaagagaatggaaagtactgacatggtagttgcagggtgctagtgagcagtcatgcccccaaatcagccaccttacatagaactccccaagttcagggccactggatggggttgtgacgcagtcaagcagggcccagaaagcatacaagcagttggtttcatctcctgtaagaaagtggcatcatccctgctttgtaaacggagaacctgacacacaccaagagcactcctagccgtggaaaaaagccgctagaacccgaggttagtctgatttttggttcctctgaaaattagcttttgctggatgctagattcagttctggacttactgagtagtctctgggtttttgacattgttaggcactgtgggaaaattataacaggtacgtctgcgctgagttgcttgctaattcctaggagagacttggacattttggacaattaagaagcaatacaggccaggcacggtggctcacgtctgtaatcccagcactttgggaggctgaggcgggtggctcatctgaggtcaggagttcgagaccagcctgaccagcatggtgaaaccccatctctactaaaaatacaaaattagccaggcgtggtggcacatgcctgtaataatcccagctactcgggaggctgangcaggagaattgcttgaactggggaggcaaaggatgcagtgatccgagatcacgccattgnacttcagcctgggcaacaagagtgaaattctgctcaaaaaaaccaaccnnccaaaggaagccaatacagctctttgagaaaagatccagtcattaagt

SEQ ID NO: 687 - DNA, 918 bp, Homo sapiens
  misc_feature (861)..(861): "n" may be a, t, c, g, other or unknown
  misc_feature (885)..(885): "n" may be a, t, c, g, other or unknown
gcagcgcctggagcatgagccgggtggtggcgtgcacggaggatcgcgggaggctgccgcctcgggacaccccactcacacagggcaaaaggatgtatacactccatcttcatttaaaacactggaggattggaaaggagaaaaggaacaggacagaaaaaaaaacagagtgttctgaacatcaacacaaagtggaagaaccttaagctgaaggtacagtatattatttacactgaaggggcttgtgtgtggacaagaaagcgctgacagctcaaatggatcccatggaactgagaaatgtcaacatcgaaccagatgatgagagcagcagtggagaaagtgctccagatagctacatcgggataagaaattcagaaaaggcagcaatgagcagtcaatttgctaatgaagacactgaaagtcagaaattcctgacaaatggatttttggggaaaaagaagctggcagattatgctgatgaacaccatcccggaacgacttcctttggaatgtcttcatttaacctgagtaatgccatcatgggcagtgggatcctgggcttgtcctatgccatggccaacacagggatcatactttttataatcatgctgcttgctgtggcaatattatcactgtattcagttcaccttttattaaaaacagccaaggaaggagggtctttgatttatgaaaaattaggagaaaaggcatttggatggcccgggaaaaattggagcttttggttccattacaatgcagaacattggaacaatgtcaagctacctctttatcattaaatatgaactacctgaagtaatcagagcattcatgggacttgaagaaaatacttggaaaatggtnctcaatggcactaccttatcatanttgggctggtggaaatatcttccctttcgttcc

SEQ ID NO: 688 - DNA, 860 bp, Homo sapiens
  misc_feature (707)..(707): "n" may be a, t, c, g, other or unknown
  misc_feature (777)..(777): "n" may be a, t, c, g, other or unknown
  misc_feature (785)..(785): "n" may be a, t, c, g, other or unknown
  misc_feature (819)..(819): "n" may be a, t, c, g, other or unknown
acgtgggccggagtcggagactgagtttagctttactgaggagctctaaatttaggcgggtatgagtgatttcagtgaagaattaaaagggcctgtgacagatgatgaagaagtggaaacatctgtgctcagtggtgcaggaatgcattttccttggcttcaaacatacgtagaaactgtggattatttggaagctcggaagtgaaattctattttatcatcccaaaagcaacatggagagtttcaatacttttgctaaccggatgaaaaatattggcgtcatgaattatttaaagatctccttacaacatgcattataccttctgcatcatggaatgcttaaagatgctaagagaaatctgagtgaggcagagacatggagacatggtgaaaatacgtcttcccgggaaatattaatcaaccttattcaggcctataaagggcttttacagtattatacctggtctgaaaagaagatggaattgtcaaagcttgataaggatgattatgcttacaatgcagtagcccaggatgtgttcaaccacagctggaagacatctgcaaatatttctgcattgattaaaattcctggagtttgggacccttttgtgaagagttatgtagaaatgctggaattctatggggatcgagatggagcccaagaggtctcaccaattatgcatatgatgaaaagtttccatcaaatncaaatgcccatatctacttatccactttctaaagagacagaaggcaccaagatcaaaattggataagtgngcttaaanattttggattcaaattggacccatctcataaaantggaggttgggaatttccatacctttactttaagaaaaatc

SEQ ID NO: 689 - DNA, 784 bp, Homo sapiens
  misc_feature (752)..(752): "n" may be a, t, c, g, other or unknown
  misc_feature (768)..(768): "n" may be a, t, c, g, other or unknown
  misc_feature (776)..(776): "n" may be a, t, c, g, other or unknown
gtagagtgcgcgacgcttttggcgacccgacctctggctaacctacccccggagccatggcctctgctggggtggcagccgggcgacaggcggaggatgtattgccgccaacgtccgaccagccgctgcctgacaccaagccgctgccgcctcctcagccgccgccggtccctgcgcctcaaccgcagcagtcgccggcgccacggcctcagtcacctgcccgcgcgagggaggaagagaactactcctttttacctttggttcacaacatcatcaaatgcatggacaaggacagcccagaggtccaccaggacctgaacgccctcaaaagcaagttccaggagatgcgcaagctcatcagcaccatgcccggcatccacctgagccccgaacagcagcagcagcagctgcagagcctccgggagcaagtcaggaccaagaatgagcttctgcaaaagtacaagagcctctgcatgttcgaaatccccaaggagtagagtgaggctgacttccttagaaagagggggaagccaatggcctgtctccccactaccatccccaaacgctccttggggcgtggttcctgtggaccccagctcagctcgtcaagctgcaggggcggggctcctgtgctgctgcgcgcgcttcgctgtgcgggagccaagcgcaaaagcttggcttgcgcccggggttcctcgtgtagatccatatgtctaagatgcattaataactggaatgccctgctgggtggnaagtcaagaatgcttncctgggangcttgcaa

SEQ ID NO: 690 - DNA, 911 bp, Homo sapiens
  misc_feature (738)..(738): "n" may be a, t, c, g, other or unknown
  misc_feature (817)..(817): "n" may be a, t, c, g, other or unknown
  misc_feature (904)..(904): "n" may be a, t, c, g, other or unknown
aaaaaaaaaaaaaaaacaataatgagctctgaaattaaatcagtaataaataacctaccaactaaaaaagcacaggaccaaatgaattcacagccaaattctaccagatgtacaaagaagagctggtagcatccttactgaaactatcccaaaaagctgagaaggagggactcctccccaactcattctatgaggcaagcaacatatttataccaaaacctggcagagctcacaaaaaaagaaaacatcagactaatattcttgatgaacattgatgccaaatttctaaactaaatagtgagaaaccaaattcagcagcacataaaaaagctaatccaccgtgatcaaataggctttctccctgggatgcaagtttggttctacatatgcaaatcaataaatgtgattcatcatacaaacagaaataaagataaaaatcacctgattatctcaatagatgcaggaaagtcttttgataaaactcaacatcgcttcatgttaaaaatgctcaataaactaagtattgaagcaacgtacctcaaaataataagagccatctgtgaaaaatccagagccgatatcatactgaatgggcaaaagctggaagcatatcccttgaaaaccagcagatggcaaggatgccctctctcaacactcctatttagcatagtagtggaagtcctggacagagcaatcaggcaagagaaagaaataaagggcatccaaataggatgaganggagtcaaactatccctggttgcagacagcatgattttatatctaggaaaacccccatacacgtcccaaagcttcttgngctgataaaaaaaaacttttacgaagttcagaatccaaatcaccttaaaaaatctttacattctatttcccaacaccggtcaactgngagtcaa

SEQ ID NO: 691 - DNA, 910 bp, Homo sapiens
  misc_feature (850)..(850): "n" may be a, t, c, g, other or unknown
  misc_feature (854)..(854): "n" may be a, t, c, g, other or unknown
  misc_feature (890)..(890): "n" may be a, t, c, g, other or unknown
gtttaataattaaaatgtgataataagataatattataagtacctgaccagaatgagactaaggcagaagagaagagattggatgtcctctaaaattaggccacctaaattgtaacagataattttaatcaagagaatagtggagtactttattaggacataatgtgaagtgatatttctgaaaacacatttcttgaaatagttttaaaactgataataaaggaaaagaaactgtacttagtttggagcagtggacaaaagctgattcagaaaacatgaccatattctgcctacatgaagcatctgggaagaaagggaaagtcacacctcctcttgagattttaaccattatgataaaaggtatgctttaatttgttaaaaaaaaaagtatgaaaggggataatgtgaatacaaaaaagaagcctagagattgaaaataataataatagaacatgttattaggagatggtacttaatgtcatgttggagttggagttttcaaggttacctctatataaaattggattattttctgttagatataatgtgacaaattaaatgactttatcccaaggtacagtgaggtaaacaaaaatctattcttagatatccttagatttggttaactgagctgtagaagcagcgaattgtctagccatttaagttatttttgtaaaattcagcataaacatcaatctctaatttctatctagaagtgactttaagacattacaaggaacattggccatttggaaaatgcccataaaatactggagacttattaatattggagacttattatcagcctttactatgcttaatttaaatatgggtttcatttttacggaanaagnccagattccttaaggctcctggggacttaagctccngggcctggtattataaaaaa

SEQ ID NO: 692 - DNA, 756 bp, Homo sapiens
  misc_feature (687)..(687): "n" may be a, t, c, g, other or unknown
  misc_feature (719)..(719): "n" may be a, t, c, g, other or unknown
  misc_feature (752)..(752): "n" may be a, t, c, g, other or unknown
tagtgtagacggaagctcctttggtgccagattataaaggtagaaatttgtggaggacatcgaggagacagaagacatgctttatacatgtttctttttattttaaaaagctttgaaatacatttgaatgaaaaactaagcagttgcttatgctgtcagtacctgtctctgctctttaaaaagtaagccactgcctcttacctaaaggtcagcatgggctccatcatacagcggtcaggtccatcatacagcggtcaggtccatcatacagcggtcaggtccatcatacggcggtcaggtccatcatacagcggtcaggtccatcatacggcgctcaggtccatcatacagcggtcaggtccatcatacggtggtcaggtccatcatacggcggtcaggtccatcatacggcggtcaggtccatcatacggcgctcaggtctgtaactcttgacaggaaggtgcagtagcagaatggcgagatgcactgagggtaaccagatgatctcatgggacttacccagtgttagcaccaaagtcccatgaactgaggtgttaaaacagaaaggcctgtgtcctcagaacccctccaagtcactggccaactatgactcatgtttggtgatgttggatgccagttaataaagtccagaacttaagcccaagaagagagctcagaagtgtttgngttactctttatttattgaggaataatttacnagatagtaaaatttaccccttatatctgacagntttg

SEQ ID NO: 693 - DNA, 733 bp, Homo sapiens
  misc_feature (689)..(689): "n" may be a, t, c, g, other or unknown
  misc_feature (729)..(730): "n" may be a, t, c, g, other or unknown
atttactaatgaggcagtttgcaaagactgtccctgaagtgtagtgtagtctttcagggggattcatttagtaagctagattgatttaacctggtactgtactagcatagggtcaaatacgtgtcatcagagacctgggtatgaccaggcttacaaaactcaggaacaaactcagattcctactgacctcaaccaactaaactaggccaaatttctccgtgtacaaaatggaccacgttatttacaatccacgtggtggagaagatggtagacatgtggagagagtttggccaggtgctccattctaggtctttttccagtttctcaaaggcagaacattggctcctaattatttgccatggatatttgcttcctgttctggagctatgttgtaagacagctgtgtgatgtccatcattcttgactccagaatgaagacagggcttgctgttttctgtcctgttggtatcatctgttgccttggcgatcactcagtgatgagtcgtcagtattttgacatgtcccagtgcttgctgtacaagaggggactcagatcaacaggaagactctgaagacaggaacctgcatggtatcttacatctttgatacttgggtgctgatatgaagcagagttgttgatttactttatctaggcccttctttcatctcacctggatcaagcaactganaagtgtatcaaggagacctggatcatatctctatgaaatnnaaa

SEQ ID NO: 694 - DNA, 745 bp, Homo sapiens
  misc_feature (718)..(718): "n" may be a, t, c, g, other or unknown
  misc_feature (728)..(728): "n" may be a, t, c, g, other or unknown
  misc_feature (742)..(742): "n" may be a, t, c, g, other or unknown
attctccagtggcattgccattgcccaggaggggcccagtcaccatgagagctcccttgccttacctggaggaagaatgtgccttcaggccacagtcgtgctgctagaacagtctcatagctgcagttcagctgtgcttcctcagcctactatcataggcttcctcagccctctgtcatatggctgttttccaaacctgtggagtctgttactgttctttctgcaaggactcacctccttgagccttggtttttgttgtagggattaaatgagataatatgagtggcagctcttcatgagtcctgcagtgctaagcaaatgtcagaaattggtgtattagactatttatctttgatcttctgaatggattgctgtcatggacacggacacggatcttcatctggttcattgtatttatatgtgagggatggatggctgcggggctccaagagcagcctcctgaagtgagggtggcaagtatgtgacagggcacccacaaaggcagacgaggactctgagaaccaacaggacttctctggtcttattctgaggctaagacaaaaaccgcacctgagccagatctctcagcctggcagctccaggacccgtgggccctgccactggcccatctcaacggctaggacctagagcatcatcaagctgcaggttaaacaggttggttggttctgatttgactgccctttcaaggacctatggntgcacttgtngatacttttccgangag

SEQ ID NO: 695 - DNA, 846 bp, Homo sapiens
  misc_feature (766)..(766): "n" may be a, t, c, g, other or unknown
  misc_feature (822)..(822): "n" may be a, t, c, g, other or unknown
  misc_feature (846)..(846): "n" may be a, t, c, g, other or unknown
gatacatacacctgcaaaggttcagctttccctatacacatatttgtctgctgaatttattggaactgctaccatctacaccaccatacgcagagtaggaacagtattacagctaatgcacaccttaaaatattactactgggttattaatcctgctgacagtagtggcattacacctaaaggattagatggtccccggccatcacaaaaagaaattatatcactgagggcatttatgctactttttctgaaacagctgatactaaaggatcgaggggtcaaggaagatgaacttcagagtatattaaattacctacttacgatgcatgaggatgaaaatattcatgatgtgctacagttactggtggctttaatgtcggaacacccagcctcaatgataccagcatttgatcaaagaaatggaataagggtgatctacaaattattggcttctaaaagtgaaagtatttgagttcaagctttgaaggttctgggatactttctgaagcatttaggtcacaagagaaaagttgaaattatgcacacccatagtcttttcactcttcttggagaaaggctgatgttgcatacaaacactgtgactgtcaccacatacaacacactttatgagatcttgacagaacaagtatgtactcaggtcgtacacaaaccacattcagagccagattctacagtgaaaattcagaatccaatgattcttaaagtggtggcaactttgttaaaaaactctacaccaagtgcaganctgatggaagttcgccgttattttatctgattgataaaacttttagtaacagccgngaaaatagaaaatgcttattgcan

SEQ ID NO: 696 - DNA, 600 bp, Homo sapiens
  misc_feature (598)..(600): "n" may be a, t, c, g, other or unknown
gttttgtctcccagcatgtgggaaagatgtcatccattgcttctgtttcctggaggcctgggagcaaggagcccaggaacagtatcacgaagcttgagataacaccagttacattatcctgactgcccaaaaggcagtttttttgttttttttttttatactttaagttctggggtacatgtgcagaacgtgcagttttgttacataggtatacgtgtgccatggtggtttgttgcacccatcaacccgtcacctatattaggtatttctcctaatgctgtccttccccaacccctccattccccatcaggccccagtgtgtgatgttcccctccctgtgtccatgtgttctcattgttcaactgtcacttatgagtgagaatatatggtgtttggttttttgttcttgtgttagtttgctgagaatgatggtttccagctttatccatgtccctgcaaaggacatgaactcatccttttttatggctgcatagtattctatggtgtatatgtgccacattttctttatccagtctatcattgatgggcatttgggttggttccaagtctttgctattgtgatttttttttttttttnnn

SEQ ID NO: 697 - DNA, 788 bp, Homo sapiens
  misc_feature (773)..(773): "n" may be a, t, c, g, other or unknown
catttcacttaccatttcaggcaaagttggctaagaacatgaggctgtttctgatatttccttttatttttatgtattaatgagaataataggtataggccatatacttattagagactctcaatgacttatacttattattctcaattcatattatatcatattatactcattgaaaataagccatatacttattagagacttatttagagtcttattagagacttattaagagtctctaataagtatatgggttgtcaagctagacacaaaatagtaccatctctctccacctctctaaagaggaccacatcatctccaaatgtaaatagacaagaacaaaaaaaattgtgcatttactaggcaattgaatgttctccaaaccaatattcctttgaacaaaatgagtttgtttgatttgagaacaatgaagtatttggctattttataatcataagtgattcatacccccacacacttagccctctagaaatggtgccagaagatgaaacacatttaattttgccatatagaagcattgcaaataactactggtttctaataatgtaccttataatgcaaataatgttttaatttttaaaaatatcagaaaaagtacaaccttttaaattatgtagttgcttcttcttcataatcatttttcttgaactggtgaaaaattttgtcagaagttaccacttgggacatattgtactacagcttctcgcttggctggagaaactggttttccagaagcagaccttataccagangtaaatgaccattat

SEQ ID NO: 698 - DNA, 785 bp, Homo sapiens
  misc_feature (718)..(718): "n" may be a, t, c, g, other or unknown
tttgacttaagaagccattttatggggaaattagaatgaatcttaaaaaagttttttttcttcttttgattgtattgaattcctttgtagtgtggcttttttaaaagactgaatctttgttctcattaaccctaggaaatgttcttgctttctctgcttatctctttgctctttaatatgaacagaattttttttactccctaaggaacgcaagccattttctgtttctagcactcccaccatgtcacgctcaagttcaataagtggtgttgatatggcaggactacagacatcttttctgtctcaggtgatgttttattttttatatgtgcttagttcttagaataataataaaggaaatatgcaaatggcaatattgtctgtcatcatgaccttgccattctatgggtaattcatctgaatacttgtggaggagtgctaattttagtgagaggaaacacgtgaatgattttctgcctttgagaagacatttaaagcaaaaattgacagaaccatttttgttcgaacctggtaatggaagacaagctatgataactgagtaactgtgtgaactttcttaattaacataggatgagtctcatgatcactcatttggaccaatgcctatatcagcaaatggaagcaatctttatgatgctgtaaggatgggagcaggatcaagcataattgaaaacctacagtctcagctaaagctaanggaaggggaaatcactcatttacaggtattggaaaaattaaatttgctatagaagtaaatgaagttt

SEQ ID NO: 699 - DNA, 784 bp, Homo sapiens
tactatatcatcttcaaagatttatttatttatttttgttccttttcttggtgtggtttgtgtgttgatgggtggtgaatttggaggaaagaaatgagtcttgagaaaataccttggtcattcattcttaatatgtttagagaatagcaaactttcagcatattttattgagatcaaaagtagcatgtgaaattagacaatgaaatgtcaatttttgtattagtttcctggggctgttgtcacaaagtaccaaaaactgtgctgcttaaacaataggaatgcattgtcccacagttctggaggctgcaagtcgaagatcaaggtgtcagcaagttggttctttctgagggctgcgagggaaaatctattctgtgcctctctcctagcttttggggactcaagcattccttggcttgtaatggcattcttcccatgcctctttttatatgtctgtctctgaatccaaatttcttttttataaagacacagacatattggattggaacctagcctaatgactccaagttgatcatcagcaatgaccctattttcaaataaggtcatgtttattcacactgaggattagaactgcaaatatgtttctttttaggggggacacaattcaacccataagaattctgaaactttgttttgccttttttgattagtgttaatacattttcagagtactttatattctcagggcttagaataagacaaagtaagattattcattcgagtatactgggttatttagtaagaaaatggactgagatttcataat

SEQ ID NO: 700 - DNA, 787 bp, Homo sapiens
  misc_feature (720)..(720): "n" may be a, t, c, g, other or unknown
ttgctttgaacttgggttagggtctgtgtttagcctgagaggtccttgtagggaagcttgtatcagaagttctaatgggtttgagttctcaggccatatatagcatcatgttagtgtttgagttgtgataaaaattatggggttttttgttaggcctaaattaaaagaaattatttttcttttcaacaatgaatctgaaattcttagtataaccaaatctgatgcatttacaattttatgtacacattggtgtgtttcattttttagaaactgtgaagcctcattcagatagtattaaaatacaggattttccttttcattaatgagtcctatgatgtaagtgttatattgatgttaaaatgaagtagttttgtaccctgggtgcataaaattgtcagagagaattaaaggagaaagaactcaaacttcatcagagatcttgatttaattcatgtgaagagtgtggattacccccaacccccaaccccatgactctaatacacattagagtgtattaactagggatggtgtgtttatttctgccttagggcactagctttccaaataacttttggtatgggcttgagccatccctgtattcatgcacagagtttcaaggcagaaatttgagctaccctgtaacttaacagttgaaaaaaaccctgcttcctgtgttatctgtcttacttacactgccatagcttgcagtttagcacttgnctttcttttacctaaggaagtaatttgttgagggaactagcccttttgcttattgaaactttgcagg

SEQ ID NO: 701 - DNA, 514 bp, Homo sapiens
  misc_feature (378)..(378): "n" may be a, t, c, g, other or unknown
  misc_feature (383)..(383): "n" may be a, t, c, g, other or unknown
  misc_feature (455)..(455): "n" may be a, t, c, g, other or unknown
  misc_feature (495)..(495): "n" may be a, t, c, g, other or unknown
  misc_feature (514)..(514): "n" may be a, t, c, g, other or unknown
atccgctattgtgcatataatattggggaccagtcagccatcaatgaactcatgcagatgagattgaggtctgggggcactgagggtctcttggctgaaaaattggaggctttgatcactcagactcgagccaaacaggcagctaccatgagtgaagtggagtggagagggagaacggttccagtgaagattgacaaagtgcgcattttcttattaggactggctgataacgaatcagctattgtccaggctgaaagcgaagaaactaaggagcgcctgtttgaatcaatgctcagcgagtgtcgggacgccatccaggtggttcgggaggagctcaagccagatcagaaacagagagattatatccttgaaggaganccagngaaggtgtctaatcttcaatacttgcatagctacctgacttacatcaagctatcaacggcaatcaagcgtantgagaacatggccaaaggtctgcagagggctctgctgcancagcagccataggatgacn

SEQ ID NO: 702 - DNA, 765 bp, Homo sapiens
  misc_feature (673)..(673): "n" may be a, t, c, g, other or unknown
  misc_feature (693)..(693): "n" may be a, t, c, g, other or unknown
  misc_feature (697)..(697): "n" may be a, t, c, g, other or unknown
acgccggcgctcccaggccgcgcttcctgcgtccccaacccggtccctgagagggcactgcgccctctccaccactgcgttccctcggctaagaatcccccgaaccccagccccgcgatcgcggcgcccaccgaggaggccgcccgggtggggcgcgggggtcgcgaagcccgcagccccggaccgcccagccgagacggagccggacccgccgcctcccgggcccttccaccgcagctatccgcacgggaggcctcgcgattgctcggaaccatcccgcaggagttcagctgatattttctagtgtggggcgagagattttgtggagcgcatttaaggggtttttgttgtgactgctgccttgtatatatttattttctttcttggaactgggcctcgccctcctcccactgacatgatggcccagtccaaggccaatggctcgcactatgcgctgaccgccatcggcctggggatgctggtccttggggtgatcatggccatgtggaacctggtacccggcttcagcgcggccgagaagccaacagctcagggcagcaacaagaccgaggtgggtggcggcatcctcaagagcaagaccttctctgtggcctacgtgctggtcggggccggggtgatgctgctgctgctttctatctgccttgagtatcangggattaagaaggaagcagncggnaggggccgaggaaccttgggcccaatgttccaggcaccccgaacagggcgcctttgggggcctttacc

SEQ ID NO: 703 - DNA, 785 bp, Homo sapiens
  misc_feature (147)..(147): "n" may be a, t, c, g, other or unknown
  misc_feature (725)..(725): "n" may be a, t, c, g, other or unknown
gaatgtaccgccactctgttagctcacaaggaaaataaggaaaagccaggcctcccacctcttgactcttgtgagagtgaagacaacatggggcatttagaaaatatatttttagtgtatgataatgtgggctggcccacacagcantgagcccaaagaccccctcgctttgggaattattcatggccctgctcatcacagcctctgatatgcatgactgtaacctaggctgagccaagaatggagctcatgccagaaatggtcctaagcatgcacatggccccctggaatatcaaaatcctggggagaaagaaatcatctttgccttgggcagtgaagctggaatggcacatatctatctgttgccacatctcctgcctagtggagaagccttggaaggcaacagacactgagcaagcagcagggaggagaatgtcctggaagggcaggactctacccaagtccctaacatccccagactcttctcttccataaactctctaattactctgctgtttaaatcctggttttggtcaagccagtcaggttgcataaagaatatgaatacagtatgcatcaaagttgcttcccagaacaggaagcaaaacatacaaacaaacaaacaaaatactgatatcagtacccagggtgcccaattaggtcacacccagtggctgcattgcagcccctgagctcctgctgcaccgtgtgtcctgctgcccgantgggccccaccctgggttctgaagatgcccttcttaatggagagctcccgatggagggct

SEQ ID NO: 704 - DNA, 783 bp, Homo sapiens
aactttgacccaaagacaacctcttctctcccgcttctctcgctgtgaagatggcgctctccagggtgtgctgggctcggtcggctgtgtggggctcggcagtcacccctggacattttgtcacccggaggctgcaacttggtcgctctggcctggcttggggggcccctcggtcttcaaagcttcacctttctccaaaggcagatgtgaagaacttgatgtcttatgtggtaaccaagacaaaagcgattaatgggaaataccatcgtttcttgggtcgtcatttcccccgcttctatatcctgtacacaatcttcatgaaaggattgcagatgttatgggctgatgccaaaaaggctagaagaataaagacaaatatgtggaagcacaatataaagtttcatcaacttccataccgggagatggagcatttgagacagttccgccaagacgtcaccaagtgtcttttcctaggtattatttccattccaccttttgccaactacctggtcttcttgctaatgtacctgtttcccaggcaactactgatcaggcatttctggaccccaaaacaacaaactgatttcttagatatctatcatgctttccggaagcagtcccacccagaaattattagttatttagaaaaggtcatccctctcatttctgatgcaggactccggtggcgtctgacagatctgtgcaccaagatacagcgtggtacccacccagcaatacatgatatcttggctctgagagagtgtttctctaaccatcctctgg

SEQ ID NO: 705 - DNA, 815 bp, Homo sapiens
  misc_feature (757)..(757): "n" may be a, t, c, g, other or unknown
  misc_feature (804)..(804): "n" may be a, t, c, g, other or unknown
agcatcgagtcggccttgttgtataaaattgagttgttggcatgtggttgtggtgagcagaagcagttattatacattacttggtaaaattcatattcatatcttgtcataaattttaaacaggtcttctttcattttcctttacagaaaactgtaatactgcatatgcattttcaaactatgcatatttcttcttcattccatgtggaagtttttattcagcctttcagtaaattttacttagcttgtcccatggatgccgtaggtgtaaggaatatgatagtgaacaagacagacagagctcctcccctcagggagctttgccatgatacacgatgatgacaatgataaaaggagcaaataatgatttgggacctgattccaaagggatatttctgcgacacttacaatgaaattccaacctggcaccatctttttcactgcagaatgcatggaggtggttgcatcatgtcatttcgacatgcatttaaatgtaatgaaaggcacaagtagtgattgcaaacactacaataagttgcttgttgactctcttactgtcttccttcttatctccctttcttcctttgtctcattctcagttttcagagcttagtcattatttcgtaatcctctcctaaaatgaaatctggagctctaaggacaggaggcacaggttgtgtttgaacagcatcatcgtgctttatgaaggggattggaggggagattctgccccacagtatggcaggtctcgctccangcagcactgactacattggtgctggttgggtaactgtggctcggcangtcactctccc

SEQ ID NO: 706 - DNA, 808 bp, Homo sapiens
  misc_feature (674)..(674): "n" may be a, t, c, g, other or unknown
  misc_feature (721)..(721): "n" may be a, t, c, g, other or unknown
  misc_feature (787)..(787): "n" may be a, t, c, g, other or unknown
  misc_feature (790)..(790): "n" may be a, t, c, g, other or unknown
tatatatggattaaggatttaaatgtaaaaaaagaaattataagagttccataccgaaatgcaggtttatatttagtaaaatagtcaagaaaggttttttttttttttttaaaaaagcataacatcaaagcctaaaattacaaaggaaaagagtggaaaattcatccccataaatattaaaaactagtgtgttgcaaataaattcaaaagataagggaaatactggggaaaatatctgaaacatgacagagtgtcattaatatatcatgggcttttacattttagaaaaaaatgacggatatctcactagtgaaaagactataggaaatgaagaagtaattcacagaaaaagggtcaactccatttatcagagaaatgcaaatgaaatcaggattgcattcttcacctgtcaaattggcagatgcaacaatagctggtacttactgagccctttctgtgttagctactagtctaagagttaccaccactcatacatatgtaaaggctaatggagttgtaaatgtaacttttgaggactttattgtatgtatgcgtattagtctgttctcacgctgctaataaagacatacccgagactgggtaatttataaaggaaaggaggtttaatggactcacagttccacatggctgaggagacctcacaatcatggtanagggtaaaggggtagaaagtcatgtcttacatggcagcaggcaaganagctcgtgtaggggagctcccctttttaaaaccatcagacctggtgagacttattcacatgagacngcnttaggaaagacccccccc

SEQ ID NO: 707 - DNA, 803 bp, Homo sapiens
  misc_feature (797)..(797): "n" may be a, t, c, g, other or unknown
aggggcgggcgcgccgctgcatccccatcctcgtcgtcgcccggcacagcgcgagcgggcgagcggcgcgggcggccggagcgccgaggcccggccatggccaccaccagcaccacgggctccaccctgctgcagcccctcagcaacgccgtgcagctgcccatcgaccaggtcaactttgtagtgtgccaactctttgccttgctagcagccatttggtttcgaacttatctacattcaagcaaaactagctcttttataagacatgtagttgctacccttttgggcctttatcttgcacttttttgctttggatggtatgccttacactttcttgtacaaagtggaatttcctactgtatcatgatcatcataggagtggagaacatgcacaattactgctttgtgtttgctctgggatacctcacagtgtgccaagttactcgagtctatatctttgactatggacaatattctgctgatttttcaggcccaatgatgatcattactcagaagatcactagtttggcttgcgaaattcatgatgggatgtttcggaaggatgaagaactgacttcctcacagagggatttagctgtaaggcgcatgccaagcttactggagtatttgagttacaactgtaacttcatggggatcctggcaggcccactttgctcttacaaagactacattactttcattgaaggcagatcataccatatcacacaatctggtgaaaatggaaaagaagagacacagtatgaaagaacagagccatcttccaaatactgcggtgntcaaga

SEQ ID NO: 708 - DNA, 799 bp, Homo sapiens
  misc_feature (776)..(776): "n" may be a, t, c, g, other or unknown
tatatatttaattatattttgccatgcaaaacatccaaataaatgtttagattgtgttcttgttcttttggaagctatatttcttcaaaacaaattattaaatagttttggaatgtgggatgttataattgcttattagtgacatcatccatccatggcccagtaaacacaacattctctctctttttttttttccaaattattgtgtttcatagcaattctcgtaaactttaacaaaatatgcttctcataaaccttaacaaaatatacttccccaaattcaagctaaaatgattaattttataatttcagtatctaataccgaaaataaccttttcccaattggaagatagttgtatgtttgggctaagtcacagagcctcttagatctggcctaccagatctaaatttcatctgatccacagttctggtgatgaaatatcactcagccctacccgctgttgaatggctgtgttgcagggaacttgtgatcacagagccaccaggcaggcacacatgctgccagatgcctatgcagggagcaccgctccagccacctgctttggtccagaggctcgcagaaaaacagcatcatagcttttgtttctctgacggactaattttttggatttgagtgtctatgtcgactggtcagaggaagaagagtcagaaaaacagcctgagcttcggtttaaaaactgtcagttttcacaacagtgccagtctgatgtatgctcaccggagaacatgcagcatggcctggcttccttcctctncgggcacacctgctattcctcaa

SEQ ID NO: 709 - DNA, 799 bp, Homo sapiens
  misc_feature (692)..(692): "n" may be a, t, c, g, other or unknown
  misc_feature (768)..(768): "n" may be a, t, c, g, other or unknown
  misc_feature (784)..(784): "n" may be a, t, c, g, other or unknown
  misc_feature (799)..(799): "n" may be a, t, c, g, other or unknown
taaacagggaaatgtctattgttttttccaatcgagaaaccaaataaaacgtacaaatatctcatgagctttcctcagactttcccagaaagagtttatatttgtgctgagacaaagcacagagaagttgcaacctcaaatggcttggagacagttcacattgaaatagctgaagagttaggtaaatctgtagaaataagacttccactggattaagtgtgaagaagaaaatatgactttgttttctctgtgttatagcattctacagtatcataaactccaatggagaaccacatttggggcgtggctgaggtggggctaatatggtagcatgtgctaaactctttctaggatattctattgcctctgagcttatacccagctccattatctatatcagctttttgagcttaagtcttcatggcaactgccagctaaatgctcggaaaaaaaccgtttggagtctacccccttctcctaatttatttctcctctaaatcgtggttcactggtgccagtcatggcagagggtgatcttcttaggatgcaaattagataatcttcataacataaagccctaactttttaccttagcccggaagagccccacatgatctgaactccagcctggaaggattaaaaaatctttttgatatatttgacatatttatggagtacatgtgaagttttgntatatgcataaaatgtgtaatgatcaagccagagtattcagggtattcgtcacctgaacatttatcatttctacgngttggggcattgcagntctctcttgtagctn

SEQ ID NO: 710 - DNA, 805 bp, Homo sapiens
  misc_feature (785)..(785): "n" may be a, t, c, g, other or unknown
ttctgagcaccataaatacaacagacatggaaaccttttctttctttattttttttttctgcacagaaaaagaaagaataaaccttttctttcttttttccattacagggatgttatcaagtggctggtcaaagcagtaactgaagatggattgactcagcccccaaatggaaatcaaacgtcttcaggaacaggaatcttgaaagccagcagtagccacccttcttcccagcccaacctgacaaagaacaccaatcagctgtaaggggcaggcagttctctttcctggggctcttggggtttagtgttttagagagaacaacaccaatccctaagagcagcttcccccaaattaacaagatcttagaacataggctgatgcttattcaagacttagtttaactagaggctaaatttctgatttcaaaggcagaacaaaaccaggtgctttcacccctaaaatgaataggacttcacaaagtgaatacgaagtcacaacgcagatgcaaaacaaatgctagaggacactgcccttcacttcctgcatttcaggagacagtaaagggttacagctcctcatcacttcagatatctgttgccatagagaaggagtggtgtgtagtgtgagttttgttaacctcgagtcctcaaggacctgggtttctctcctcaggtcccgggagaaaaatagcattcagcctgcaggttccaacacaccagggcaggtatcatcaccgcagactgcactggaaagaaattcatggcatttcttttatggagttganagtggtcttggcgttttttg

SEQ ID NO: 711 - DNA, 800 bp, Homo sapiens
  misc_feature (746)..(746): "n" may be a, t, c, g, other or unknown
gtatagtaaccactgaactagagaagtaatcttttttaaatggtatggcatttactaagtagtcattaacacctaatagatgatatttagtgtgtgtgctgtgtggccgtcaccgccgtcagtcatcactctgctttcttcctgaactgtgttgtttcggaccccatgggtgagcagtctgagggaatggctcccgtgtcttcatctacggtcagttctgtaacgaaaacttctgggcagcagcaagtgtgtgtgagccaggccaccgtgggaacctgcaaggctgccacccccaccgtcgtcagcaccacgtccctcgtgcctacaccaaaccccatctctgggaaagccacagtatccggtgagttgcattgtgatattatttctctctcttttctctcattgggctggaatatttttgtttgtttgtttgagatagcgtctcactctgtcgcccaagctagagtgcaatatcacaatctcgactcactgcaacctctgccttccaggctcaagccatcctcccacctcagcctcttgattatcagggaccacaggcacatgtcaccacacccagctaattttttgtgtttttggtagagatggggtttcaccacgttgcccaggctggtgttgaactcctcaggtcaagcagtccacccacctcagcctcccaaagtgctgggattacaggcgtgagccactgtgcccagctatttttttggagggcttaagcaatattttgnatggtaaattggtaaaagtaattaacccagcagcattttctgacagttgctttt

SEQ ID NO: 712 - DNA, 797 bp, Homo sapiens
  misc_feature (757)..(757): "n" may be a, t, c, g, other or unknown
  misc_feature (762)..(762): "n" may be a, t, c, g, other or unknown
  misc_feature (772)..(772): "n" may be a, t, c, g, other or unknown
atgatcttatttaatttaattgttatttgtattctatgaagtaagctatacacacactgttcagatgatgaacctgaggcttaaggtagttaattgctccagatcactcagctagtaagtactgaagctgatatttggacagatgcctgactccaaagtcatgctcttaaaatgcaaatgatgaatatacatttgcattctttattccaaaaaagattttgttctttagtgataaaaatcatgaaaaccacttggtctattgctccataaatctgcttaatcagatattattattgcctcactaactctcctttttaaaagaagatccaaagatgataaaatataaggacaaaactaagtaagcttctcttaatggaaagtaaaaatgtttcaattttctcccttgtgttttaagctgaagaaagcccttgatgaagctaacttcagatcagtggaagtgtcccggaccaaccgagagctgcgacagaaacttgcagagctagaaaaaatactagaaagtaacaaggagaaaataaagaatcaaaagacccaaattaagctccacttgtcagctaaggcgaataatgctcagaatatagaaaggatgaaggttgtatgggaaacctcttctcacttcctggataccctgtgaggatgtagtcagtcaatggtgtctagggaagacaggttttagaaccctaccagccccatgtattctctgggaatatagccagtggctttggggagacttttcagnggagncactgtgggnaaaggttggattcccattgctgcca

SEQ ID NO: 713 - DNA, 818 bp, Homo sapiens
  misc_feature (764)..(764): "n" may be a, t, c, g, other or unknown
  misc_feature (789)..(789): "n" may be a, t, c, g, other or unknown
aaaaactgatgaaggaaattgaagaagacacaaataaatggaaaggtatcctatgttcatggattggaaggattaatattattaaaatgttcatgctgcccaaagcactatatagattcagtgcattccctccaaaatttttaaatttaatgacatttttcacgaaagcagaaaaaataatttttaaatatacatatttcagaatacattgttcacaataaagatatatgattttttgtcagttaaaagttaatttttttaaaaagatacctatagcctcttattgaggtggaatctgttgctcttggagctacgtactgttgactttggttttctggaaacatcagtgctatttagaacattaggatatttttctttttgaatatcaacaaaaacataaataaaaatactagtaatgacatttacagtatgtttcacagattaatcacatctctgagtgggagtctttatctgttgtaggatctactcttgccattctattctgggttttggttgattagtctttcttgaacacttccagaaattggagatgtatgcctgccttaggtagcctagcttattttattaatgaacatatccatttaaaaatttcttcctggtaatgagtctaaacttgccttcctgtaatttgtatccactggtcctttttctttggtctccctcttgcatatgccagtacttcaatagctggtcccagctccattgacgccctctctcaggatcacacatcacaggtccttcanaatctcctaatggtctctctgactncagcaacacactctctacctttctatgct

SEQ ID NO: 714 - DNA, 822 bp, Homo sapiens
cctctccccccgggctccgcccaccccacgccgggaacccacgcgggccactacaagcccgccctttcctacgtctggtccagtcggtcttcctccggcccgggccctggcccagctagccggccatggaaggtaatggccccgctgctgtccactaccagccggccagccccccgcgggacgcctgcgtctacagcagctgctactgtgaagaaaatatttggaagctctgtgaatacatcaaaaaccatgaccagtatcctttagaagaatgttatgctgtcttcatatctaatgagaggaagatgatacctatctggaaacaacaggcgagacctggagatggacctgtgatctgggattaccatgttgttttgcttcatgtttcaagtggaggacagaacttcatttatgatctcgatactgtcttgccatttccctgcctctttgacacttatgtagaagatgcctttaagtctgatgatgacattcacccacagtttaggaggaaatttagagtgatccgtgcagattcatatttgaagaactttgcttctgaccgatctcacatgaaagactccagtgggaattggagagagcctccgccgccatatccctgcattgagactggagattccaaaatgaacctgaacgatttcatcagtatggatcccaaggtaggatggggcgccgtctacacactatccgaatttacacatcggtttggcagtaaaaactgctgaacttggtctcaagatgtggaactgtggagaaattctaggacatgaacaagctatcctttcatcgaggacagcaaacatt

SEQ ID NO: 715 - DNA, 820 bp, Homo sapiens
  misc_feature (772)..(772): "n" may be a, t, c, g, other or unknown
  misc_feature (809)..(809): "n" may be a, t, c, g, other or unknown
  misc_feature (813)..(813): "n" may be a, t, c, g, other or unknown
ctttctttataatatttgtgatgatggaaacaaaagccttggaacaattgcactttaagtattacacagaagtaaaagaactacagaaaatgtacagcaagacaagtgcccggaagttcactgatccttcagaaggaaatgcgctttactgattgcaaagccttcagaatattggagtgtggtgtgtttgctcatctgatgctttttagttcagttacatgtaacatcacattttttttatcacgtgaaagatgttagatttgtttgcttataaattttttaccactcccacataaaatgctcatagtttgggagaggaaagagggaagattctctcttcttttaacagagagatgattgctctgtatacccattgcttcctccctgaggctgtcccaaagtgaacactgatggagtggtcaaaatcataagattgtagcaagccaaagatacgtatgtgacggaagcacataagcaataagcagaaaaccagaagtgcatgctgtgatgcctgtgactccttcatcccgctcagtgccatgtcctcttttgtgatcttccagaaagctccaggattcatttgagttccacatccaagtaacagatgaattatattcatgttgtaatgcattttgtggagtttacaaaaccggtgtctgttaaaactttggaaaatgtcttagaaaacgttggtgcttggtgatgctttatttggttaattatcaagaacaaattatggcaatgctagtttctgcttaccaaaatactctgngtatatattatacatatataaatacctgggaatgggnatgnctatatg

SEQ ID NO: 716 - DNA, 816 bp, Homo sapiens
  misc_feature (742)..(742): "n" may be a, t, c, g, other or unknown
  misc_feature (775)..(775): "n" may be a, t, c, g, other or unknown
aaaattaataataaatgtctaagctattctgctgccacaatgtggccttactgctccctgatatacggtgcctttctcctcccttgtttcattctcttcactttcttcttccagatgctcgtacacccagtccccctacctgggaaatcacaacctcattaagagctcagctatcttaagtcctatttcctcatgaagtctaactcaactgctgcaacttccgagtagcaattaaatcagctccagcataacctcttttttcccttgtctcctgtgttagtattatgtcactaactttgtggggacaaggtcatataacactctagagcatatcagaatgacagaacatcttcagctataacctacctagataccaatatttgcccccaaggcaatgtttgatttttattccccattatgagaaacaaactcacccctccaaacccaaagaatggactcagagacctggagaacagcgaaagtgagacttttaatgatgctcttgtaatattgggtgtctggcagcaggcacacccagcacagtttcaacaagcaatttatcccctagtgcacaggtgcctcccccagttcctcatgggctgtgtattatggggtcacaatcttcccggacattgcctattggcgttgggtaggggcttcgggtgttttctttaaggttgcctgctgcgtttgttgcagcccacaatgcattgcaatcctagttagctcaagggctcttcangtatttgacttatgacttaagtagctggggcangctgataagaacaggcacacgagctattttgcagttggaaa

SEQ ID NO: 717 - DNA, 777 bp, Homo sapiens
  misc_feature (455)..(455): "n" may be a, t, c, g, other or unknown
  misc_feature (748)..(748): "n" may be a, t, c, g, other or unknown
  misc_feature (768)..(768): "n" may be a, t, c, g, other or unknown
  misc_feature (776)..(776): "n" may be a, t, c, g, other or unknown
ataaaatgggtacattatgggcagtgtaatacaagctttcttttcattgcctagtactttaccagcagaccacagttttgccctggctagaccaaccctcagaacaaaatcatcattccttgtatttatatttgtatctgagatagtaaacaagatggctggccaggtcaacatggcaccttaacttatttttttaataggtaaaacttcttcaaaagtagcttgcttgtataagaactaagctatcagtatagatatagctatccttggagcttatgtttcagacaggaattatttactaaaataaataataaacaagataatgcattatacaatttgggcatttctcgtttctcaagtgtatgcatcatggtaaatataaactaaccacaagataggtagattgattcatttcattttaatctccttgtgtaattcagtacctccataattgntctaatcttcttcccactgtttacaaattaccagttaattaactcgtgaaagaaaaattcacatatcagaataaaaataaatgtatactcactttataaaaatcaccactgctgtctttccttaatactagcagtggaaatgtaagtggcttactctacaaattttggtgctggcaaatacataggcaaactgttgggagctgctctagttacattcctcccttcttattccctttttctcttcctcactttattgcataacatattcctgtcccaaagcattctaccacagntctatttgactcccacttgnaataactnc

SEQ ID NO: 718 - DNA, 819 bp, Homo sapiens
agagaagatcaatagagaaatccactgaggttgtgccaaagaagaagatcaaaaaggagcaggttggcttcctacatgtagagagttaaaacattgtatttgtaaatgttgtggcttacattcctgtcttaaaagaaagagaaactttcccccacactgagtttcctttctggactatcttaacgcttctgtcctggtgggttccagtgctcagttttaatacagccatccctgtgattctgcttcaagcattttcacagaaaacaggtttcaggagatgggaagccagtggtgcaagacttaaaaaatccttcacatttatttagaagtttctgttatcagcagaatgatttcatgtttttatgatttttatttggaaccatcattgagttcctttttttttttttaagtttgatttttggtttaagctgctggtatatattgttttttattttttaaacaaatcaatttaatttatattcttatatttaagaagcagatattcatagatgatctgttttttctgttaatatcgcagattttttggaatgttattttcccagtggaatattcacctgatatcaggttgtcagataaataatatttaggtaaaaaaaggtgtgtggggggggttgcattttgactgaagtgtattaaaccagtgtaatcaatgtagtaagatcatttaaatcaacttttcaaataaaattttagaagccattcttctttaaattaaactcacaatcagattttttcttaattttttggtaaagaatatccattcttacagcctaaaccctgctagcaaacaaaacaaat

SEQ ID NO: 719 - DNA, 818 bp, Homo sapiens
tttgctctcagcattgtgttagaaaataaagccagcagacaaggattaaaccctcatgttgctgggttccttctagaaacaattggagggctaaccaagtcacctttggtggaaggcagtaaggtgagtcattgctgtggctggactgaataggatagccttagctgtaaaattgggctgacctttcaaatggactcatgcttgccgaatgactcacgctcctgtttacaaatcagctctgtgaagaaatgcagagtgggaggctctgcttgccagacggagaccttagacctccaggggtggagaacggagtacttcctctggtgctcggcttcccttcctgggggcagatctctcagcttctggttggtggctctcaaaatccagacacaaggtcagctgcagccagcgtgggccctggagtagctccagttatggggcagcaatggccccctctcattttgagagctcactttgcctgtggatggttttaatccatctggataaacttgaggcccatgggaataccatatactatggtaaccatgtacactgctctaaagatgtggctgctgttgtataactttttcctttatttttgtcaatttcctattttccagagtcttgcatacccactatgtctactgtgatagtgaacgtaaaaacatacaagatgttggtgttatcctcaatctcttattcttaatcctgaacaaattacatgaaaaaatcgttcatggagtttttcttcatataaaactttttacaatgaacataaagggcatactatttctttttttttaaaaagaacctagaat

SEQ ID NO: 720 - DNA, 819 bp, Homo sapiens
  misc_feature (744)..(744): "n" may be a, t, c, g, other or unknown
gtgttagaatttctgtcccaaaaagacaaagagagaatcaaagaaatgaagcaggcaactgacctgaaagcagctcagctcaaggccaggagtctggcccagaacgctcagagcagcagagcccagctctcccctgcagcggctgctgggtactgctcttggaacatggcattaggtggtgggacggccaccttaaaagccagcaacttcaagcctttcgccaaagatccggaaaagcaaaagcgatacgacgagttcttagtacacatgaaacagggtcagaaagatgctctggaacgctgtctggaccccagcatgacggagtgggagcgaggccgtgagcgggatgagtttgcccgggcggccctgctgtacgcatcttcccattcgaccttgtcctccaggttcactcacgccaaggaggaggatgactcagatcaggttgaagtccctcgagaccaagagaatgatgtcggggataagcagtcggctgtgaagatgaagatgtttgggaagctcacccgagacacgtttgagtggcaccctgacaagcttctatgtaagagatttaatgtccctgacccttatccagattcaactttagttggcttaccaagagtgaagcgtgacaagtactcagtcttcaactttctgacgctcccagagacagcttcttgccaccactcaagcatcaagtgaaaaagtatcacagcaccgaggtcccgacaaatcaagaaaaccatncagatgggatacctctaaacacgaaaagaaagaagattccattagtgaatttttaagtttggctagatcaaaacc

SEQ ID NO: 721 - DNA, 825 bp, Homo sapiens
  misc_feature (677)..(677): "n" may be a, t, c, g, other or unknown
  misc_feature (684)..(684): "n" may be a, t, c, g, other or unknown
  misc_feature (692)..(692): "n" may be a, t, c, g, other or unknown
  misc_feature (793)..(793): "n" may be a, t, c, g, other or unknown
  misc_feature (797)..(797): "n" may be a, t, c, g, other or unknown
  misc_feature (800)..(800): "n" may be a, t, c, g, other or unknown
tcccagcgtgcgcggggcccgcgggccgggccggggtgacctgggctgcagccatggaagaacagagggaggccctgaggaagatcatcaaaacactggctgtgaagaatgaagaaattcagagctttatctactccctgaaacagatgctgctgaacgtggaggcgaactcggcgaaggtgcaggaggacctcgaagcagagttccagtccctcttctccctcctggaggagctgaaagaaggcatgcttatgaagataaaacaggaccgtgccagccgtacctacgagctgcagaaccagctggctgcctgcacgcgggccctggagagctccgaggagcttctggagacagccaaccagactctgcaggccatggacagcgaggactttcctcaggctgccaagcaaatcaaagatggagtgaccatggcccctgccttccggctatcattgaaagcgaaggtcagtgacaacatgagtcacctcatggtggacttcgcgcaagagcggcagatgctacaggcactcaagttcctgcctgtgcccagcgcacccgtgatcgacctggctgagtccctggtggcagataactgtgtgaccctggtgtggcgcatgccggatgaggacagcaagattgaccactacgtgctggagtaccggcggaccaacttcganggcccgncccggctnaaggaggaccagccctggatggtcatcgagggcattccggcaagacagagtacacccttgacaggtctcaagtttgacatgaaataccatgaactttccgngtgnaangcctgtaacaaggcaatttcaggaa

SEQ ID NO: 722 - DNA, 818 bp, Homo sapiens
  misc_feature (670)..(670): "n" may be a, t, c, g, other or unknown
  misc_feature (768)..(768): "n" may be a, t, c, g, other or unknown
  misc_feature (780)..(780): "n" may be a, t, c, g, other or unknown
ttccaaaatgattccattccattctagaaatttgaagtatgtaacctgaaatccttaataaaatttggatttaattttataaaatgtactggtgatattttgggtgtttttttttaaatgaatgtatatactttttttttgaagagtggagagtagtgatgtctagagggagctattttgtgctgaggccactatgttctgtaaatatataattttaagagcaacctcacaatccctgctaagtggagtttattatttgaagactaaaatggaattccatagttcctgataggttatattctgagttattattctgagttatctacaaacatttttgagatttgtctttacactctgattgtagtttccagcagcccacgcacactgccaagtaagtctcattttttcctgttagaaatggtgaaatatcatataatcacttataaagaaaactgatatgaaaaaattttagagttgtttgctttatggtcactcaagtagggtaagtgttccacaaattccacaagttgatagtttaacatggatgtctgaaagccacatatataatttcttaggattcttaaattagtaaatctagcttactgaagcagtattagcatcactattttagattgcaaaaataccttaattgtgtggaactggcttgtanagtggtacttaagaaaaatgggattctacctctatttctggtttagcacacttaatcaggaaaggatatattaactttcataaaaatatttttggtgngtgaatagggtnatgatatgggaaggcccctaaaataccggattaattgt

SEQ ID NO: 723 - DNA, 818 bp, Homo sapiens
  misc_feature (742)..(742): "n" may be a, t, c, g, other or unknown
  misc_feature (749)..(749): "n" may be a, t, c, g, other or unknown
  misc_feature (781)..(781): "n" may be a, t, c, g, other or unknown
atgatcattgcctgcctgactatgtaagattcttgttgggagcttaagaatagattcctgagctaggcctttggagactctggcatgctgtgtctaggagggagtctgtaaaacaatttttaatgaagaaatttaaaaattacacaaaactagaatagtgcattggtactcaacatccagatctgacacttatcactatcttaccatgtttgcttcatttgtcacttttttgtttgcttaagtatcttaaaatcccatacattgtgttatttcactgctgtgaacactttgggtagataccacgatatcacacctaacagaggcagcagcagtccttcggcttcatctcatagccagtccttaagcaaatttccctgattatctcaaaaatcatcttctagttggtttgttagaatcaacagaatataagtcacatgatgatttcgtttttaacaatcacctcagatgactttgatgttagctactttgagaaccactggaaattattttgccaacttgaaagttcaagttaggataccacaattcttggcacgtttggtggattataaatgtgattttgaaatattagaggaagcatttggggttaatgacaggatatgaatttatattagtaagtttgataagataaaatttcctcagtgaacggagaatctcagccccatgggctctaattgattgggacttgtgtaaagcgtggtccagtttaatccaactggactgnatgctgnggtctcactcatggtggggcttatttacctgncacacacactacattgggggatcaagttggaaggtct

SEQ ID NO: 724 - DNA, 825 bp, Homo sapiens
  misc_feature (719)..(719): "n" may be a, t, c, g, other or unknown
ataaattaaactttatcatgggtatgtatataggaaaaaataatagtttgtataaggttcgaatagtttgtataaggttcggtactatccacagtttcaggcatacaccgggggtcttggaacatattcccctcagataagagagaattcctgtgtatggaagagactcctcagatacagcttctcttcaactgtaaacctatgaattaaaaaaaagttattggtcctatccacccccgcacatacaacctacattgttatggcaaggatacgatgtcacatgaattgactaagtttacaagagaggaaattgaaggcatgtagcaatcccatggcagttgtgaaatccatctgcctatatgtcaccaattcccccaattccaggggtagggaacatttgattagtctactttggttctctgaagttggctcccttttctttttctcagttcttgacttttttctttgagctgtctttccttttccatgagaaatgtcctctttttgtagctttctcagcctgcttctaggctctgtcccaactggcacagttatccacactggcacaacttctttaaaaagctttgtggactttcaaattataaaccactcactccaccagagagaagccacacccacaaatttcttcaagaagtcctctatgtactttgaatgtcaatcagggaatgataccctttagagtcatatatgtcttttgnctacctggagagccgtcagctagacactggcttaaatctttctgaagtaccaggtgggtccgtcactttatgatgggtcaacttagaatcttttactttaggatgg

SEQ ID NO: 725 - DNA, 820 bp, Homo sapiens
ttaaaaaagcctcgttagaatttgctattcgaaaagaccttaaaaaccctcacagagttctaaacatcccattcattgaaaatacttttcagttaagtagatttgttttgtgcacttcacaacttttaggtgacatgaatttgaagcgtagcaaaagaaatgtataaagatagccttttctggtcattaccatgtctactcaagtttctgttttctaggtacactctagcattgtaactttttccccctgagaagtaattttaagatctatcagtctcaatttaaatgatctgttaatcagccagagttttagtttcataatatcgttccattgcctgacaaagatatacacactgaagtgcctttagcagacctgggaccgtcaagaatcttgttaccctgattattgcaagatgacatatttcttaagccatttataatctcatattcgggttgaatctgtatttacaaataaaagggttaaattgaggcagtttcaagcagcatttaggaaaatgaagtggcttcaaattttagtgtttctggttacattattttgtttgaattatacaattacataattttctgtaaccaaaatggtaattttgatggattttttaaatgccaaaatccaatcatcaaggccaaagaaatgcatgattactctgatttcttatgcaccattcagtcaagacttaactcagaggcagttgattcagtgcttacatctagacaaagctttaatgagtgcagacccagcctaacagtatttcatctaatttctttgatggcttaagccataagcactgaggtagctttt

SEQ ID NO: 726 - DNA, 643 bp, Homo sapiens
  misc_feature (641)..(643): "n" may be a, t, c, g, other or unknown
acaagtattatggacacacttgaccgtaaaggcacaggagcctcggaacaagggggcgcaataaagggaatggcccgtccccttccagaaccagcccaaagaagcctggggggtgaggagtggcccccactcctccatgaggggctgatgaggggtgggcagcctgggggaggctttcctcgcaagcacagagctctgaggctcagccccctggcacaggcggtcacgcatcaggacggttcctactcctcagcaccttccgtgcagttaccagtgccctgggaggtcacactgcccgtcggaccttggcatgctccattcagctgacctgctgaggacaggcatcgccgagactccttgggtcctccccgccctccctcatgctgccacaagctgctgctccaaggcctggccacatgcagacaggaggaagctgagctcgacattaggcctcaaggctgccatctgtcttgtagggcctggccttgtgggcagggggcagtcctgtgccttgtgggccctcagcctctgagggcagagatgctgtcagtgccgcaggtgcatcacatacttctagcatcctctccaccctgcattccaaatgctgcttgctgcctgccctgcctccgatgcaggggtgnnn

SEQ ID NO: 727 - DNA, 734 bp, Homo sapiens
  misc_feature (689)..(689): "n" may be a, t, c, g, other or unknown
  misc_feature (706)..(706): "n" may be a, t, c, g, other or unknown
  misc_feature (717)..(717): "n" may be a, t, c, g, other or unknown
gataggggagacggttggcgggcatttccgtttctatgtgactatgtgaccaaggcagcaggggcttttacctgctaggcggcagtcctttggccctgagaatttgggagagaacagtgcatcaggccaggctcagcaatatgtttgctcacattctttcagccttctctcacccccctcaacaccaaactttcttccttgtgagcagaaggttggctgctgttagcaggatcccacagtgataaccaggcccttcccttcctaagccaaaacccattgtgactgcctgtctctcctgcctctgacttctcaggcagcctcctgagtgcactgagttgtatccgagagggtgggaacagcagcatcccctaattgcagtacacggttccttttccgcccgccaccctgcctttccttgggggcagctgtctctctgtacatgagcaaatgggcaaaaacagtccccaaacccagcacccccctctccctggctgcagcccacactgtaacatccctagtgaggctctaacatatctttattaattaaaataggtcattacaatcaacacatttttgccgacaagaaataagtttgttttttcctgtaatgtaaaaatccatgcttcaggattccacaaactcttggaaagctttttcctgcatccttgcttgggttttggtgggggggnaaaaaaagcccccaaanttttttttttntttttcccccccccccc

SEQ ID NO: 728 - DNA, 781 bp, Homo sapiens
  misc_feature (670)..(670): "n" may be a, t, c, g, other or unknown
  misc_feature (681)..(681): "n" may be a, t, c, g, other or unknown
  misc_feature (712)..(712): "n" may be a, t, c, g, other or unknown
gttgcctgaggtgggtggcggtggaagttaagggagtcaggggctatcgctcctcgagactcgcagtcgcggccactgcagtcacttcgccagttagcccttagggtaggagtcgcgccggcagcagccatgagcggcggcgtgtacgggggagatgaagttggagcccttgtttttgacattggatcctatactgtgagagctggttatgctggtgaggactgccccaaggtggattttcctacagctattggtatggtggtagaaagagatgacggaagcacattaatggaaatagatggcgataaaggcaaacaaggcggtcccacctactacatagatactaatgctctgcgtgttccgagggagaatatggaggccatttcacctctaaaaaatgggatggttgaagactgggatagtttccaagctattttggatcatacctacaaaatgcatgtcaaatcagaagccagtctccatcctgttctcatgtcagaggcaccgtggaatactagagcaaagagagagaaactgacagagttaatgtttgaacactacaacatccctgccttcttcctttgcaaaactgcagttttgacagcatttgctaatggtcgttctactgggctgattttggacagtggagccactcatacccactgcaaanttcccaagttncccccaaaacccggaaaattttggggggggncccctttttaaaattttgggggtttttcccccccctttttttttccccaaaaaaacccccaaaaaaagg

SEQ ID NO: 729 - DNA, 772 bp, Homo sapiens
aattattatcactgttgcctgaatatgtagttccatacatgattcacctgctagcccatgatccagattttacaagatcacaagatgttgatcagcttcgtgatatcaaagagtgcctatggttcatgcttgaagttttaatgacaaagaatgaaaacaatagccatgcctttatgaagaagatggcagagaacatcaagttaaccagagatgcccagtctccagatgaatccaagacaaatgaaaaactgtatacagtatgtgatgtggctctctgtgttataaatagtaaaagtgctttgtgcaatgcagattcaccaaaggacccagtcctcccaatgaaattttttacacaacctgaaaaggacttctgtaacgataagagttatatttcagaagagacaagagtacttctgttaacaggaaagccaaagcctgctggagtactaggtgcagtaaataagcctttatcagcaacgggaaggaaaccctatgttagaagcactggcactgagactggaagcaatattaatgtaaattcagagctgaacccttcaaccggaaatcgatcaagggaacagagttcagaggcagcagaaactggagttagtgaaaatgaagagaaccctgtgaggattatttcagtcacacctgtaaagaatattggaccccagttaaaaggaaaaattttaaaaaaggggggaaaaaaaaaaatttttttaaaaaaaattttttttccctttgggggaaaattttcccaaaggggggggcc

SEQ ID NO: 730 - DNA, 730 bp, Homo sapiens
  misc_feature (678)..(678): "n" may be a, t, c, g, other or unknown
  misc_feature (700)..(700): "n" may be a, t, c, g, other or unknown
  misc_feature (703)..(703): "n" may be a, t, c, g, other or unknown
agcttgatggcgtcgggctggagagccgcagtcccggctgcagcacctgggagaaggcagaccgtgtgagggggcctgtggccccagcgtgctgtggcctcggggagtgggaagtggaggcaggagccttccttacacttcgccatgagtttcctcatcgactccagcatcatgattacctcccagatactattttttggatttgggtggcttttcttcatgcgccaattgtttaaagactatgagatacgtcagtatgttgtacaggtgatcttctccgtgacgtttgcattttcttgcaccatgtttgagctcatcatctttgaaatcttaggagtattgaatagcagctcccgttattttcactggaaaatgaacctgtgtgtaattctgctgatcctggttttcatggtgcctttttacattggctattttattgtgagcaatatccgactacttttgtctcctctgtctcagtgcataaacaacgactgcttttttcctgtctcttatggctgacctttatgtatttcttctggaaactaggagatccctttcccattctcagcccaaaacatgggatcttatccatagaacagctcatcagccgggttggtgtgattggagtgactctcatggctcttctttctggatttggtgccttgtccaaacctgggncccccccccaaattaaaccccnaancccttttttttaaaacccccaaatttt

SEQ ID NO: 731 - DNA, 693 bp, Homo sapiens
  misc_feature (683)..(683): "n" may be a, t, c, g, other or unknown
  misc_feature (685)..(685): "n" may be a, t, c, g, other or unknown
  misc_feature (691)..(691): "n" may be a, t, c, g, other or unknown
attaagcaattgcaatttgcagtgtgccaggcactgtgccaagtattttgcttcgatgatttcacgtcatcttcaaaacaacctcatgagggctgggtcagttagaacctaaacaaactagagacctggttgcaacccctcaggctctgctgatgctgtccccctttgttcctgcagcgtggaccctgccagcagccaggccatggagctctctgatgtcaccctcattgagggtgtgggtaatgaggtgatggtggtggcaggtgtggtggtgctgattctagccttggtcctagcttggctctctacctacgtagcagacagcggtagcaaccagctcctgggcgctattgtgtcagcaggcgacacatccgtcctccacctggggcatgtggaccacctggtggcaggccaaggcaaccccgagccaactgaactcccccatccatcagagggtaatgatgagaaggctgaagaggcgggtgaaggtcggggagactccactggggaggctggagctgggggtggtgttgagcccagccttgagcatctccttgacatccaaggcctgcccaaaagacaagcaggtgcaggcagcagcagtccagaggcccccctgagatctgaggatagcacctgcctccctcccagccctggcccttcattcacttggtggccggggncntttttncc

SEQ ID NO: 732 - DNA, 681 bp, Homo sapiens
  misc_feature (679)..(681): "n" may be a, t, c, g, other or unknown
tggttgtgtgggacattgtctttggtgatttatgcctgtgcggtcatctcagcttctcagcaacaactcatgacatacagatgcccattgggatctgtactttacagagaaaaaaaaaagctgtaaacactttaaatttggagccctgatttcttttttggaattccaagtagacctagacactagttttccaattagggttgttgtaaggtctagagttttgtatgttgtggagatgtatcatagctgagtttaggatgacaaaccaccctcccgaataggttacattgtttctttctttttttcttaattatactttaacttctagggtacatgtgaacaacctgcaggtttgttacatatgtatacatgtgtcatgttggtgtgctgcacccattaactcatcacatgtgtcatattggtgtgctgcacccattaactcatcatttacattaggtgtatctcctaatgctatccctccctgctccccaccccacgacaggacccagtgtgtgatgttccccaccctgtgtccaagtgttctcattgttcaattcccacctaagagtgagaacatgcggtgtttggttttctgtccttgcgatagtttgctgagaatgatggtttcccgcttcatccatgccctaccaaggaccatgaaacttcaatcccctttttnnn

SEQ ID NO: 733 - DNA, 711 bp, Homo sapiens
  misc_feature (630)..(630): "n" may be a, t, c, g, other or unknown
  misc_feature (663)..(663): "n" may be a, t, c, g, other or unknown
  misc_feature (691)..(691): "n" may be a, t, c, g, other or unknown
aggacccgggttgcgggagaccccaggttcggttgggattcccagccagaacggagcttaagccgggcaggcgagcgaatgacggagtagcgagctgcacggcggcgtgctgcgctgttgaggacgctgtcccgcgcgctcccaggccgccccgaggcttggggtcttcgaaggataatcggcgcccggggccgaacagcgggggcacacggggcgctgccgaagtgcaaggccacggccagagctcgagcccgacgcgctgtctggagtcgtaggttggcgccgtttggggtcggggtctgaggcttgggcgctgcctgggccgagcggagatcggggtttgcctcccgtccccgctcaggaccctgacgtggctgaagcggccccgggagcatgagcgggcagcgcgtggacgtcaaggtggtgatgctgggcaaggagtacgtgggcaagactagcctggtggagcgctacgtgcacgaccgctttctggtggggccttatcagaacgtgagtgcatccggaggggccaggcacggtgggcgggggagtggggggccggtaatctgcacctatggccccgatctcctccctctcgttgcagaccatcggggccgcttcgtggccaangtgatgtcggtcggagaccggacttgtgaacanttaagggttaattttttggggggggggnaaaaaccaaaccccccaaaa

SEQ ID NO: 734 - DNA, 759 bp, Homo sapiens
  misc_feature (620)..(620): "n" may be a, t, c, g, other or unknown
  misc_feature (702)..(702): "n" may be a, t, c, g, other or unknown
  misc_feature (722)..(722): "n" may be a, t, c, g, other or unknown
  misc_feature (735)..(735): "n" may be a, t, c, g, other or unknown
agaagggagcgagagcccctgagcgcggcggcagcggcggcctggcccttccagagggccagagccagggacatgcgggcgcccgggactccgcgttccgcgcggcccggcgcctgagcgcctccgttccccgtcccggagctgccggcggcatgatccgacacgccggggcgcccgcgcgcggggaccccacgggtccggttccagttgttggcaaaggagaggaagaggaagaggaagatggcatgcggctttgtctgccagccaacccgaaaaactgccttcctcaccgccggggcatcagcatcctggagaagctcatcaaaacatgcccggtgtggctgcagctgagtctgggccaggcagaggtggccaggatcctgcaccgggtggtggctgggatgttcctggttcgccgggacagcagctcgaagcagctggtgctctgtgtccactttccttctctgaacgaaagctcggccgaggtgctcgaatacaccattaaggaagaaaagtcgatattgtacctggaaggctcggctcttgtgtttgaggacatcttcagattgattgcgttctactgtgtcaagtagagacttactgcccttcacacttgcggntaccccaggccatccttgaggccagcaagcttcacgggccattcacacaggcggtgaaagtcagcctgaggatttagcccanaagtgatggagcccctgaanggtgtgtgtgganggcaaaaggaaaaggggacaagac

SEQ ID NO: 735 - DNA, 804 bp, Homo sapiens
  misc_feature (800)..(800): "n" may be a, t, c, g, other or unknown
  misc_feature (803)..(804): "n" may be a, t, c, g, other or unknown
gtttattaaagtatgtaattcctaaaatgcttattgaagaccttaaatctgattgttatttaaatttgtggttcagcgatattgtgttaaccactgatttcagagtagaaaaaatgcttattatttttaactttttaaagaaatggggaatgttttgtaacagtactcaaatagcacagaatatttttcaacattaaaaacatttgattgaatcctaatttagacaagccataacttgggaggatggtaaaccatcctctgaaagatttaactctttattggtttggaagtagtaaagtatacccctaaatgcctaggattagagaaataattttattcattgactctttatggaaaccaaatggtatctaactctgttccttctcagccaccttgaaggtgactattagtgtggtctttaagttgcttttagaaatcctgaagaattcagtcttcgtctatcatattcttcagatttccttttttgtttttgcagttctgaggccaaaagatgaagtttctttgccttgcctgatgtggcatcaactttctaatttttaaacatgttaccagcgcatgtctactgatcgtgtactgcaggacctgggtagacagaaacatacccacctctgccctcctcaccttccagtcagggcagcaggggatcctcatatcctctgaggcaaagcaaatggcttcactttatgtggaaatgaatttgccagtgagctttcgtgcttggttgacaataaggcatcactgagggaactaattggggggcaggtctccttgaaggaaancann

SEQ ID NO: 736 - DNA, 804 bp, Homo sapiens
  misc_feature (726)..(726): "n" may be a, t, c, g, other or unknown
  misc_feature (737)..(737): "n" may be a, t, c, g, other or unknown
  misc_feature (748)..(748): "n" may be a, t, c, g, other or unknown
tctaagtcattaaggaattgccacactgtcttccataatgattgaactaatttatactcttgccaacagtgtaaaagtattcctttttctccacaatctcgccagcatctgttattttttgactttttagtagtagccattctagctggtgttagatgatatctcactgtggttttgatttgcatttctctaattatgaagttaataatttcataattttattaaatttgatgaaatcaactcaagatggattacagacttaaatgtaaaacccaaaacctaaaaatcctagaagaaaacctaggcagtactatgcaggacataggcattggcaaagatttcatgatgaagacaccaaaagcaattgcaacaaaagcaaacatggacaaatgggatctaatcatactaaagagcttctgcacagccaaagaaactaacagagcaaacagacaacctacagaatgggagaaaatttttgcaatctgtgcatctgagaaaggtctaaaatccagcatctataaggaacttaacaaatttaaaagaaaaaaaaaacaacccattaaaaggtgggcaaaggacatgaacagacacttctcaaaagaagacatacatggagccaacgaacatataattctttatatacactgttggatatgattttttaagtattttgtcagagggtttttgcatttatgttcatgacaaataccagtctagttttcttgnaatggcattgnctgggtatggnattatggtaatgctggaatcactaaatgagttaggaagtattctctctaaattctg

SEQ ID NO: 737 - DNA, 806 bp, Homo sapiens
  misc_feature (747)..(747): "n" may be a, t, c, g, other or unknown
  misc_feature (806)..(806): "n" may be a, t, c, g, other or unknown
gaaaagcacgaactccgagccatccgcctctcacgagaggactgtggctgtgactgccgagtgttctgtgatccagacacgtgcacctgcagcctggctggcattaagtgccaggtggatcgtatgtctttcccatgcggctgcactaaagaaggatgtagtaacacagcaggtagaattgaatttaatcctatccgtgttcggactcactttttgcacacaataatgaaacttgaactggagaaaaaccgagagcagcaaatccccacgctgaatggctgccacagtgagataagtgctcacagtagttctatgggccctgtcgctcactccgtagaatattcaatcgcagacagttttgagattgaaactgagccccaggctgcagtgctgcacctgcagtcggctgaagaattagattgccaaggagaggaggaggaagaagaggaggatgggagcagcttttgcagcggagtcacagattctagcacgcaaagcttggcacctagtgagtcagacgaggaggaggaggaagaagaagaggaagaggaggaggaggatgacgatgatgacaaaggagatggcttcgtggaaggtttgggcacccatgccgaagttgtccctcttccttcagttctttggtattctgatggcaccgccgttcacgaaagccatgcaaagaatgcttctttttatgccaactcttcaactctgtattaccaaatagatagccacattccagaactncaaatcagatctctgagaactattctgaaagagaccttgtcaaaaatggtaccctttcn

SEQ ID NO: 738 - DNA, 716 bp, Homo sapiens
  misc_feature (666)..(666): "n" may be a, t, c, g, other or unknown
  misc_feature (676)..(676): "n" may be a, t, c, g, other or unknown
  misc_feature (700)..(700): "n" may be a, t, c, g, other or unknown
atcctatgtactcaagaatgcaaactgtaaatcaatacctatgacttaaaggtgacatttcaacaattgtacatcctggagcctctcaggatctcaggatcattttgttcctgtcaaatatctaactttttaaataatttatgagcatttaactccacttcttacaattccaggatgaactttcttcattttagatgtgtatgttgtcattcaaagagccagttatttattcatcaaatattattgaacaagtactatgtgccaggcactaactatattgtgcagtgtggatataatagtggaaaaggcagtcacaacctagacctgaagcttacatggggaggaagagagaataaacatcaacttaggggttgtaccgatagttgttctttttttttgtttgtctgagacggggtttcactctgtcacccagattgtagtgcagtggtgtgatctctgctcactgcaacctctgcttcttgggctcgagtgattctccagcctcagcctcccaagtagctgggactacaggtgtgtgccaccaacgctcagctaatttttgtagagacagggttttaccatgttgcccaggctggtctcgaactcctgagctcaaagcaatcggtccgcctcagcctcgcaaagtgccgggattacaggtgtgancctgtgccanacctaattggtaaattgtaattgnaatgattggtaaaaat

SEQ ID NO: 739 - DNA, 808 bp, Homo sapiens
  misc_feature (749)..(749): "n" may be a, t, c, g, other or unknown
  misc_feature (761)..(761): "n" may be a, t, c, g, other or unknown
  misc_feature (801)..(801): "n" may be a, t, c, g, other or unknown
gatgaactgttttcagcccgggtcaccccagccctggggtggaggcccattgaggatggccgagcaggggcgggcatccaggcaggtccagcagtcctggcgggctgaggagaaggaggtcagtgctcagggagacatccgcagagggacctggcaggcagagctccagaagggagggaactgcccagacagaaagctccagaaggctgcctgagggcctctgaggcctccggagtcaggcgccatgcatgtggaaggtggactcttcagcatgggtgggaccctagggggctgtggacccccggcccctgggacccacaggtgggagacaggagttccaaccgccagggggagagtcctggaggatcctgggctgttggcagccacccagcagggcccgtcctgggagtggggctggactcttcctgcaggaaaggctgggctggacctgctctgagaggcttcagaaccagccacacgaagaccaaagtgaagagcaaggagctgaactccacgcagaacacagcgcagcgtcctttaaaggaaggccaaaaacaacccaacaaaaatgccaggtgatcaaagcggtcacagcacaatgtccacatccaacgagaaattgctgctacgtccagacgcagggaaaggtgccgtgggaacctgagtcagcagcaacaggcccagaagggcagccacggtggactttgtcagacgtggaccctgaaatgacaatcacagcatgatttcangcaggagcctgnaatggtacacttttggacatcggttggcaaattcttttanagaagaa

SEQ ID NO: 740 - DNA, 773 bp, Homo sapiens
  misc_feature (704)..(704): "n" may be a, t, c, g, other or unknown
  misc_feature (733)..(733): "n" may be a, t, c, g, other or unknown
  misc_feature (765)..(765): "n" may be a, t, c, g, other or unknown
tttcctgaggaggactgccggtcgttcggacgtcttgcctgtcgctggaggagaggtccgggctctccaggaaggtggctgcggcgacaaaatgaagatattcgtgggcaacgtcgacggggcggatacgactccggaggagctggcagccctctttgcgccctacggcacggtcatgagctgcgccgtcatgaaacagttcgccttcgtgcacatgcgcgagaacgcgggcgcgctgcgcgccatcgaagccctgcacggccacgagctgcggccggggcgcgcgctcgtggtggagatgtcgcgcccaaggcctcttaatacttggaagattttcgtgggcaatgtgtcggctgcatgcacgagccaggaactgcgcagcctcttcgagcgccgcggacgcgtcatcgagtgtgacgtggtgaaagactacgcgtttgttcacatggagaaggaagcagatgccaaagccgcaatcgcgcagctcaacggcaaagaagtgaagggcaagcgcatcaacgtggaactctccaccaagggtcagaagaaggggcctggcctggctgtccagtctggggacaagaccaagaaaccaggggctggggatacggccttccctggaactggtggcttctctgccaccttcgactaccagcaggcttttggcaacagcactggtggctttgatgggcaagcccgtcagnccacaccacccttctttggtcgcgaccgnacccttttgcgccggttaacttcccgagcctnttatgtgg

SEQ ID NO: 741 - DNA, 798 bp, Homo sapiens
  misc_feature (741)..(741): "n" may be a, t, c, g, other or unknown
  misc_feature (752)..(752): "n" may be a, t, c, g, other or unknown
  misc_feature (798)..(798): "n" may be a, t, c, g, other or unknown
ctgcccaaagcacatcttcttcctatgctactctctttctgtgcttatgtgaaaccaccattttctctctggcaactcagcagccaagagaaatggctgagtcttcaaggatgaatgtgacgtggtacccaaggtcatttgatgtttctacccttaacacctgtttgtcacccttcttgcacttgagcaaaactaaactgctggtccctgtacttcccatttttcccatttatttctttcccaatagttccaccaattagaaatgtcctaattcttcccactcccttattcttcagatacatttttaagtttaggctcaaatgccacctccccagagtttcctctgatacctctttgcagctagaaatgatctgtctttctgggaactcccatagcttcatactcatatctatctatactgcttatggcacttctcactgtctactgtaccttttaactctttatatatgtctcctccgatgcgagtgtaagctccctgagattagttaacgaatcttttaagttcccgtattagatctgtcgcagtgccttgaatatacaagcattcattcagtagatatatgaatgaatggattaatgggtgatttcttatatttctttaaaatacatagaaataaagttagtaattaggtaacctatgataacataataatgtggacgcctggggaaaccctcctcatgtttgcatcttctacctctgccattttcctgcaattccgnttcctacttangcagtcagagagaacaattctaataaaaacactcctctctattaan

SEQ ID NO: 742 - DNA, 824 bp, Homo sapiens
  misc_feature (709)..(709): "n" may be a, t, c, g, other or unknown
  misc_feature (748)..(748): "n" may be a, t, c, g, other or unknown
  misc_feature (784)..(784): "n" may be a, t, c, g, other or unknown
gtattctttttcttagtgtgagctctaaaatcaatgttcttgaaaaagaaattattttgcagaagttggggaatcatgtttgttgaatatgtataaaatagaaacataggctgggcgcggtggctcacacctgtaatccctacactttgggaggctgaggcaggtggatcacctgaggtccagagtttgagaccagtctggccaacatgatgaaaccccatctctgctagaaatacaaaacattggccgggagtggtggctcatgcctgtaatcccagcactttgggatgctgaggcgggtggatcacctgaggtcaggagtttgcgaccagcctggccaacatgatgaaaccctgtctctactaaaaatacaaaaaaattggctgggtgtggtggcccacacctgtaatcccagcactttgggaggtcgaggcgggtggatcacctgaggtccgaagttcgaggccagcctggccaacaggatgaaaccctgtctctattaaaaatacagaaaattggccgggtgcggtggctcacccctgtagtcccagtactttgggaggctgaggcgggtggagcacctgaggtcaggaattcgagatcagcctggccaacatggtgaaaccccatctctactgaaaaacacacacaaaaaaattagctgggcatggtggcacatgcctgtaatcccagctctcgggaggctgangcaggagaatcatttgaacctgggaagcggggcttgcantgagccgagattgcacccctggacttcagcctgggncccagagcaaggactctgtcttaagaaaaacaaaaaaaaa

SEQ ID NO: 743 - DNA, 820 bp, Homo sapiens
  misc_feature (3)..(3): "n" may be a, t, c, g, other or unknown
  misc_feature (734)..(734): "n" may be a, t, c, g, other or unknown
  misc_feature (751)..(751): "n" may be a, t, c, g, other or unknown
  misc_feature (760)..(760): "n" may be a, t, c, g, other or unknown
ttngaacatgtaatgctactattagtaaaaataagtgtaattaatgtaaagttgtgtaacgattactaaacttgtatacttgaaatgattgaatagttcctagaagtcatttgtttctcttttatttaaaatgtagcaagtttctaattttaaatacatacatattaagagatgcatttacatttttttatttttagttattatggatacataatagttgtacatatttatggggtacatgtagtattttgatagaagcatacaatgtgtgatgatcaaatcagggtaattcagagatccgtcacttcaaacatttatcatttatttgtgttaggaacattttaatttcattcttttagttattctgaattatataataaattatagtcaccctattgtgctgttggacactagaatttattctatctaactgtgtttttgtacctgttaacctttccctctttgtccctccctccctgctccccttcccagcctcttaaccatcattgagagagatgcctatgtaaatcttaagattttcaaaaggagcacacacatttggtaaagcactctaactgtaatgcacggtacacacaatgcgcattttctctttccttgctgtaacctctggtctctcaggtccctgcagacctttatatatatgtatatgtatatgtatatccttccagatacatataaacacacatgccaccctttaaaaacacaaacggtancttattttatacactgntctatgctntgctcttttcatggaatatacttggaaggttataatcagtaagtctggaactctgcctcc

SEQ ID NO: 744 - DNA, 760 bp, Homo sapiens
  misc_feature (678)..(678): "n" may be a, t, c, g, other or unknown
  misc_feature (710)..(710): "n" may be a, t, c, g, other or unknown
  misc_feature (724)..(724): "n" may be a, t, c, g, other or unknown
atttgaggctggatgcagtggctcacgcctacactctgggaggtagaggtgggaggactgattgaggccaggagttggagaccagcctgggcaacacagtgagaaccctctctacaaaaaatacaaaaattagccaagtgaggtggtatatgcctgtagtcccagctactcaggaggttgaagtgggaggatctctcgggccagggaggttgaggctgcagtgagctatgatcacaccactgtactccagcctgggcaacagagcaagaccctgtctctcaaaaagagagaaaaagaaagaaaacatttgagctccatagattgacattctgatttgaacagtttcccatagagggagaattgcggcgaaagaggcaaggcctgcccacaatgcatggtctgggacttagctgatgaagtgctctgcaccacccagcttcgaggagatggggactggggtttccccttgcttgacatcttaactacttcactgcaggaaaggggaggagggacaagaggaggaccaattccccaagggacacggagacccacattaggttttggaacccacgcctggtactatctgaatttaaaagccttgcttgactcaggcggggctgatcaaaggccatttgctgttttagagtgttcctatgtgtgcttggcagacagagttgnctttttattgcttccattcccactaagacctncatccccccactgnccccccaaccccttggtgagcttggtgaagatgtgt

SEQ ID NO: 745 - DNA, 820 bp, Homo sapiens
  misc_feature (770)..(770): "n" may be a, t, c, g, other or unknown
  misc_feature (784)..(784): "n" may be a, t, c, g, other or unknown
gctatcctctgaaccaatttccttcggtttaatgtacctgtatcttggggtttttttccacttaatttatcctggagctctttccataacaacacttggaaagcactctcatccttttttcactgctgaacagaattccactgtgtggatggaacatactctatttcaccagtcccctgtaaccagtcacttggtttgtttccaatcttttgctttttcagagtaataaccttgtatgtctatcattttgtatgcatacaggtttatatgtaggaaaaattcctagagtaggattgctggaccaatggataaaagtatattgtggacagacaatgccaaattgcctttcagagactgtggccctgtgcaccccatcaggcatgtgtgactaccaaagctcctgtcagctgttttattttatctcctttccagtctcaggctcaatgcagaactttgaggtaagcttttctaaaatgtaggctcctaaacgccacagccagctctgccacatgaaggagagctcaaatgagacagaaacagcctctgggcaggatttctatcctgcacagatatattttccacattctgggaaaccgtgaagcttccagagccacaattccccagaaacacatccccctgtggtacagccaagccccagaacaagctgtgcttgcctggcaccttaaagccaagcaccatggatgccacttgccatgggtgcctgcaatttcaaataatgagaaattagaaatttcagcttctcagccctntagccacatttcangtgcatgacagcctcagtggcaagcagctactttgc

SEQ ID NO: 746 - DNA, 815 bp, Homo sapiens
  misc_feature (741)..(741): "n" may be a, t, c, g, other or unknown
  misc_feature (769)..(769): "n" may be a, t, c, g, other or unknown
  misc_feature (815)..(815): "n" may be a, t, c, g, other or unknown
ttttgccttgggtcaaaattatataacgcatctatatgagttatgttcaatactctgacccatcactgtattccttggagtatactttctttcttaaagagataaaggtatggaacaagaatcacagatgggctatgaacctcctgaaattgtagttcgaattatgtgtttgtgtgaatgatgcttactgtttctgattttatttgattgttgtataatgaaaatgatgttggctaatgatatagaaattaggagaagaaatattgaaaacacacacacagtattttattcatttgtccagaggacatgaaaatttaaaatggatgcatgaaagatattgattatttaattatatgttgtgtcacattatatgattgttaaaggcaatctaataaaaaaggtagagagggttaaatattaatttaaaaggctgtcacattttgaattatcttaatagaaaggtcttttgtgcaaaatgagaggcagacattattgcagaaaatgccaaaaaaagagaaagaaatttccaacaagtagctgcaaaaaaatatgtgaaattgagaatttaataagctaaatatctatttttgaaaagttgatggtaaaaagaaaggttataactagaaaggaatttagatattaataatgttttgatggaaatgcaatcagaagaggcctattattggtatttaggtgcaagacagcacaatttgatcatattgctggaaggacatggagatnaaatataatatttcttggtattttaacngagaaaaattggcctaggaagttctcatttaagaccccaagatgtn

SEQ ID NO: 747 - DNA, 784 bp, Homo sapiens
  misc_feature (760)..(760): "n" may be a, t, c, g, other or unknown
actagcggagccgcgagggagaggccgcggccccttcccgttgcctgcggccaccggccggcattcagagcccctcgcctggcgctaaatttaaaaacgtaacacgagcagcaggctggtctcggaaacgaaacgaaattcggtccctgggcctcctcccgggcgctgccggtccctcagcgcgccgcgccacccggaacagacccttctcccgccattttcggcggggctgggagactgaggcccgcggcgctgagcctgcggcgccccggaagaggcgggcggcatggccgctggcgtggactgcggggacggggttggcgcccggcagcacgtgttcctggtttcagaatatttaaaagatgcttcaaagaagatgaaaaatgggctaatgtttgtaaaactggttaacccctgttcaggagaaggagccatttacttgttcaatatgtgtctacagcagctgcttgaagtaaaagttttcaaggaaaaacaccattcttggtttataaatcaatcagttcaatcaggaggtcttctccattttgccacacctgtggatcctctatttctgcttctccactacctcataaaggctgataaggagggggaagtttcagccccttgatcaagttgtggtggataacgtgtttccaaattgcatcttggtgctgaaacttcctggacttgagaagttacttcatcatgtgacagaggaaaaaggtaatccagaaattgacaacaagaaatattacaagtncagcaaaagagaagacattaaagt

SEQ ID NO: 748 - DNA, 781 bp, Homo sapiens
  misc_feature (732)..(732): "n" may be a, t, c, g, other or unknown
aaaaaaatcaaagcccctctgagtaaggtacggcttgtagatgcaggctttgtttggactgagcctcattctaagagacttaaagttaaactgactattcagaaagaggtgatgaatggtgctatccttcaacaagtgtttgtggtggattatgttgttcagtcccaaatgtgtggagattgccatagagtagaagctaaggatttctggaaggctgtgattcaagtgaggcaaaagactttgcataaaaaaactttctactatctggaacagttaattctgaaatatggaatgcatcagaatacacttcgtatcaaagagattcatgatggtctggatttttattattcctcaaaacaacatgctcagaagatggtcgaatttcttcagtgtacagttccctgtagatacaaagcatcacaaagactgatctctcaagatatccatagtaacacatacaattacaaaagcactttttctgtggaaattgttccaatatgcaaggataatgttgtctgtctgtctccaaaactggcacaaagcctgggaaatatgaaccagatttgtgtgtgtattcgagtaaccagtgccattcacctcattgatccaaacaccctacaagtggcagatattgatgggagcactttctggagtcaccctttcaatagtttatgtcatcccaaacagctagaggagtttattgtgatggaatgcagcatagtccaagatatnaaacgtgctgcaggtgctggaatgatatcaaaaaagcataccctcggga

SEQ ID NO: 749 - DNA, 781 bp, Homo sapiens
  misc_feature (779)..(779): "n" may be a, t, c, g, other or unknown
gtctgggggcactgaaggtctcttggctgaaaaattggaggctttgatcactcagcatcgagccaaacaggcagctaccatgagtgaagtggagtggagagggagaacggttccagtgaagattgacaaagtgcgcattttcttattaggactggctgataacgaagcagctattgtccaggctgaaagcgaagaaactaaggagcgcctgtttgaatcaatgctcagcgagtgtcgggacgccatccaggtggttcgggaggagctcaagccagatcagaaacagagagattatatccttgaaggagagccagggaaggtgtctaatcttcaatacttgcatagctacctgacttacatcaagctatcaacggcaatcaagcgtaatgagaacatggccaaaggtctgcagagggctctgctgcagcagcagccagaggatgacagcaagcgctcaccccggccccaggacctgatccgactctatgacatcatcttacagaatctggtggaattgctccagcttcctggtttagaggaagacaaagccttccagaaagagataggcctcaagactctggtgttcaaagcttacaggtgttttttcattgctcagtcctatgtgctggtgaagaagtggagcgaagcccttgtcctgtatgacagagtcctgaaatatgcaaatgaagtaaattctgatgctggcgccttcaagaacagcctaaaggacctgcctgatgtgcaagagctcatcactcaagtgcggtcagagaatgctncc

SEQ ID NO: 750 - DNA, 699 bp, Homo sapiens
  misc_feature (663)..(663): "n" may be a, t, c, g, other or unknown
  misc_feature (669)..(669): "n" may be a, t, c, g, other or unknown
  misc_feature (691)..(691): "n" may be a, t, c, g, other or unknown
ggcggagcgaacatggacccggctgcgcgggtggtgcgggcgctgtggcctggtgggtgcgccttggcctggaggctgggaggccgcccccagccgctgctacccacgcagagccgggctggcttcgcgggggcggcgggcggcccgagccccgtggctgcagctcgtaaggggagcccgcggctgctgggagctgcggcgctggccctggggggagccctggggctgtaccacacggcgcggtggcacctgcgcgcccaggacctccacgcagagcgctcagccgcgcagctctccctgtccagccgcctgcagctgaccctgtaccagtacaagacgtgtcccttctgcagcaaggtccgagccttcctcgacttccatgccctgccctaccaggtggtggaggtgaaccctgtgcgcagggctgagatcaagttctcctcctacagaaaggtgcccatcctggtggcccaggaaggagaaagctcgcaacaactaaatgactcctctgtcatcatcagcgccctcaagacctacctggtgtcggggcagcccctggaagagatcatcacctactacccagccatgaaggctgtgaacgagcagggcaaggaggtgaccgagttcggcaataagtactggctcatgctcaacgagaaggangcccancaagtgtatggtgggaaaggangccaggac

SEQ ID NO: 751 - DNA, 704 bp, Homo sapiens
  misc_feature (645)..(645): "n" may be a, t, c, g, other or unknown
  misc_feature (690)..(690): "n" may be a, t, c, g, other or unknown
  misc_feature (693)..(693): "n" may be a, t, c, g, other or unknown
agaagccgggagggaacgagggcggaagcggaccagggccaggcttgtgttcgcagccttgccggggctggggttccgatgtggtccccggagcgggaggccgaggccccagccgggggagacccggcgggccttctgccccccgagtgggaggaggacgaggagcgcatgtccttcctgttctccgctttcaagaggagtcgcgaggtgaacagcaccgactgggacagcaagatgggcttctgggcgccgttggtgctgagccacagccgccgccagggggtggtgcgcctgcgtctgcgggacttgcaggaggcctttcagcgcaaggggagcgtcccgctggggctggccacggtgctgcaggacctgctgcgtcgaggggagctgcagcgggagtcagacttcatggccagtgtagacagcagctggatctcctggggggttggggtcttcctgctgaagcctctcaagtggactctttctaacatgctgggagataataaggttccagctgaggaggtccttgtcgctgtggagctgttgaaggaaaaggctgaggaggtgtatcgtctgtatcagaactcgcccctctcctcccaccccgtggtggcctgtcagagctcacaccctctgtgctaactnctgccagatgagaggaccttctacttggtgttgctgcatctgcanaangagaagaaggt

SEQ ID NO: 752 - DNA, 777 bp, Homo sapiens
gaatcttcctagttctagtggttggacaagtctttaactccatagcctagctccagctaggttcatgagctggccctactgctctctcctttccccttttcctcttatcccattgcattagtctggattcttgcttacagataaccaaaaccttagtcaatctgatttaagcaaaaaccagaattgataggctcacataactgaaattccagggtagaccctaaggccgggctggatgcagggactcagtcatctcactcgggctaggtctctctcaatgcctagtccctatttcatctgagttggcttccctctcaggtgggctttttctcatggagatcctcagcagcccatggaaggagagtctgtttttcccatcatcttgtacaagtccccaggttgagtctcattggcctgctggccccatgcccatccctgaacaatactgcaattggtcacctgcagtcacatgccctgtgactgcaggaaggtggggatgggctagttacccaaaggaaagtccaggtgctgtgcccagaagggagaatggatgtggggcagagcaaaccgtagatgtctaccttacccagccagacaagactgcatgtaagaaccaggcttacgggccagcccctctctgcaggcccacactgtacactcctgaaatgccattccttagtctggccaaccctcattcacccttccaatctcagcttatatagatggcttcccatgctggctaggaactaccccacattgactcccatcttgcatgct

SEQ ID NO: 753 - DNA, 755 bp, Homo sapiens
  misc_feature (660)..(660): "n" may be a, t, c, g, other or unknown
  misc_feature (722)..(722): "n" may be a, t, c, g, other or unknown
  misc_feature (737)..(737): "n" may be a, t, c, g, other or unknown
attgtgagcacgcacaaaatagtttttgcatatccctgaatgtgttgtagaacaggaatattctctaaaaatctcagcaggactttgattggatgcacacatgcattgtccagctctaacattggaatgttctgttatttttttatggttctaatatgtcctcgtccatttgtaatgcagtgtgttgtacttttggatgataaaatgagaattaatatttttaaacactattttaccaggaatgaatgactaaacatttacatgaaggcataaacattttagtgaaaccaaacaaaatctatgaggttattccatggcaaacaaaaatcaattatacaatatatattctaatcagagcctttaaaatatttaatttttgttttatgtttacctttcagataacataggtttgagaagtgaactatgtgttcactactcatttctggactttttattataacttaatcttaacaggtggttgtcttcatctttttatgccttcattcatttatttctgatattgatgtaaaatgataactaatttgttctcttattttagggctaccagagaccaagtcattacattgcaacccaaggtaaaactttgccttgttaaatgttatagaaaaaacaaacttgcttattcatctatgtggtggnttttattattttttaaattttatcttagtaacaaaaaaatcagcccttctgattaacactgntccttactcatttgnatagtacaaatttattgg

SEQ ID NO: 754 - DNA, 777 bp, Homo sapiens
  misc_feature (665)..(665): "n" may be a, t, c, g, other or unknown
actttacctcacttgtgaaggagaaagagccatcctctctacctttgttctaggtggatattctcttgctgtcagaacaccatccatttttgtagcccaaagaacaatgtttccatagtataaagttgaaaaaaaaaacaaactatattgaagcctctttaaagacaagataaatacagagagttatgttaggagtataacaagtaatattatgtctcaggccttctaattgaaatgctaagctaagcttacttttttttttttgtaacggagtctcgctcttgttgcccaggctagagtgcaatggcgtgatctcggctcaccccaacctctgcctcccgggttccagtgattctcccgcctcagcctcccgagtagctgggattacaggcatgcaccaccatgtcggactaattttttgtgtgttttttttttagtagagacaaggtttctccatgttggtcaggctggcctcgaactcctgacctcagatgatccacccacctcggcctcccaaagtgctaggattataggtgtgagccactgcacccggcctttttttttttctttttgagatggagtcttgctgtctcccagcctggattgccacagtgcaatctcggctcactgcaacctcctgacctcaagtgatccacctcagcctnccaaagtgctgggattacagatgtgagccaccgtacccagcctaaatgctaagcttacttttgatgtggtaaattatatattctctatcccaaatacatagggagcaagttt

SEQ ID NO: 755 - DNA, 764 bp, Homo sapiens
  misc_feature (713)..(713): "n" may be a, t, c, g, other or unknown
  misc_feature (717)..(717): "n" may be a, t, c, g, other or unknown
  misc_feature (726)..(726): "n" may be a, t, c, g, other or unknown
accacgaagctaccttttgggatgattgctcgattgtttggtttttaaatctgagaagcctagataactaatctgcttttaatcacgatgttttaatctacctctgtctctttaaccatgctgtctctggactgagcaagagggaggagggagcctgctcaccccactccagggccttccccagcggccaccaactgacctggggcgctgctccccacagtccaaataagctgaaagtgcagctcgctgcaggccccagagcgagcttcccctcctccctgctctcccaggcccctgccacagcctctttccgtccctctctttctgatccaggcccctcagtccaagctttggaaaaccttcacctcatcttaaaccgaactcaaatatatttatttttttaccataccaacttctctcccatctctaggtggctcagtccatggccactccctgcccccagcctggctggacagcaaggaatccacagcccacacgtgagctccctcctcacccccaggcagggaagcccctcctgccagtccctgtcccctttcagcccaccagtccctctctgctggcggtgatgggaggcctttctagacctggctctttctctcccgtctcagtggctgcgctgggaggcggcggtgagaggctcgcacgccttcagcccggccccgggcccccgggaaggagagcgagcagccccngctntgggctacngactatgggccaatagctttgaccacccggcgaaaact

SEQ ID NO: 756 - DNA, 800 bp, Homo sapiens
  misc_feature (769)..(769): "n" may be a, t, c, g, other or unknown
aacagcggaaagtattagacctcagacgatggtactgcataagccgaccacagtataagacttcttgtggcatctcttcattaatttcttgttggaatttcttatacagcacaatgggagctggaaaccttccacctattacccaagaagaagctttacatattctgggctttcaacctccatttgaagatattaggtttggtcctttcacggggaatacaacacttatgaggtggtttagacaaattaatgaccacttccatgtaaaaggatgctcttatgttctatataagcctcatgggaagaataaaacagcaggagaaactgcaggggacctctctcaccacaggaagttgaatattggatcttaattggagaatcaagtagaaaacatcctgccattcactgtaaaaaatgggcagatattgttactgatctaaacactcaaaatccagaatacctggatatccggcacttagagaggggactgcagtatagaaaaacaaagaaggttgggggaaatttgcattgcatcatagcattccagagacttaactggcaaagatttggcctttggaactttccatttggaaccattagacaagaatcacaacctccaacacatgcccagggaattgccaaatctgagagtgaagacaatatttccaagaagcagcatgggcgtctgggccggtctttcagtgctagtttccatcaggactcggcatggaaaaagatgtctagtatccatgagagaaggaacagtggntaccaggggtacagtgattacgatgggaatg

SEQ ID NO: 757 - DNA, 798 bp, Homo sapiens
  misc_feature (777)..(777): "n" may be a, t, c, g, other or unknown
  misc_feature (791)..(791): "n" may be a, t, c, g, other or unknown
  misc_feature (796)..(796): "n" may be a, t, c, g, other or unknown
gggtactgccgtcgccgccgcccaggccggggaggggtgcgttagtgtcaggaagcgggctgcgccgaggtcgtagcggaaccagctggcgaccccgcagaatgaaccacaagagcaagaagcgcatccgcgaggccaagcggagtgcgcggccggagctcaaggactcgctggattggacccggcacaactactacgagagcttctcgctgagcccggcggccgtggcggataacgtggaaagggcagatgctttacagctgtctgtggaagaatttgtggagcggtatgaaagaccttacaagcccgtggttttgttgaatgcgcaagagggctggtctgcgcaggagaaatggactctggagcgcctaaaaaggaaatatcggaaccagaagttcaagtgtggtgaggataacgatggctactcagtgaagatgaagatgaaatactacatcgagtacatggagagcactcgagatgatagtcccctttacatctttgacagcggctatggtgaacaccctaaaagaaggaaacttttggaagactacaaggtgccaaagtttttcactgatgaccttttccagtatgctggggagaagcgcaggcccccttacaggtggtttgtgatggggccaccacgctccggaactgggattcacatcgaccctctgggaaccagtgcctggaatgccttaattcaaggccacaagcgctggtgcctgtttcctaccagcacttccagggaacttatcaaagtgacccgagacgaagganggaaccagcagacnaactntt

SEQ ID NO: 758 - DNA, 797 bp, Homo sapiens
  misc_feature (702)..(702): "n" may be a, t, c, g, other or unknown
  misc_feature (730)..(730): "n" may be a, t, c, g, other or unknown
  misc_feature (754)..(754): "n" may be a, t, c, g, other or unknown
tattgtcactaagaagcccagaaatggttatcagccattgataatttaagaagtgtccttgccttcttttgctgtattcacagatttgggaatatttttatgctttagtcatttaactagagaacatatgcttactataattaaacaatcaaaatgctttgttaccattttctaagactaattcatccttaaatcagtgtcatttattcgtcataaacttcaacttcattggctttatgaagtgtttgaagtggtgtttttatggaatcacttttgattcatgtgtttaaactttgacatctgtatgtgagaattccctgtcctactcttctaatcatccataagtcgacagcagtgttgtttcttagaagttggtttattgaattggaatataaacacgaagtaaagaatgctgcttctccatgggaggggttgaacacattcattgctgtagttctcttccctctctacagttctttcatattcagtttatttattttgatgtttagggttacaaagttataagtgctgccttgtagctagtttttggaaacaattcaaaatatttattctttgactgttttcttgtggggagagtgaagggtgggaaaggggcaagaacactaagaaaattaagataaagactgctcagctgaagttttataaaaatctgacttgagtgtttttctcttcatttgctgngcttgtgtaaacagtgtgacaccatcgncacaacaggctcgggtctgtcctncccatatgttacctgaagatggagctaatctttcctctgctcg

SEQ ID NO: 759 - DNA, 798 bp, Homo sapiens
  misc_feature (747)..(747): "n" may be a, t, c, g, other or unknown
  misc_feature (767)..(767): "n" may be a, t, c, g, other or unknown
  misc_feature (791)..(791): "n" may be a, t, c, g, other or unknown
ctacttctaaaatttttttcatagatgggattttcctatgttgcccaggtggtctccaacacacaggctcaagccaaactcctgcctcatactcctaaagtgctgggattacagacacaaggcatgacacccaaccgaggttctccttgtagagtaaggcctgttaagtggatttatcagtctccctagttcatgccaccgaaacaaagaaacaaatttaccgtgggcctaatctgttttaaactttttcctcaatacgtagcaatggattatcaactgctcgatgcaggattttgtcactttatttcttttgtgaaaggattacatatagtgagaaagttgtcttatttgtctagctagatatacattattggcctgtgtgatatgctgtggaaaacaatcttaaacactctggataagatgagaataaatgactccactgaaatagaagtctatgccttttaaagtgaattagtacaaaaacatttgctgtggatatgatcttaaaggattgttttaaccaagtttgtttctatttcattacagagctggagctagtggaagtgagatagcacttgtgctgttggggaaaacaaaggatatgtttaatccgaattagtggattactttctagtgtatttcatagtgttagagtctaaagggtatgtgatagtagtcaggagatcaggattatgaaactggggctgccacttgtgtgaccttgtgtgtgatacttgaatgctgtangccttcatttcaaaagcganggggttggaatagaaacctctcanaccctaa

SEQ ID NO: 760 - DNA, 797 bp, Homo sapiens
tactatttaattatgaggagagaactcagcgacactacctgggccatacagactgtgtgaaatgccttgctatacatcctgacaaaattaggattgcaactggacagatagctggcgtggataaagatggaaggcctctacaaccccacgtcagagtgtggggttctgttactctatccacactgcagattattggacttggcacttttgagcgtggagtaggatgcctggatttttcaaaagcagattcaggtgttcatttatgtgttattgatgactccaatgagcatatgcttactgtatgggactggcagaagaaagcaaaaggagcagaaataaaggaaatttttaaaaaaccgagtattgtgttttagagtatgttacttgttttgcaggtatttggaactatattggtattagaactatctattcgtaagtcgcaaaagcagatctactagccaaattcagcaaatttagtgatttgtcataatcgttaagatattaacactatagttatacaagataaaatagtcaagcagcttgaagcaatttcaatatttcagacattactatagtcctgaaatgccagagtagatggatgtgtgatctcataattaagactgaacacacttcttggttttcttctttaataaaacatgtaatttcattccatctttaaagctttagaaatctagaggaaaaattcagtaggaatacgactgatgtaactgaagggcttatgttaagttttttggtcttaattgtgtttgtaggattattttagaaaatcaatagca

SEQ ID NO: 761 - DNA, 798 bp, Homo sapiens
aatgtgtttgtatgtttttttttttaggagatcatgaatcagacagataaaaatcaacaagaaatcccatcataccttaatgatgaaccaccagaaggttcaatgaaagatcacccacagcagcagccaggcatgttgtcccgtgtgactgggggtatcttcagtgttacaaagggagctgttggtgccaccattggtggtgtggcttggattggtggaaagagtctggaagtgaccaaaacagctgttacaactgtgccttccatgggaatagggctggtgaaagggggtgtctctgctgtggctggaggtgttacagctgttgggtctgctgttgtaaacaaagtgcccttaacaggaaagaagaaagacaaatctgactgaaatatagagatacacttgcgctccacagcactgtaatgccagtggcattgaattgctaaattatggactacaaccaagtcaactgttttggacgtttatcttctaaactgctgtgttgaaagtattgatgactggctttcatctaaaaagaagagaccaatacgagcacagtatatgaaggtttctcatacttaagttccaggtttttatctggtaaaatgttacacttactcggttgtaactgaagatatggtatgtttgaatatttactataagtctttcagtttgactaaaaatgtgaaagttgaatttagtagatgatcttcacagttccatatgtataatgtgccaggtaactacctgccccttaagaagggaaccttgaattacataagcccgacctttgatgtgcct

SEQ ID NO: 762 - DNA, 791 bp, Homo sapiens
  misc_feature (760)..(760): "n" may be a, t, c, g, other or unknown
  misc_feature (763)..(763): "n" may be a, t, c, g, other or unknown
  misc_feature (776)..(776): "n" may be a, t, c, g, other or unknown
ctgagcattgatttaccttttggtaaatgaggataataatacctgtatcacacaattatgaagatttaaatgaaaaagcagatgtagctgggcgcggtggctcaggcccgtaatcccagcactttgggaggccgaggtgggtggatcacgaggtcaggagttcaagaccagcctggctagcatggtgaaaccccatctctactgaaaatacaaaaattggctgggaatggtggtgcgttcctgtgatcgtagctgctcggtaggctgaggcaggagaattgcttaaactgggacccaggaggcggaggttgcagtgagccgggatcgcacaactgcactccaacctgggctacagagcgagactccgtctcaaaaaaaaaaaaaaaaaagaaaaagcagatatatggcttttagtaccatgttagacaagaactgccaagtactcaataaataatttattattaatattattattccttttcattgtttcccacaacccaccttccctttcaaccaggctggtggtgttactttcctaaacattccatgtccaattttgatcttggttctcagatttggcttttatactataattttttgagtgcccttcttcctccactttggttatttaattactacctatcctttcaaatctaatgcaagccctgtttaacaaataaatgcctttctgatagctttattttaaactaatctgctctttcttttagctcccttaatactacagaaaatatgactctgntgncctaatgcatcgngacttatctattcca

SEQ ID NO: 763 - DNA, 801 bp, Homo sapiens
  misc_feature (692)..(692): "n" may be a, t, c, g, other or unknown
  misc_feature (767)..(767): "n" may be a, t, c, g, other or unknown
  misc_feature (779)..(779): "n" may be a, t, c, g, other or unknown
cagcgttcacctctcagccaagtccaatagcactcacttaggtgtgcatctgtggctttctctctgtctggtcagtgctcctttatatgtccataccccctgccagagggcagcattgagggtgtacagagcccagtgtgactctcctgcagctggggacatagaagagctctgtgacgatggcagatgtggttctccagcctcttgcctggctgccagtgggagtagcctgtctgttctggcacagggggctgttccatatggagggtcagaaactggccttcacagccacccaggcgttccttccacttctgcacgtcttcctttccccatgaagatttgggtgtaccctggttgtggtctctgaagactgggcaggcctgtactttgtgaagctttcagctgtctctggtaggcctgatgaagcctatctgcagaggttggcctgaagccataatgagcagttctgttctttttagcccttgtctagtttatggctctgttgcagacatgcctttctgtgtcttggttaaaagtactggtgtgtctttgcatttaggtgtggtctgtgagtctgggaaagcttctagaggagagccctccagggttgctctttggggtgggagtagtgggagcggaaatggaacgctgactgccctcttaaagccagaagggtacttcattcagggcangcagttggcatgtgtaggcactcaggagtcttccttcaatttcagccggccggtgttcatcatcaggagtggcangggttggatatnggaattgaagaatgttgcctct

SEQ ID NO: 764 - DNA, 819 bp, Homo sapiens
  misc_feature (650)..(650): "n" may be a, t, c, g, other or unknown
  misc_feature (691)..(691): "n" may be a, t, c, g, other or unknown
acaaaaatggttgctgtagccctgcctgattttgtacacgtttgtctaagaattgagttggcacttaagctcacttctcaaagtataataatattgtatgacctcatttgtcctttcacaaaagcacttgcatcatttccttaagtcatctgctccctgacatgttttcttccctaataaacaacttctgtctgttattcctgccaatgatgttctgtttctgatgccatatcctattgagcgtgcccctgtactaatatcattgaaaatattgatatgcaaacacatttccttttcatccccattctatctttccctttggggacagattgctttccaaaagctcatgaacaaatatttggaatgctggtacctttggggcagaggtaagggtgggcggggtgggggcagaaaggtaatgcttaatgcagataactcttctaatcagtgtccatggcaatatgaacgcttgaagaaaactcagtgacatatcttgctcagtagtttcttattcctgaagaaccacaagcataaagtgaggcctcagtgctggtgctcttggagtatggggaatgtgcaaatatttaactgttttgtatgctgcacattgcaggtctgctcatgtgcattctccctttgtcttcctttgncatatgtgtttttgcttttttgaaagtgcagtctttattgnacccttcttcagcttgtagcaaattagaatgcttagcatttatggtcattcattattggatttgccatgtaaaatttttattaccttagacaagcttataagctggtactacataacttatcttactg

SEQ ID NO: 765 - DNA, 774 bp, Homo sapiens
  misc_feature (483)..(483): "n" may be a, t, c, g, other or unknown
  misc_feature (666)..(666): "n" may be a, t, c, g, other or unknown
  misc_feature (690)..(690): "n" may be a, t, c, g, other or unknown
  misc_feature (745)..(745): "n" may be a, t, c, g, other or unknown
  misc_feature (771)..(771): "n" may be a, t, c, g, other or unknown
tattagttagggaattgcttcctacagtggttccaccaattctgttataaggagtatatcactctcctaatagcagtttctaagttccagtagcaccacacactgtcgatcacttagttttattagacattaaaattagccaagccaggaagtatgaaattatttctttgttttaattactatgaacttgtatctgattgatttatttatgagaattcaagtgtttattattctcatttcttcctttatgaattattatatcttttgcctgcttttctaatagaatgtaaaactatggattttttatatagtctacacactattcctttttttctgttgacaagtattctaagtatctttcctcaatctctgcccttttttataccttgcttataattccctttgatatttaggagttttaaatattagtatcgtctaccaccttcttccttaagattttgtctataatttgtacatttttgnttttcactttaaggtctttaaaccatatggcatttattttgaggactagggatctaattttattttttcccatgaggataaccagttgtcccagcacaattcattgactaatgtcttctttccccactgctgaatattcctagctttgtcatagaatgggcttctttgcattgctttatttgnttagctttatgctgggtatattgnatagtcacaatttttttgtgtgttggtaggggtggtaaatatacatagaatttgncatttgatctttttaaattttatttntgg

SEQ ID NO: 766 - DNA, 821 bp, Homo sapiens
  misc_feature (779)..(779): "n" may be a, t, c, g, other or unknown
tttatgtaaacatatacacctttttaacaaatatacctggagtttttattgacgctatcttgcagtcttatgccattattattttgttcacccatccagttggactacctttcacatgtatcatgattttcataaatctaaatatctcctgtaacataactgtcttttaaggagtgaatgagtggattttttgatggcaccataacacagaaagcaaatatggatggaaaaatctaaagactaaaaatgaatttacctccatcttctgatccatttatctccagcaacattagcatagcataggtaatacgtggactgggcatttgagaaccactgttgtagctatttcctactcatccttcagttgttattccctcagaggagactttctggttctccagactggattttgtcccgctggttacacacttcaatggaaccctccacttttccatggtaatgcttttcacaattgaaattaaatacttgctatatgtaattatttgtttaatgtgtgtctccttcactaggccctggacttcatgaagggcaaaaatagtgtctggtttattcacttttttatcccagcacaagggcacctggcacacgtagttgttcaataaatattgaaataatgcataaaaggaagcaatcatgtatgtaaagtacctggtacatttaatagtagcaataacatttctcaaaatcatgcagttgctattgataaactagcttatgtgatggtatggtatttaaatctatttgattttcattttaangtgaaaattgatttgcaagtgaccatgccttacaagctaccc

SEQ ID NO: 767 - DNA, 737 bp, Homo sapiens
  misc_feature (667)..(667): "n" may be a, t, c, g, other or unknown
  misc_feature (682)..(682): "n" may be a, t, c, g, other or unknown
  misc_feature (695)..(695): "n" may be a, t, c, g, other or unknown
aaccggcgccagccatggcctctggggcgggcggaagctggggtcgctccccaccgcagagcgcagtcccgacgccctgggtcaccttcctgcagcccctctcgtgggccgtcccacctgcgcccccgcagccaggccgcgtgaaggaagacctgctggaactgatgatgctgcagaacgcgcagatgcaccagctgctgctgagtcgcctggtggctggagcgctgcagccccggcctgcctcgccctgccctcaggtctacctggaggttccacaggaagagcctgaggaggaggaggaggagatggacgtgcgggagaaagggcctttggtgtttcaccaccactacttgccctatttgatgccctccccgggtgccctgctgccctggccagcccccttcttccccacccctgcttgtcagccctacttgcaggacgtgcccagcattcagcactgtcctgcctccagggaaagggaggtgagagctgtgcccccacccccaccccccagtgccacagggactgtgggtgctgatgtacccccggcttcagactactatgatgccgagagcctcctatgaggacagaccccggccctgggaactgcaccagcttctgctctggatacagccccggagccgcttctgacctctcttgtcgactncccggtgcccatggntgcagtccttctnattccttaacttaaccaggccctcttctcctgggggaaatca

SEQ ID NO: 768 - DNA, 782 bp, Homo sapiens
  misc_feature (713)..(713): "n" may be a, t, c, g, other or unknown
  misc_feature (754)..(754): "n" may be a, t, c, g, other or unknown
  misc_feature (772)..(772): "n" may be a, t, c, g, other or unknown
ttgcaatggcgtggaccatggctgtgagttccagtgtgtgagcgagggcctctcctaccgctgcctgtgccccgaggggcggcaacttcaggcagatggcaagagctgcaaccggtgccgggaaggccacgtggaccttgttctgctggttgatggctccaagagcgtgcgtccacaaaacttcgagctagtgaagcgcttcgtgaaccagattgtggacttcctagatgtgtcccccgagggcacgcgggtggggctggtgcagttctcgagccgcgtgcgcaccgagttccctctgggtcgctacggcaccgcagccgaggtgaagcaggcggtcctggccgtggagtacatggaacgcggcaccatgacagggctggcgttgcggcacatggtggagcacagcttctccgaggcgcagggtgcacggccccgtgcccttaacgtgcctcgtgttggcctggtcttcacggatggccgctcccaggatgacatctcggtgtgggcagcgcgcgccaaggaggaaggcatcgtcatgtacgccgtgggcgtgggcaaggcggtggaggcggagctgcgcgagatcgcctcggagccagcggaacttgcacgtgtcctatgccccggacttcggcaccatgacgcacctgcttggagaacctcagaaagcagcatctgtccagaggaagggcattcagcgcaagggacaaganctttcggaagccccattgcgaaatgccgaaaagccttcgtnggaagtttcccaaggggnccggaaccgc

SEQ ID NO: 769 - DNA, 767 bp, Homo sapiens
  misc_feature (683)..(683): "n" may be a, t, c, g, other or unknown
  misc_feature (737)..(737): "n" may be a, t, c, g, other or unknown
  misc_feature (747)..(747): "n" may be a, t, c, g, other or unknown
atttacttattcatttattcagtcaataaaattgttttgagcccctactatgtgttaaggattagatcctggtggcacattgataagcaaaaccagacatgatccctgccttcatagagcttaattctcatggaagatacagacagtaatcaagtgattaaaaaaaaaaaaagtgaaattatagcagtgcaagtacaaaagactatgagaaatataataagtatttgaggagtattgaggaaggaaacagatcagatctaaaaggttaacatgagttatcttaataaagagcagagggaaaaacatctcaggcagatggaacagcaacagcgttagggtaggtgggaacatgaccaggggaagagttgaaagaaatatggtgtggtcagagcacagtgagtacaagcttgtgtgggtgaagtcagtgaggccaaagagagaaataagagccagaaatgctggacttttataaattatataaaggaattgtttcatttattgtgtagaggaagcctttgaaagatcttaagcaatggcaggagaacatgagttatacattttgaaaacatcacctcgtctctaaggtgaccagcaaataataggagcaggagttagactgttgtctaaacaagacatgatggtagtgtggacttggagtagagaaggagagaagtagacccgcnggagagattttggagtaaaatcagcaacaccaggcacctgattgaacaaaggantggggaggtntcaaggatcacccccagctt

SEQ ID NO: 770 - DNA, 793 bp, Homo sapiens
  misc_feature (736)..(736): "n" may be a, t, c, g, other or unknown
  misc_feature (746)..(746): "n" may be a, t, c, g, other or unknown
  misc_feature (777)..(777): "n" may be a, t, c, g, other or unknown
gaaatcttacaaatgtacaatttgtgacaaggctttcgtgcgtaattcactcctgtcaagacataccagaattcacactgcagagaaaccttacaagtgtaatgaatgtgggaaggcttttaatcaacaatcacacctttcacgtcatcatagaattcatactggagagaaaccttagaaatgtgaagcatgtgacaaagtttccatttggaaatcacaccttaaagacataggagaatttatactggagagaaagcttacaaatgtaaggtttctgacaagacttgggagtgattcacacctggaacaacatactggacttcacactggagagaaaccttacaagtgtaatgagtgtggcaaagcctttggcaagcagtcaacacttattcaccatcaggcaattcatggtgtagggaaacttgactaatgtaatgattgtcacaaagtcttcagtaatgctacaacgattacaaatcattggagaatccataatgaagagagatcttacaagtgtaataaatgtggcaaatttttcagagatcgttcacatattgcaggtcatcggtgaactcatactggagagaaaccttacaaatgtcatgactgtgccaaggtcttcagtcaagcttcatcctatgcaaaacataggagaatttatacaggagagaaacctccaagtgtgatgattgtggcaaagcctttgcttcacgttcacaccgtcattagacatcanagaatctatnctggaccggaaatctttccaaatgtcatcantgtggcaagggcttta

SEQ ID NO: 771 - DNA, 819 bp, Homo sapiens
  misc_feature (805)..(805): "n" may be a, t, c, g, other or unknown
  misc_feature (819)..(819): "n" may be a, t, c, g, other or unknown
taaatgaaagcaacaggagctgctccggggactgcttttgccagcacccagaatcagtgctcaggctcagaaatcctggatagaaagagcattttataaaagagaatgtgtccacatcatacccagcaccaaagacccccataggtgttgctgtgggcgtctgataggccagcatgctggcctcacccccagtatctccgtgcttcagaatgagaaaaatgaaagtcgcctctcccgaaatgacatccagtctgaaaagtggtccatcagcaaacacactcaactcagccctacggatgcttttgggaccattgagttccaaggaggtggccattccaacaaagccatgtatgtgcgagtatcttttgatacaaaacctgatctcctcttacacctgatgaccaaggaatggcagttggagcttcccaagcttctcatctctgtccatgggggcctgcagaactttgaactccagccaaaactcaagcaagtctttgggaaagggctcatcaaagcagctatgacaactggagcgtggatattcactggaggggttaacacaggtgttattcgtcatgttggcgatgccttgaaggatcatgcctctaagtctcgaggaaagatatgcaccataggtattgccccctggggaattgtggaaaaccaggaggacctcattggaagagatgttgtccggccataccagaccatgtccaatcccatgagcaagctcactgttctcaacagcatgcattcccacttcattctggctgacaacgggaccactggaaaatatggagcagangtgaaactttcaan

SEQ ID NO: 772 - DNA, 818 bp, Homo sapiens
  misc_feature (818)..(818): "n" may be a, t, c, g, other or unknown
ttttactttgctctcctagcttagagtacagccaattgttgtctggtagggggatgctgagtcatttattcatgcattttattacctcttggctgcaatatcaccattcattgttcacaagccacccagcttgtttactttttataaattacatgtaatcaagtcctcttgcaggtctggctactgtaattggcagcagccacagagcagggctgacaagtctgcatttatgctgatgtctcatattcagcccactctccaagctttctttcctcttccatgtgtattttagaaggaaggcaaatagaaggaatgcaaagagagaactgttaaggagttttctcttttcagatgatcttaagatacttatagcttggcagagtccttgtgtcatttggttgggaaaaaacaagggtctagagcagtcagtggtccttaaacttcagtgtgcataacaatcactgggtaacttctaaagtgaagattcttgggccctaccctccttctaatgtttttattaagtctgggtagaggtccagaaaactgcagtttctaacttgaacccctgctgattctgaagtagatggtccttaggttattcttggagaaatcctgagttggtcatagagggaaaaagagacaagaaataaaattcaatagaagtaaatacttataaagaaagcaagaaccaaaactgagagagtaactttaacctctcttctgtgagatgaaaggagtgagtatgctgtgctgcttaaaaagataagcgtttaagttttttctggcagtgaatgagatcaaactgtcctccaagacan

SEQ ID NO: 773 - DNA, 762 bp, Homo sapiens
  misc_feature (581)..(581): "n" may be a, t, c, g, other or unknown
  misc_feature (658)..(658): "n" may be a, t, c, g, other or unknown
  misc_feature (705)..(705): "n" may be a, t, c, g, other or unknown
  misc_feature (712)..(712): "n" may be a, t, c, g, other or unknown
  misc_feature (759)..(759): "n" may be a, t, c, g, other or unknown
tgcccaggctggagtgcagtggcacaatcttggctcactacaacctccaccacccaggttcaagtgattctcctgcctcagcctcctgagtagctgggattacaggcttgcacctctacgcctgactaatttttgtattattagtagagacagggtttcaccatgttggccaggctggtctcaaactcatgacctcaggttatccgcccgcctcggccccccaaagtgctgggattacagacatgagccaccatgcccagcctctactagctgattttaaatcagagtaagataagtgatgcttatttatatgtaccttttctccaattccttctcactaacactgagaggaacagagaattgtcagaatagtaactattgtgataatggtatgcagcactcattcagcacttactgttacctggcactgtgtcagggactagacattattttatttatccttctagtatttcccccattttcagaagggaaccagaggcttaagattacacagctagtaggcaatagagctggaattgagcccctatctgactctagctagtgcccttaattactattgnaaatggctaggaatcgtatttgtgaggatttggtaggtttggaaaaggactttcttaatcctgatattcagaattgncctaaaacttacataaaagcctaacctagcttttactggattggtangcttcanggatactatggggacccggaaatatataccccattttttaacaaagnggg

SEQ ID NO: 774 - DNA, 849 bp, Homo sapiens
  misc_feature (704)..(704): "n" may be a, t, c, g, other or unknown
  misc_feature (718)..(718): "n" may be a, t, c, g, other or unknown
  misc_feature (797)..(797): "n" may be a, t, c, g, other or unknown
  misc_feature (849)..(849): "n" may be a, t, c, g, other or unknown
cctaaatgcccatctcgttggccttggttcggctagtggtatggaggggtgctgcctagcactgacctgagagtgtgtgtgacccactgacccaatggacatcaaaggccagttctggaatgatgacgactcggagggagataatgaatcagaggaatttctctatggcgttcaggggagctgtgcagctgacctgtatcgacacccacagcttgatgcagacattgaagccgtgaaggagatctacagtgagaactctgtatccatcagagaatatggaactatcgatgacgtggacattgacctccacatcaacatcagcttcctcgatgaggaagtctctacagcctggaaggtcctccggacagaacctattgtgttgaggctgcgattttctctctcccagtacctagatggaccagaaccatccattgaggttttccagccatcaaataaggaaggatttgggctgggtcttcagttgaaaaagatcctgggtatgtttacatcccaacaatggaaacatctgagcaatgatttcttgaagacccagcaggagaagaggcacagttggttcaaggcaagtggtaccatcaagaagttccgagctggcctcagcatcttttcacccatccccaagtcttccagtttccctatcatacaggactccatgctgaaaggcaaactaggtgtaccagaacttngggttgggcgcctnatgaacccgtccatctcctgtaccatgaagaaccccaaagtggaagtgtttggctacccttccagccccagcaggtctnctgtgcccttaacacgtgggccttccttccccagcacggaccttttctttgn

SEQ ID NO: 775 - DNA, 739 bp, Homo sapiens
  misc_feature (654)..(654): "n" may be a, t, c, g, other or unknown
  misc_feature (657)..(657): "n" may be a, t, c, g, other or unknown
  misc_feature (709)..(709): "n" may be a, t, c, g, other or unknown
ctaatttattgagttgaatacctagttcactttttctagatttttaagagttataacatcttctggaatcagacaagtacattagttcacataaacttgcttctggccttttcccccatcttcaccctgatatactgatagaatcatctagaattgtaatgccaggattgatgttgatgtagtgttattgttttgatggacgtcttgaattcagtttcactggcaaaaagtcctacatcagtctgagtcatatctttttgtaggtgatgtgctttattctctaaatccctttagacttcttcctcattgatatccttaaattttgtcataataggtttagatatagagctttttcctcatgcgtcctgctagttcctttgatcttaaatctttcattgttccctcacgttgagaaattctcagtcattacaacctcaataatttccactcctctatgtattttattctctcctttgaggctcattttataaaggatactaagatttcttgttctattatccataccttttattaaattttacttttacatgttcctttgttttacttacttacacttactgacacttctgggagagttcctcaacctaactctcatcaggtcagtcattcattcattcggttctttatttctgntgntctagttttcatacagagaagcaccagttggcacttatttttgacccgtggnttccattttatgtgaagaggggcatactca

SEQ ID NO: 776 - DNA, 846 bp, Homo sapiens
  misc_feature (615)..(615): "n" may be a, t, c, g, other or unknown
  misc_feature (698)..(698): "n" may be a, t, c, g, other or unknown
  misc_feature (778)..(778): "n" may be a, t, c, g, other or unknown
  misc_feature (826)..(826): "n" may be a, t, c, g, other or unknown
atgctgggggaggggctggcggcctcgacggcagctgcggaactaggccgagggacaaaggctaagtttttccatggtttggactggatatcggtggaactctggtcaagctggtatattttgaacccaaagacatcactgctgaagaagaagaggaagaagtggaaagtcttaaaagcattcggaagtacctgacctccaatgtggcttatgggtctacaggcattcgggacgtgcacctcgagctgaaggacctgactctgtgtggacgcaaaggcaaactgcactttatacgctttcccactcatgacatgcctgcttttattcaaatgggcagagataaaaacttctcgagtctccacactgtcttttgtgccactggaggtggagcgtacaaatttgagcaggattttctcacaataggtgatcttcagctttgcaaactggatgaactagattgcttgatcaaaggaattttatacattgactcagtcggattcaatggacggtcacagtgctattactttgaaaaccctgctgattctgaaaagtgtcagaagttaccatttgatttgaaaaatccgtatcctctgcttctggtgaacattggctcangggttagcatcttagcagtatattccaaagataattacaaacgggtcacaggtactagtcttggaggaggaactttttttggnctctgctgcttcttactgctgtaccacttttgaagaagctcttgaaatggcatctcgtggagatagcaccaaagtggatnaactagtaccagatatttatggaggggactattaggggtttggactgncaggcttggctgtggcttca

SEQ ID NO: 777 - DNA, 853 bp, Homo sapiens
  misc_feature (850)..(850): "n" may be a, t, c, g, other or unknown
agcccaacatggcgatgcacaacaaggcggcgccgccgcagatcccggacacccggcgggagctggcggagctcgtgaagcggaagcaggagctggcggaaacattggcaaatttggagcgacagatctatgcttttgagggaagctacctggaagacactcagatgtatggcaatattattcgtggctgggatcggtatctgaccaaccaaaaaaactccaatagcaaaaatgatcgaaggaaccggaagtttaaggaagctgagcggctcttcagtaaatcctcggttacctcagcagctgcagtaagtgcattggcaggagttcaggaccagctcattgaaaagagggagccaggaagtgggacggaaagtgacacttctccagacttccacaatcaggaaaatgagcccagccaggaggaccctgaggatctggatggatctgtgcagggagtgaaacctcagaaggctgcttcttctacttcctcagggagtcaccacagcagccataaaaagcgaaagaataaaaaccggcacaggattgatctgaagttaaacaaaaaaccacgagctgactattagaagacacattagtgcagaagcttccaggctgtagagccctgcttcccttctctgacctcacaaagataaacatccttcacctgagttcgtggccatccacctctgctctcccagacccagtgcctgtgactttgagtagtttggtctaaatgtggtgacaaacaagtcatttctgtaagacattgggtcttactttatgtcatttttagtaacagaacttgcaggaagatgaagacaatgttgtaatcccagcagttgctacttgngcg

SEQ ID NO: 778 - DNA, 848 bp, Homo sapiens
  misc_feature (641)..(641): "n" may be a, t, c, g, other or unknown
  misc_feature (821)..(821): "n" may be a, t, c, g, other or unknown
gaagaagcccttcagacttaacaagaatgcccataagtaaagagaagcaaaagagaagatgacaaggaaaatcagaaagatggaacaggctcctttcttttctttctttctcatacttgagtcctgtttagaaccttatcatattctgccttgataattgagggcagggaccattcatctaacacagctgttggtacccaatatgattttgttgaattattaatgaaaaacttacaattttaaacatcagtgattattagtttgtaattctaactgcatttggagcttttcagttacataaactgttcctggtcagaagctggaaatggggaatgtgaacatgagttgtcactaaatatgtaaaacagattttcttacatgtgcatgtagatgattaagtaacaagaatgtatcctctcctgccactgtaatttgggtgtgccaccatacattgcttatgaaatattgtccagtctatataaaagaagctagagagagaattctcaattattttcagaaagaaaacctaccagtttatgtaggaacttctcaaagtcctgtttcacttcatgaggtttcttggtagcctttgcttggagtctaatcatggaataaagaaaatcagtaaccaaactaattgnccttatattgacaccatctaaatagccaacatttattaagaatttaatatgctgggcattcgtcaagcactttacatatattaattcaattacccttaaaacttctgaagtaggtactcctattatcctattttataaatgaggaaacaggctgagataggttcagacacccacccccgntgatgtgccacgtgccacacacacacc

SEQ ID NO: 779 - DNA, 730 bp, Homo sapiens
  misc_feature (722)..(722): "n" may be a, t, c, g, other or unknown
  misc_feature (727)..(727): "n" may be a, t, c, g, other or unknown
acagcactattcacaatatccaaaaagtggaattgtccattgaccaatgaattggtaaacaaaatgtggtctatacatacaatgaaatattattcagccttaaaaaggaagaggaattatgaaacatgttgcagtgcggatgaatcttatcatgatgctaagtgaataagccagacacaaaaaatccaaatgtatcattctacctgtatgaggtactttaagtagtcaattcatagagacagaataagattgtggctgccagagaatgagggatgggggaaaagggaaattgtttaatggatacagcatttcagttttgcaagatgtaaaagttttggagatccattgcacaacagggtgaatacaggtagcactactgaactgtacaatacaaaatgggcaagatggtaaatgtaatattatgcacttttgctacaataagaaaaagttaacaataaagattaaaagtgtcctttttttaaaaaaagaatgaaagatgattgagtttttttgataggacaagagtctgggatacagtttaagtgactgaaagcgaaaagaaactacatgtgatgttcatactcagtattaaaatctggtagaaaaagtaatagtaaaatttagtaactattatttttattgagaacctgctgtgttttgtgcagtatactagtaaagtgcacaggatgatcagggactcttattcttggcaaaaaaaaccnaacanaac

SEQ ID NO: 780 - DNA, 786 bp, Homo sapiens
  misc_feature (676)..(676): "n" may be a, t, c, g, other or unknown
  misc_feature (771)..(772): "n" may be a, t, c, g, other or unknown
  misc_feature (776)..(776): "n" may be a, t, c, g, other or unknown
acatttttctccaaattttattaatttcatagtgttttgatttgggtggcagatgacttttaagcagtgggtgtttgccggccagatctttcctggcatgcggactgtgaggcaaagcacgggtgaaggtaggcgctaaaggctttgggctaaagccagcacgcggttctgtgctataggagtctcccgtttcccgtggacaggttcagcgttccttctttcgcacaacttttttctaagtgttccagtgaccaagccagtcattcggacactgatttgcagtgcattggcagtaattcacaaattagttattatataagtctctctcatccctttcacactagattctcagacatgaatgaatttgtcgtttggaaggaaagctgggtaacgttttgggcacaggggaaggaggactccggtcttaactcccacgctaactttagctcaagtggagttttcaccgtggtcatttctacctccggagcaaggtgccagcgccagtactagagcctgcttatccacatttgccctggacaggagcaggaggaagtccacttctgtaccggcagacagagcatgtgaacacaaaacacatttctatggcatagtcaactgaacttcatttttacatttaatctaacatgttaacacgttctaacagggtttctatgancagctgctgtaacatactcatcaactatgatagacttaacacttgttacctaatgaacaaggaggatgtgcatttcgggtttcttttgatattcnnggangtgaatggca

SEQ ID NO: 781 - DNA, 826 bp, Homo sapiens
  misc_feature (711)..(711): "n" may be a, t, c, g, other or unknown
  misc_feature (786)..(786): "n" may be a, t, c, g, other or unknown
  misc_feature (800)..(800): "n" may be a, t, c, g, other or unknown
  misc_feature (825)..(825): "n" may be a, t, c, g, other or unknown
aaaaaaaagctgatgaggtcggaaaaaagggagaagaaaccgggaccctctctgagaggcaacagaagcagcaattgtttcagcgaaaaaagcagcaagggagggagtgaaggaaaaaagcaaaaaagggggcgacacgcaagtgcctgtaggggtgaaaggagcagggaccggcgatctagggggggatcagctacaaaagaaactgtcactgggagcggtgcggccaaggaggaagcagtgctgccaggctctgctccagggcacagctggctggcggctgccctgtccgcagcaaaggggcacaggccggggaccgcgagaggtggcaaagtggcaccgggcgccgaggctgctgagcgctcgccgagacggcgaccggactggctgccccggaactgcggcgactctccctactcagaacttggcctacgtttcccaggactctccccatctccagaggcccccacaaaaccgggaaaggaaggaaaggacagcggcggcagcagctcaatgagtgcctacagcagaaagcctgtgatttggccaggctctatgggaggaatgaggttgttagcctgatgcaggcaaacagggctgggggagccacaaatcttcaataaacgtggggagggcttccccacgttgcctctactttatcaattaactgagtagctcttctgacttttaatgtcatttggtaaaatcagntctgtcatatgttaagcagctaaattttctgaaaactgcataagtgaaaatcttaccacaggctttttgaatatntttaagccaccttntttttaaccttgcaaaatctgggtnt

SEQ ID NO: 782 - DNA, 843 bp, Homo sapiens
aatcttttttgcctctcaacctgtctcccaggtagtgtacctgtcaccattaataactctttagccgctccctagtgatttgacctatcagttgtcgttcacagaaaagtggtgctctggcctgctattgaagcttatgcaggttctttcagctcctcagtcaccccagcagccatatacttgtaggaagttgtgttggtgggcttcacaagcaggcagctgaacacttcgtacagtttgataaaggtggcattacattttgaacaatagatgataagactcccatttagaccgcaaaacagtgccacaggggtagacaggggtctgggggagataagatgggtggtgaggatgaccaacagcaaataaactttcctgtctctttgatgctaattatctctttgcacctaattatcatggcatcatcatcatcctctgatgtttgcaaactaagagttgatgtgtttgatcaggttagtgaatctgtcaggtatggcattctgcctgtttctgaagcttaagaatgagaagccagtagctatcatgcggaagatgtgaactgccccccagtcctcgtcctttagcagtgtgtcattcctctgtttggacatgtgctctcttgcttcctctcttcccctctctgttcctgaagtgtgctgcttccaacacttccccagattaattcctacctgcatttaggtctcaacctaccatcactttttcaggaaactgctactgctctctctatttggcattgactgtccaactaaaatgcccatatggcaggtttcatttatttcttaatatgctctacaataactgctggttacttgctttttctcc

SEQ ID NO: 783 - DNA, 846 bp, Homo sapiens
  misc_feature (813)..(813): "n" may be a, t, c, g, other or unknown
  misc_feature (818)..(818): "n" may be a, t, c, g, other or unknown
  misc_feature (845)..(845): "n" may be a, t, c, g, other or unknown
gttcgcgctccttcccttcccgtggtcgagccgagtcctgacctgagggctgcatcaagatcttgtcattccacatcatggtttcctttgaggatgtggctgtacccctctcccaggaggagtgggactgtctgatccctgctcagaggggcctctacaaggatgtgatgatggggacctatgggaacctactctcattaggtaagttccctccctggggctcagctcctgggcttcctgctccttaaccttgaggatcaagcttggggctcagaggctcctcaccccctgggcccaaagaccagacattttgaccatggtaccatgcaggtctggtttgcacagagagggggacaggtggtactgggaccctccttgatttttttttttaataggcaatgtctcgctctgttgcccatcctggagtgcagtggtgagaccatagctcactgtaaccttgacgtctttggttgaagagatcctcctacctcagcctcccaagtacctgagactacaggcatgggccaccatgcctgtcttattttacttttttagagacagagcctctgtgttgcccaggttggtctcaaactcctagcctcaaggaatcctcccaccttggcctcccatgcctttccaacccttcctgatttatagaaggagaatattattcattgcacacctagtaccttcctatcccctgaattaatctttctgcatcttgatgatcggtggtaggatacacaagtttataaacgaacctgaggctaacaaatactggcacttttcttaagttacacaagcctattgggnggcanatcttgggatatggatctgtcgggttna

SEQ ID NO: 784 - DNA, 846 bp, Homo sapiens
  misc_feature (723)..(723): "n" may be a, t, c, g, other or unknown
  misc_feature (800)..(800): "n" may be a, t, c, g, other or unknown
  misc_feature (811)..(811): "n" may be a, t, c, g, other or unknown
  misc_feature (845)..(845): "n" may be a, t, c, g, other or unknown
ttattattcataagcataccttttcagttaccctcatgatttactatctgtaagagcataagcttactgtttgtgtaatatttgtccctgtactttagatgggagttgctgaggtggtataaggtttggtaactgcatccggcctctcagggaaataaccaagttgttcagattcttagctgtattatgtgaagttgtttgtcagcttcattgcttactactgtgaaataagttataaagaggaacttttaataaaaataaatggattcactcaggggaggggtattcattgttggtgaaatatgtcgaggaccagatgctttttggtctcccaaagacctatcaaactgcagatcttttggctttgtaatatattcagttccacatttattcattcaagatttttgtgtcctcattatgtgccaagtactgggttggacactacgtgacagagatgaacaaatccctaatcttgggatttcacagtggatgttggaatttagtaccgtttagcttcattaggttctgcagtagtcccaagattttccaagatcatcctgtcctccagtgttctattgattcaacttcagaatatatcccagactctgtccctctttactcctcactgctgttgccctgggtccatctgccatcatctctcacctggattatctcagtagtttcccaactggtttccttggttccattcttgcctccttctgnctactctcaatataacagctagaacaatccttttacaatggaattcagatcatggttacccctctggtcaaattctncagtgactttncagtttttacatgatctggcttctactacctggnt

SEQ ID NO: 785 - DNA, 862 bp, Homo sapiens
  misc_feature (468)..(468): "n" may be a, t, c, g, other or unknown
  misc_feature (556)..(556): "n" may be a, t, c, g, other or unknown
  misc_feature (689)..(689): "n" may be a, t, c, g, other or unknown
  misc_feature (742)..(742): "n" may be a, t, c, g, other or unknown
  misc_feature (816)..(816): "n" may be a, t, c, g, other or unknown
  misc_feature (824)..(824): "n" may be a, t, c, g, other or unknown
  misc_feature (854)..(854): "n" may be a, t, c, g, other or unknown
ctgtcagttcatcaaactcatcctccgtccagttttgtttccttgctggctaggagttgtgatcctttggaggagaagaggcgtttttcagcctttttcagctggtttctctccgtcttcatggatttatctacctttggtctttgatgttggtgacctttggatggggttttggtatggatgtcctttttgttgatgttgacactgttcttttctgtttgttagttttcccttttctgtttgttagttttccttctaacagtcaggcccctctgctacaggtctgctggaggtccactccagaccctgtttgcatgggtatcaccagcagaggctgcagaacagcaaagattgctgcctgttcctttctctggaagctttgtcccagaggggcacccgccagatgccagctggagctctcctgtgtgaggtcctgactgtcccccagtcaggaggcacgggggtcanggacccacttgagggggcagtctgtcccttagcagagctcaagctctgtgcggggagatccactgctctattcagagccagcaggcangaatgtttaagtctgctgaagctgcacccacagccaccccttcccccaggtgttctgtcccagggagatgggagttttatctgtaagcccctgactggggctgctgcctttctttcagagatgccctgcccanagaggaggaatctagagatgcagtctggctacagcggctttctctggctgcantgggctccacccagttcgaactttctggcagctttggttatgctgtgaagggaaaactgcttattcacgcttantaatgacngatgcccttttccaaccaaacttgagtgtnccgggtgg

SEQ ID NO: 786 - DNA, 837 bp, Homo sapiens
  misc_feature (797)..(797): "n" may be a, t, c, g, other or unknown
  misc_feature (806)..(806): "n" may be a, t, c, g, other or unknown
  misc_feature (829)..(829): "n" may be a, t, c, g, other or unknown
cttttaaatggggaaggtgctctgaagatttgtgccgaaacgccctctcctcgagatttaactaattgttctctcctctctctggctgttggacgcgcacctttccggaggatgggggaggtaaccgaggtcctgagccggtacctgaacttgggtgaacagagaacctcaacttttgctttctagcactcgaccgcacccagcaaggcgtccgcttactcagtggttcttagtgtttggagtgcttaagaataactggtggtgtttgatttcaccaagtacattcgggcagatcttagttcttgggggggtggggctggaatctgcgggtgtgacctccactctaggtctgtgctgtccagccaagtagccattggccacatgtggctgctaagcatgtgaaatacagctaatcaagactgaaatattaaaacacacaccagttttagaagactaggaaaaaagcaaacttttattagatgtttatgttgattatatgttggaaagataatattttggatgtgtcaaacgttaaaaattaatttcacccatttttgtgacgtggctactaaggaatttcaggtgatgcttgtggctcctcacacggtttctattggacagtgctgctgcaggtgattcgaaggcgggtgggtgcaggaacccagctgagagttcagaaattagtgtaactttggagacaagtgtctgtgggggaaggagccttcggacgtggagatacaactcttgctcctaacatttatcgagtctttaattaatgccctgggtaactataaggntggaactgnattggcaccatattgatgatganaaacttga

SEQ ID NO: 787 - DNA, 835 bp, Homo sapiens
  misc_feature (401)..(401): "n" may be a, t, c, g, other or unknown
  misc_feature (780)..(780): "n" may be a, t, c, g, other or unknown
  misc_feature (794)..(794): "n" may be a, t, c, g, other or unknown
  misc_feature (821)..(821): "n" may be a, t, c, g, other or unknown
atacaagaaaaaaatcacatctttatgccaataccattctttcacaatactagaagaacagattcagagtagaattacataactggttggttacattttgcatccagtgagtaacaccatcatcttcttagtttctatatcaatttatttatttatttatttatttatttttgagaccaagtcttgctgtgttgcccaggctggagtgcagtagcacgaactcggcctcttcagtggccagtaccacaggcgtgcaccaccatgcctggctaatgttttttgtatttttggtagagacgggatttcactatgttgcccaggctggtctcgaactcctggcctcaagtgatgcgtccgccgtatctcaaaataataagagctatttatgacaaacccacagncaatatcatactgaatggacaaaaactagaagcattccctttgaaaactggcgcaagacagggatgccctctctcaccactcctattcaacacagtgttggaagttctggccagggcaatcaggcaggagaaagaaagaaagggtattcaattaggaaaagaggaagtcaaattatccctgtttgcagatgacatgattgtcatgtagaaaactccatcgtctcagcccaaaatctccttaagctgataagcaacttcagcaaagtctcaggatcaaaatcaatgtgcagaaatcacaagcattcctatcatcaataacagacaaagagagagccaaatcatgagtgaactcccattcacaattgctacaaagagaatnaaatcctaggaatncaacttacaagggatgtgaaggacctntttaaggagacttc

SEQ ID NO: 788 - DNA, 833 bp, Homo sapiens
  misc_feature (799)..(799): "n" may be a, t, c, g, other or unknown
  misc_feature (809)..(809): "n" may be a, t, c, g, other or unknown
  misc_feature (816)..(816): "n" may be a, t, c, g, other or unknown
aataaatgcattattatgactgtgacagtgactaatccccctatgaccccaaagccctgattaaatcaagagattccttttttaaaaatcaaaataaaattgttacaacatagccatagttactaaaagatgagttaggtggatttttattatgtcaactagttgtacatggctttttaaaagttaatgattattttgtaattagaaaaaaatagtacgtaccagggtaggaatttgggaaaatacagaaccgaggagaaaacagaagtctttgcagtagatacagggtgtctcctgaccaagtgaaggattcaggggcggggggtgaatattgcttgacattacccacctatggcatgtgttggatgtcgtgtgattgaaagggggatgcattcccctgtatgcttggaccacagttcagtattcatgtggaataacttgcagtgcttaaaatgacaacaggcattcatcacagttatggctcttgcttatgaaggctgtgtcaacttggaagagatttctggggtagacagattttgttcctgtgctggagtctgccacctgctggaggactctgaggccaaaattgcctgtgcagagttgtatagaaaatgcgtctggaggctgggcaaggtggcttatgcctataatcccagcactttgagaggccgaggcgggtggatcagtagaggctaggagtttgagaccagcctggccgatatcgtgaaaccccatctttaccaaaaaatacaaaaattagcccagtgtggtggcaggcacctgtaatcccagctattanggaagctgangcagganaatgtgtgaacccagga

SEQ ID NO: 789 - DNA, 727 bp, Homo sapiens
  misc_feature (680)..(680): "n" may be a, t, c, g, other or unknown
  misc_feature (689)..(689): "n" may be a, t, c, g, other or unknown
  misc_feature (713)..(713): "n" may be a, t, c, g, other or unknown
atagaaaattagaaaagcagagaattcgagaagagaagcgagaagaacggaggaggagagagttagaaaagaaacgtttgcgggaagaggaaaaaagaagaagaagagaagaagaaggatgcaaaaaaaaagagacagataaacagaagaaaattgcagagaaagaagtaaggattaagcttcttaagaaaccagaaaagggagaggaaccaaccacagagaaaccaaaagaaagaggagaggagattgatactggaggtggcaagcaggaatcctgtgcccccggtgcagtcgtaaaagccaggcccatggaaggctcgctggaggagccccaggagacgtcacacagcggcagtgataaagagcacagggatgtggagagatctcaagaacaagaatctgaagcacaaagataccatgtggatgacggcaggaggcacagagctcaccacgagcctgaacggctttccagaaggagtgaggatgagcagagatgggggaaaggacctggccaagacagagggaagaaggggagccaggacagcggggctccgggggaggccatggagagactgggaagagcgcagaggtgtgacgacagtccagcacccagaaaagagcgactggcaaacaaggacccggccagccttgcagcttgtatgatcccaggagttcgcttncgagcgccnagaattgtggccggaaaccaggangatctgcaaggcaa

SEQ ID NO: 790 - DNA, 802 bp, Homo sapiens
  misc_feature (755)..(755): "n" may be a, t, c, g, other or unknown
  misc_feature (766)..(766): "n" may be a, t, c, g, other or unknown
  misc_feature (773)..(773): "n" may be a, t, c, g, other or unknown
atattattcagtgctaaaaagatatgagctatcaaactatgaaagggcatggaggattcaatcttaaatgcattatactaagtgaaagaagccagtctggaaaggctacatactttatgatttcaactctatgtcattgtagaaaaagcaaaactttggagacagtaaaaagatcagtggttatcagggacttcgtgggagggaaaaataggcagagcacagagcattcttagggcagtgaaattattctgtatgatttacaatggtgactatatgtcattgtacatttgtcaaggcccatagaacaggttttgaagttgatgtgatgttgacagtccccggggaggctgtgcctgcgtatagaaagcagcgtatgggaattctctgtactttccacttgattttgctctgagccggaaactgccctgaaaaataaagtctatatttaaaaaaatagtcgtagatactagacacagcatttttatcagcattttaaaatatactatatgcaaagataatattatatggtcaagaataactccttaatgtataaatttaaaagcaccatgaaatctcttaagaaacaatcagaagttttataaaattttaaaaaaggaaagtgaggaaaatgcctaaattaaacagtaaaacacacccagttattcaacaccaggtggcgactggactgggtctggatttttcttagcttgcctgactctgtgactgctgctctctgctttcttgggctccttctncctcaatcttnctggttncagaacagatgctttttatgtcctctttg

SEQ ID NO: 791 - DNA, 859 bp, Homo sapiens
  misc_feature (692)..(692): "n" may be a, t, c, g, other or unknown
  misc_feature (705)..(705): "n" may be a, t, c, g, other or unknown
  misc_feature (803)..(803): "n" may be a, t, c, g, other or unknown
  misc_feature (805)..(805): "n" may be a, t, c, g, other or unknown
  misc_feature (838)..(838): "n" may be a, t, c, g, other or unknown
cagtacctccgataaaaccatcctttctcgagttggaagagtttgtaagaatgatgtaggaggacaacgcagcctgataaacaagtggacgacttttcttaaggccagactgatttgctcaattcctggaagtgatggggcagatacttactttgatgagcttcgtaagttccttctttccttctttcttggaaaggccttactgcctaattaagtaacttggcatttatttccctttggctccaaatgcctgattaattttacctgagcaaaccttacaggagtggttcttactaaaattcacacgcaaagtacacggaagtgctctaggtctgggcacacgtcataatgcagtaactcttctctttgtaagagtcctcaaagtaagtgaaggaaacaaaactacagcaagacacagaaaggtgtgagctctggaactacacagttcatccattctccatgcagtctttcattttgaaaggagccaccttctataggtaggaaaatcttggattccttattccacgggtgccctctgctggcaagtacaggagatttggtgaacactgtccctccgacttgttaatgaaagaataatcagaagcagtagacagcttcttctatttcacttctcctcttcactccctcaaaaactccttccaagtcctacaatgattttttttcttttttgnttatgtataatgntagcatcattagcttttagcttcttgaacttggtcttatttttgccatgtaatgtaaaaatgataatctatatcatggaattatttcatcaatattgngnattttccacttaaagtatacattgagtaatcgnggatgactctcctattgatgt

SEQ ID NO: 792 - DNA, 879 bp, Homo sapiens
  misc_feature (848)..(848): "n" may be a, t, c, g, other or unknown
  misc_feature (856)..(856): "n" may be a, t, c, g, other or unknown
  misc_feature (864)..(864): "n" may be a, t, c, g, other or unknown
ttatctgtcccagggatccgttgattgccaggtatggctttgtggtaattctagcatttgcaacccagcaatttgagccttctgtctgcctaaatgatgattttacattgtaatggttgtactaaatcctttcgcttttgctccatagccgctgttgtgacaagaaaagctgtggcaaccgaaatgagactcctcagatccagtgataattgacaggtagggaccactcttctttcactggattcttattcctcattataatgaaacacctgcccttgtgttgctcatgggcgagggttaggaatgcatgtggctgaaatttgcctgttggtcatgacttacgctgtgctgagcgattttgattcctgggaaagccatatggaatgttcttttagaggcctgttccttggattgctccggtttttgtctgattcatgctcctaaaggaatatattttttctttcctgactttctgtggctcaatcctcatgctgtgccaggaagcttcagaaataaaataataatagtttgtgatttatgaaatgtggttgggtgcttataaatatttaacttttatttgaaaaatgtttgaatcattatcacttttagctacagtagttctgttggacgtaatccatctacactttaaggttttatttatgcataaaagcagtttaaagagatctgtgaaccaagattttctactggtatttgccggatttgattgcagtatgagaccatattgtaagttgattaattatcctgcttggcttaatttttgggtttttaaacagatccatattactaatctgacatgaccaagtaaatcaccgtagaacaataaatcnggtttaantggtcggngtaattttgagtcac

SEQ ID NO: 793 - DNA, 886 bp, Homo sapiens
  misc_feature (855)..(855): "n" may be a, t, c, g, other or unknown
  misc_feature (873)..(873): "n" may be a, t, c, g, other or unknown
  misc_feature (882)..(882): "n" may be a, t, c, g, other or unknown
aaaaaaaaaataaggcggggaactggggcgggggtgcgttgcgggaagaaaagagaaagaagtgaactggagctttcggacacagaaggacaggaagcttgagagaaaaggagaggataatgagtgaaatgcaatgcagcacctccttggaacacacagttacaattcagttcacagggcacactggctcaccgtatttttaactagtttctctccccacctcctttttaaaaattccctttttgcctctgtttccaaagaaatgccagctcaaaaccaaggcagttggaatttaacagctctaggaagctctagtgagaataaaagccaaataatatgaaccagccaaaattccttttgcaacatttttccccaaaagaaaaatacagaagatatttcttttcaagtctctaattctacctttaaaaaatatgtgtactaatgaacagtattcattttaaatctagaacctgggaatatattactataggcaagacacctttaggtaaagagctcataattttccattgaatacagtaaaattataaagaatgtaacaaaggctttggtaatttggtagaggggctttttgatgaaaaaaagacagatgatttagaaagcgaggaacacatcaagcctcagggaaagaaaatgtttgattggtattaattaaaacactgctaatatattctaataaaatcaaatttaacattctaaagtaatcctcttggtatgtcaaaggaaaaagaaaagtattatcttatttgcatctctgcaatccaaatgcatttgctcattcagcagaattaatttttatcaccagcctggtttatctcctccaggattagtcaaagntattctttcaactagaanggtcagggnggga

SEQ ID NO: 794 - DNA, 883 bp, Homo sapiens
  misc_feature (837)..(837): "n" may be a, t, c, g, other or unknown
ttaatctgacgaaatttattgttgtatattgtgtaaattaggattctaactattttcttcgaaactggaaaagccagtcgacagctagtatgtgagggaactgagttttgaacccagcctgtctgctgaagccgtgttcttaaccaccatgcttcgctgcttttctaattgagttagtattaaagggatcttactgggaaaaaaaatgtaggtacatcattcagtaagaaaacttctctgttgctttctgttttgcaagtagtattgatagcgtagcattctcctacaggtagcctccatgaataaatgtttaaaataaggaggctgggtgtagtgcctcacgcttgtaatcccagcactttgggaggccgaagtgggtggatcacctgaggtcaggagttcaagaccagcctgaacaacgtggtgaaaccccatctctactaaaaatacaaaaagtagccaggcgtggtggcatgcgcctgtaatcccaggtacttgggaggctgaggcatcagaattgcttgaacctgggaggtggaggttgcagtgagccaagattgtgcctctgcactccagcctgggcaacagaacgagactccatctcaacaaaaaataaaataaaaataaaataaagagaagaaataactggagtagagagaaatcgaatttgtctttcatagcgtggtgctaggtggcatttttaggatatcagatataagtaaatattctcctggattatctagtggttttaatgctaaacaatatatattctacaatgatcctaattttttaaaatccaagagtaagaatgcttagtaatagaagcttcatcacctnagttgcctttgtggggaaatctggatctaagaatttgcaaaatctt

SEQ ID NO: 795 - DNA, 777 bp, Homo sapiens
  misc_feature (692)..(692): "n" may be a, t, c, g, other or unknown
  misc_feature (725)..(725): "n" may be a, t, c, g, other or unknown
  misc_feature (744)..(744): "n" may be a, t, c, g, other or unknown
cacttcccttcccgcgatggcggcacagggagctgctgcggcggttgcggcggggacttcaggggtcgcgggggagggcgagcccgggcccggggagaatgcggccgctgaggggaccgccccatccccgggccgcgtctctccgccgaccccggcgcgcggcgagccggaagtcacggtggagatcggagaaacgtacctgtgccggcgaccggatagcacctggcattctgctgaagtgatccagtctcgagtgaacgaccaggagggccgagaggaattctatgtacactacgtgggctttaaccggcggctggacgagtgggtagacaagaaccggctggcgctgaccaagacagtgaaggatgctgtacagaagaactcagagaagtacctgagcgagctcgcagagcagcctgagcgcaagatcactcgcaaccaaaagcgcaagcatgatgagatcaaccatgtgcagaagacttatgcagagatggaccccaccacagcagccttggagaaggagcatgaggcgatcaccaaggtgaagtatgtggacaagatccacatcgggaactacgaaattgatgcctggtatttctcaccattccccgaagactatgggaaacagcccaagctctggctctgcgagtacttgccttcaagtacatgaaatatgaagaagagctacccgntttccacttggggttcaagtgccaagttgggcnggcaagccccccccggggnaaaagaagatcttaccggcaaggaagccaaaca

SEQ ID NO: 796 - DNA, 735 bp, Homo sapiens
  misc_feature (532)..(532): "n" may be a, t, c, g, other or unknown
  misc_feature (601)..(601): "n" may be a, t, c, g, other or unknown
  misc_feature (666)..(666): "n" may be a, t, c, g, other or unknown
  misc_feature (703)..(703): "n" may be a, t, c, g, other or unknown
  misc_feature (724)..(724): "n" may be a, t, c, g, other or unknown
aaagggccggctgtttcggcggccgcgggatgcccctgcgctgaccgccaggggcaggtgcccgcccgcgtagacgcacccggcctgaccccgcgcaaccatgtaaacggcgccagcaggcggacgctggcttctccgcctgggacccctccgccccgacccgggccccgcggccctcgatgaggacacaccatgctgaccggggtgaccgacggtattttctgttgcctgctgggcacgccccccaacgctgtggggccactggagagcgtcgagtccagcgatggctacacctttgtagaggtcaagcccggccgcgtgctgcgggtgaagcatgcaggacccgccccagccgctgccccacctccaccatcatccgcatcctcggatgcagcccagggggacctctccggcttggtccgctgtcagcgccggatcaccgtgtaccgcaatgggcggttgctggtggaaaacctgggccgagcccctcgagccgaccccctacacgggcagaatggctctggggagccgncggccgccctggaggtggagctggcagatccggcgggcagcgatggccgcttggcccccggcagcgcangcagcggcagcggcagtggcagtggtgggcggcggcggcgagccaggcgccccaagaggaccatncatattgactgtgagaagcgcatcactagctgcaaangcgcccaggcccgaacgtggngcttctttttt

SEQ ID NO: 797 - DNA, 753 bp, Homo sapiens
  misc_feature (689)..(689): "n" may be a, t, c, g, other or unknown
  misc_feature (742)..(742): "n" may be a, t, c, g, other or unknown
  misc_feature (752)..(752): "n" may be a, t, c, g, other or unknown
actgtgcttttcctgcgtgcagatgaggactttgtgtcctacacacctcgagacaagcagaaccttcatgagaacctccagggccttggacccggggtccgggtggagagcctggagctggccatccggaaagagatccacgactttgcccagctgagcgagaacacataccatgtgtaccataacaccgaggacctgtggggggagccccatgctgtggccatccatggtgaggacgacttgcatgtgacggaggaggtgtacaagcggcccctcttcctgcagcccacctacaggtaccaccgcctgcccctgcccgagcaagggagtcccctggaggcccagttggacgcctttgtcagtgttctccgggagacccccagcctgctgcagctccgtgatgcccacgggcctcccccagccctcgtcttcagctgccagatgggcgtgggcaggaccaacctgggcatggtcctgggcaccctcatcctgcttcaccgcagtgggaccacctcccagccagaggctgcccccacgcaggccaagcccctgcctatggagcagttccaggtgatccagagctttctccgcatggtgccccagggaaggaggatggtggaagaggtggatagatctattatgtgaaaggcagcttcacccagttttctggactctcatgcccccatctncgacctgggagacttcaggaatgacaacctacccagcctggtggggctggcangatggtggang

SEQ ID NO: 798 - DNA, 755 bp, Homo sapiens
  misc_feature (602)..(602): "n" may be a, t, c, g, other or unknown
  misc_feature (707)..(707): "n" may be a, t, c, g, other or unknown
  misc_feature (727)..(727): "n" may be a, t, c, g, other or unknown
  misc_feature (745)..(745): "n" may be a, t, c, g, other or unknown
tgcactccagcctgggcaacggagtgagactccatctgaaaaaaaaaaaaaatagaaaagaaagagaggaacaaaaagaactgcagctacgggccgggcgtggtgtaatcccagcactttgggaggccaaggcgggtggatcacttgagttcaggagttcgagaccagcctggcctacatgatgaaaccttgtctccactaacaatacaaaaaattagccaggcgtggtggcgtgcgcctgtaatcccagctacttgggaggctgagcaggagaattgcctgaactgaggaggcagaggttgcagtgagctaagatagcaccattgcactccagcctgggcgacagattgagactctgtctcaaaaaaaaaaaaaaaaaaaaaaaaaagaagtgcagatacaggatagtggaagaaagagagagcctttagcagaaactcggtgcaccctctccccacccttgccctatatctgaggttgctcacctctccatggccgtagtcccaccctcaccctgcctcagttattactctctgcagccaacagaatttaactgctgccagtgaaggctgcagctcagccctgatttcccacccctttgngatccctccctgctggcttagttctgcctagcctggggtgctgagaacttatgggggagccctcagatgccagtgtatgctgcatgtgccccatcctcaatctgnggaatgactgtaagaccttntgatctccctgggattanaacagtggct

SEQ ID NO: 799 - DNA, 752 bp, Homo sapiens
  misc_feature (647)..(647): "n" may be a, t, c, g, other or unknown
  misc_feature (682)..(682): "n" may be a, t, c, g, other or unknown
  misc_feature (720)..(720): "n" may be a, t, c, g, other or unknown
  misc_feature (750)..(750): "n" may be a, t, c, g, other or unknown
atttaaatgtctgtctacccagacttactcgttcaaaaactgtctcatttacattttgtagaagtagagtaccatagtggatagaaccacaggctctggggctgtcctgtctggggttatttgctagctctaccacttaacaatcttagacaagtcacttcagtcttttttttgagacaggatcttactttgccacccaagctggagtacagtttaagagctcactgaagcctctacctcccagactcaagtgatccttctgctttagcctccctaagtattgggattataggcatgagccactgtgcccagcctcacttctctttttttttttttgggatgggcccttgcactgtcacccaggctggagtgcagtagcctgatcatggctcataacagcctcaactttctgggctcaggtgattctcctgcttcagcctcccgagtagctgggactgcaggtgcatgccacaactggctaataattttttgtagagacaaggtctcgccatgttgcccaggctggtctcgaactcctgggatcaagcaatttgcccacctctgccttccaaagtgctggtatcgcaggcctgagccaccgtgcctggccctcacttcattggtgatgccttagctccctcatttgnaaaatggggataataatagcaccaacttatgtggnggttgtgagaattcaatgatttaagctataaagctggnattcttggcttagcttatcttgaggggggngg

SEQ ID NO: 800 - DNA, 746 bp, Homo sapiens
  misc_feature (721)..(721): "n" may be a, t, c, g, other or unknown
  misc_feature (733)..(733): "n" may be a, t, c, g, other or unknown
  misc_feature (736)..(736): "n" may be a, t, c, g, other or unknown
aaaagcgacggcgcagcacggtgcggcgcagctcctgctcgcctttcccttcgctgggcgagaggtgtctatggggcacccgctgccgccgccgctaccgccaccgccaccgccaccgccgccgagtgctgtctctatggcgaggaggaggaggaggagcgcgagctcagcgacacaagtacataaataaaggataaaatattttatgaaacaaatcttcaatcaagtataacattttgatgcttggcatctagactcccttgtgccctcactatgccagcggcaactgtagatcatagccaaagaatttgtgaagtttgggcttgcaacttggatgaagagatgaagaaaattcgtcaagttatccgaaaatataattacgttgctatggacaccgagtttccaggtgtggttgcaagacccattggagaattcaggagcaatgctgactatcaataccaactattgcggtgtaatgtagacttgttaaagataattcagctaggactgacatttatgaatgagcaaggagaataccctccaggaacttcaacttggcagtttaattttaaatttaatttgacggaggacatgtatgcccaggactctatagagctactaacaacatctggtatccagtttaaaaaacatgaggaggaaggaattgaaacccagtactttgcagaacttcttatgacttctggagtggtcctctgtgaangggtcaaatggntgncatttcatac

SEQ ID NO: 801 - DNA, 878 bp, Homo sapiens
  misc_feature (815)..(815): "n" may be a, t, c, g, other or unknown
  misc_feature (828)..(828): "n" may be a, t, c, g, other or unknown
  misc_feature (848)..(848): "n" may be a, t, c, g, other or unknown
atttttggagtcttccctaaggatcctctaccggcttttcgagtcagtgctgccgccgctgcccgcggctttgcagagcaggatgaatgtgatagaccacgtgcgggacatggcggccgcggggctgcactccaacgtgcggctcctcagcagcttgttacttacaatgagtaataacaaccctgagttattctccccacctcagaagtaccagcttttggtgtatcatgcagattctctctttcatgataaggaatatcggaatgctgtgagtaagtataccatggctttacagcagaagaaagcgctaagtaaaacttcaaaagtgagaccttcaactggaaattctgcatctactccacaaagtcagtgtcttccatctgaaattgaagtgaaatacaaaatggctgaatgttatacaatgctaaaacaagataaagatgccattgctatacttgatgggatcccttcaagacaaagaactcccaaaataaacatgatgctggcaaacctgtacaagaaggctggtcaggagcgcccttcagtcaccagctataaggaggtgctgaggcagtgcccattagcccttgatgccattctaggcttgttgtccctttctgtaaaaggggcagaggtggcatccatgacaatgaatgtgatccaaacccgtgcctaacttggactggctctctgtgtggatcaaagcgtatgcttttgtgcacactggtgacaactcaagagcaatcagtaccatctggtcactagagaaaaaatccttattgcgagaaaacgtggacctattgggaagcttgcanatctgtcttcaanctggagacattaaaacttgncctcagtttgacaggcccaatgtggatcct

SEQ ID NO: 802 - DNA, 422 bp, Homo sapiens
  misc_feature (386)..(386): "n" may be a, t, c, g, other or unknown
  misc_feature (407)..(407): "n" may be a, t, c, g, other or unknown
  misc_feature (421)..(421): "n" may be a, t, c, g, other or unknown
cttcagcgatggccgcggagctgagcatggggccagagctgcccaccagcccgctggccatggagtatgtcaacgacttcgacctgctcaagttcgacgtgaagaaggagccactggggcgcgcggagcgtccgggcaggccctgcacacgcctgcagccagccggctcggtgtcctccacaccgctcagcactccgtgtagctccgtgccctcgtcgcccagcttcagcccgaccgaacagaagacacacctctaggatctgtactggatggcgagcaactaccagcagatgaaccccgaggcgctcaacctgacgcccgaggacgcggtggaagcgctcatcggctcgcacccagtgccacagccgctgcaaagcttcgacagntttcgcggcgctcaccaccancaccatcaccaccnc

SEQ ID NO: 803 - DNA, 607 bp, Homo sapiens
  misc_feature (569)..(569): "n" may be a, t, c, g, other or unknown
  misc_feature (576)..(576): "n" may be a, t, c, g, other or unknown
  misc_feature (585)..(585): "n" may be a, t, c, g, other or unknown
tgatatgtcatttttttgtttgtttgtttttgttttgttttgttttgtttttgagacggagttttgctcttgttgcccaggctggagtgcaatggtgcaacctccgcctcccaggttcaagcaattctcctgcctcagccttccgagtagctgggattacaggcatgtgccaccacgcccggctaattttgtatttttagtagagatggggtttctccatattggtcaggctggttgtgaactcccgacctcaggtgatctgcctgcctcagcctcccaaagtgctgggattacaggcgtgagccactgcgccttgcctgatatgtgatttttaatcatttgaacaagactgttattctgggatcaaaagattttattatgtttttaagtgttattataaagaagatgtagttatcactgctgcaatcctagtgggatttgtacacattggtgtatagcttggtataaaatttgagtttataatggaaataaatatttaaaaagttaacacttaaaaaagaagttaagtggtatgagagtttttataatgaaaccttttagacatttanagaatancaccacatncccattgaaaatttaagtgaaa

SEQ ID NO: 804 - DNA, 763 bp, Homo sapiens
  misc_feature (675)..(675): "n" may be a, t, c, g, other or unknown
  misc_feature (711)..(711): "n" may be a, t, c, g, other or unknown
  misc_feature (750)..(750): "n" may be a, t, c, g, other or unknown
aggggcgggcgccgccatgggtaacctgttcggccgcaagaagcagagccgcgtcacggagcaggacaaggccatcctgcaactgaagcagcagcgggacaagctgaggcagtaccagaagaggatcgcccagcagctggagcgcgagcgcgccctggcccggcagctgctgcgggacggcaggaaggaacgggccaagctgctgctcaagaagaagcgataccaggagcagctcctggacaggacggagaaccagatcagcagcctggaggccatggttcagagtattgagttcacccagatcgaaatgaaagtgatggaggggctgcagttaggaaatgagtgtctgaacaagatgcaccaggtgatgtccattgaagaggtggagaggatcctggacgagacgcaggaggccgtggagtaccagcggcaaatagacgagctcctggcaggaagcttcactcaggaggatgaagacgccatcctggaggagctgagcgcaatcactcaggaacaaatagagctgccagaggttccctccgagccccttcctgagaagatcccagaaaacgtccctgtcaaggccaggcccaggcaggcggactggtggcagcttcgtaatgtggcctcgtcttgtgggactcacggggatgccccagggactgtggcccacanagagtttgggtcacggccagccccttgaccgggttncctggagcccaatgcgcacggtgctgagcagacttgcanccacgcaggcgca

SEQ ID NO: 805 - DNA, 748 bp, Homo sapiens
  misc_feature (643)..(643): "n" may be a, t, c, g, other or unknown
  misc_feature (726)..(726): "n" may be a, t, c, g, other or unknown
  misc_feature (734)..(734): "n" may be a, t, c, g, other or unknown
  misc_feature (743)..(743): "n" may be a, t, c, g, other or unknown
catttatagtcaagtattggggatttttaaacccttacaagatgaggctaaaagttatataacaaaatctgtagctaacttcatatagtattcttcatacatacacacacattgattggcagtgagagagaagggcagtaattgaccgatttagatattaattggtttgttacaatctgtgactctgagctaatcagaaccagaacatgtagttctgaagctgtgtttcagtctgctcattgtaccataattaggaagaactgctttggcaaatcatggaatttgggagcttatataaagggacttcattatcattattctataggaagaactgctttggcaaatcatggaatttgggagcttacgtaaggttacttcattatcattattctaacttatttttccaatgaagaagcagatctgtctggagaggttaagttgaactaaggttttatagaaagctggtggctaaggcagaactaaaggtaactttctaagacccaatctgatatccttgagtcttattgtaggcttttgcctttgttaagcatactccaactaataccccaactaattccaggcaaatggaagtttaatgcaaaagcgtcatggaatacagcagttttctaataatataatttgntatttagaatatacactgtcatgtcatgctatatgtaaaataattaggcaaccattaacaccattattacacagttggtttgnaaatgggntaatcctgnctcca

SEQ ID NO: 806 - DNA, 847 bp, Homo sapiens
tagcatatagtcacttggggctagtgcattaccatattggtcagtgcaacacttagattctgaggatgtttggcatactttaatttacaaaatcaaattccttagtttgaaataatgtaataagaacactggcaaaccattgtgagttttcctcactacacatatttggggctcctaggttaatattatgtctttgtttgggataactgtcaatagtggtctcctggttcaaatccaaatgaggcctcccacaggtgtggttaatgaaaatgcattgattaattgtgtgtttcttacacaaaaaaactaacatcctttaaatgattagactaatgttaaagaatattgacatgtttaaatgaaatatgcaacttagaacaaaatgtttagaagtaaacatttttcaagatataattggcaacttgctcataattttcttattctcaatcataacttaagcctaattctcagcagaagttgaattagagcttgcattcagtgacaaaacctagcagacaattattgaacactgcaaaaataaacatgttttccacatctgctaaaagatttaagacagatacaagccagacaagtccaaataatttacttataaaatgcaatatacttgtttaaccaaaaggaagtatatcaaatttatttgagttaaataggcattctattttgtagggatgaaattttgcttataatataatgaaaatgtaatgcactctttatgatcttaagaaattatttccaacagatttttatgcaataataaaagactgcttctaaagtttagagacgcatgagataggatattcatattaatgggttaatattaaatagc

SEQ ID NO: 807 - DNA, 768 bp, Homo sapiens
  misc_feature (715)..(715): "n" may be a, t, c, g, other or unknown
  misc_feature (757)..(757): "n" may be a, t, c, g, other or unknown
  misc_feature (766)..(766): "n" may be a, t, c, g, other or unknown
ccaacagctttggctaaattaaccctggctggacccattttcttccattttactcctttgccccttcaggtggacaatttgacctttgatggggaagaatatcagtgggcagcagaaggggcacggcccgcatgcattctcaagtcttctctgcctttccccacagcctccctctgcgctcctgggtgaacgtgattaagaacccccagttcgtgtttgacatccacaagggcagcatcacggacgcctgcctctctgtggtggcccagaccttcatggactcttgttcaacgtcagagcaccggctgggcaaggactccccctccaacaagctgctctatgccaaggacatccccagctacaagagctgggtggagagatactacgcagacatcgccaagctcccagccatcagtgaccaggacatgaatgcctacctcgccgagcagtcccgcctgcacgccgtggagttcaacatgctgagtgccctcaatgagatctactcctatgtcagcaagtatagtgaggagctcatcggggccctagagcaggatgagcaggcacggcggcagcggctggcttataaggtggagcagctcattaatgccatgtccattgagagctgagaggaggagcctcgcattcctgggaagagggacctgtccaagctgtcacactgggagtctcagatggaaggacaagtgatggggatcangccccagagcttgctgtccctgagacccatcctggggaaaanggaggactnct

SEQ ID NO: 808 - DNA, 847 bp, Homo sapiens
  misc_feature (596)..(596): "n" may be a, t, c, g, other or unknown
  misc_feature (707)..(707): "n" may be a, t, c, g, other or unknown
  misc_feature (826)..(826): "n" may be a, t, c, g, other or unknown
  misc_feature (829)..(829): "n" may be a, t, c, g, other or unknown
cagaagactgtagagctgcttttctcccaggggagaaactaatgatttgcagaagctagtaatttagagtctatggaacttgccccaggctctcccttccctcctgctttcagtggtactgaggagctgtatttaatctgaacagaaaattccattttcttctgatgattttgtgactatatgaaaatggaattaagggattgtagatttcttccccacaagcatattttaaaatccagagtaaaaataaaaactttcgcagagtaattgagaataaaggtgagaagttttctaataatactttaaaaaattctcatatacagataaattagaagaagcatgaagacttttccttaaagaaatgttcctttccctgcactttgaatagatggacaaaattagtatgcagggacagatccaacttttgtgggagctcatacactttggtgtcggtgcggagggggtggttcttctatagaaaaagaatgcaaaaatatctcccttttgcagaatgttcacattctgcacgtgtgagctgctgttctcctcacctgggcctggagaacatgggtgagatgctgagccccagggcttangccagctgcctctgcgtatggagggtgtgtgtgcccctcagctgtgccagggaggagtcacagcagacggcatgctgccatcctaatctctgtggcacacaggagaatgtncccacccccaaggaagtccccatgctaattctagaatacgtggctatgtcaccttacatgataatccagagactttgcaaatgggattgaatgaagggctggaaatggtcctggatttncanggagccctaatggtaccc

SEQ ID NO: 809 - DNA, 838 bp, Homo sapiens
  misc_feature (724)..(724): "n" may be a, t, c, g, other or unknown
  misc_feature (766)..(766): "n" may be a, t, c, g, other or unknown
  misc_feature (805)..(805): "n" may be a, t, c, g, other or unknown
  misc_feature (833)..(833): "n" may be a, t, c, g, other or unknown
taattctacatgtgtcgatggcattaataactacacatgcctttgcccacctgagtatacaggtgagttgtgtgaggagaagctggacttctgtgcccaggacctgaacccctgccagcacgattcaaagtgcatcctaactccaaagggattcaaatgtgactgcacaccagggtacgtaggtgaacactgcgacatcgattttgacgactgccaagacaacaagtgtaaaaacggagcccactgcacagatgcagtgaacggctatacgtgcatatgccccgaaggttacagtggcttgttctgtgagttttctccacccatggtcctccctcgtaccagcccctgtgataattttgattgtcagaatggagctcagtgtatcgtcagaataaatgagccaatatgtcagtgtttgcctggctatcagggagaaaagtgtgaaaaattggttagtgtgaattttataaacaaagagtcttatcttcagattccttcagccaaggttcggcctcagacgaacataacacttcagattgccacagatgaagacagcggaatcctcctgtataagggtgacaaagaccatatcgcggtagaactctatcgggggcgtgttcgtgccagctatgacaccggctctcatccagcttctgccatttacagtgtggagacaatcaatgatggaaacttccacattgtggaactacttgccttggatcanagtctctctttgtccgtggatggtgggaaccccaaaatcatnactaacttgtcaaagcaagtccactctgaattttgactnttccactctatgtaggaaggcatgccangggaa

SEQ ID NO: 810 - DNA, 850 bp, Homo sapiens
  misc_feature (764)..(764): "n" may be a, t, c, g, other or unknown
  misc_feature (766)..(766): "n" may be a, t, c, g, other or unknown
gcggccggggaaaaacccggatgagctgggcagcagtgttggcagtcgcggctgcgagatttgggcacttttgggggtgccggtggcccgggccgatggcgcaaggttgggcaggcttctctgaggaggaactgaggagactaaagcagactaaagatccatttgaaccacagcgacgtctccccgcgaagaaaagtcgacaacaacttcagcgagaaaaagcccttgtagagcaaagccaaaaacttgggcttcaagatggatcaacctcattacttccagagcagctgctttcagcaccaaaacagagagttaacgttcaaaaaccacctttttcttcccctactcttccgagtcatttcactctcacctcccccgttggtgatggacaaccacagggcattgaaagtcagccaaaggaactgggacttgagaattcccatgatggtcacaacaatgttgagattctacctccaaagccagattgcaaattggagaaaaagaaagtggaattgcaagaaaaatctcgttgggaagtcctccaacaagaacaacggctaatggaagagaaaaataaacgtaaaaaagctcttttggctaaagctattgcagaaagatccaaaagaactcaggcagagaccatgaaactaaagcggatccagaaggagttgcaggctttagatgacatggtgtcagctgacactggaattcttcaggaaccggattgatcaggccagcctagactattcatacgctcggaagcngnttgacagggctgaagcagagtacattgcagcaaagctagatatacagcgcaagactgagataaaagagcactccttgacacctt

SEQ ID NO: 811 - DNA, 840 bp, Homo sapiens
  misc_feature (623)..(623): "n" may be a, t, c, g, other or unknown
  misc_feature (700)..(700): "n" may be a, t, c, g, other or unknown
  misc_feature (715)..(715): "n" may be a, t, c, g, other or unknown
  misc_feature (743)..(743): "n" may be a, t, c, g, other or unknown
  misc_feature (806)..(806): "n" may be a, t, c, g, other or unknown
  misc_feature (839)..(839): "n" may be a, t, c, g, other or unknown
ccatttaaagaagatgctcggccttaaaggaaatggcggtgcggttctgtccatggcccttccttttcagccagagcagagagattcagaggatttattgaagaattttaattcagagtgtgatacacactgtggccttgatactgcacgacaagaatatttgggtaactcattaagacaggaatcagacttgaaaaaatccacctcgtcagataattcaagctctcatcatggtgaaaataaacaaaatctgactgttgatccctgtgacattttgggtggagttgataatcagcaaagactgctacacattgtctggcctcacaggtgggagcatgataaagatccagaaagcttttttaaggtattaatgcatcttaaagacttaggactcaatttccacgtgtctgtacttggagaaaccttcacagatgtcccagatattttttcagaggccaaaaaggcattgggatcttctgtcttacactggggctacttacccagcaaagatgactacttccaagtactgtgcatggctgatgttgtcatctcaacagctaagcatgaattctttggagtggcaatgttggaagctgtgtactgtgggtgttacccactttgtnctaaagatttggtttatcccgaaatatttccagctgaatatctgtattctacacctgaacagctttcaaaaaggctncagaatttctggcangagaccagtttttattaggaaaaccatnttttattaaggggtggaaaatcggcttcccgtttttccttggggccagccccttacattgggnaaaaattcaaggtccttctggctttaccaaccng

SEQ ID NO: 812 - DNA, 799 bp, Homo sapiens
  misc_feature (710)..(710): "n" may be a, t, c, g, other or unknown
  misc_feature (721)..(721): "n" may be a, t, c, g, other or unknown
  misc_feature (759)..(759): "n" may be a, t, c, g, other or unknown
ttgctcaccactgaaaaatgtcagtgtaaatgtgaccgctttaaagatgagtcaagtaattcttggaacagggaaaaaaatgaatttgccaggtcaggagttcacctgcctttgtcagagttgaacccaaccactcttgacctcgactcactcccttagggttaagaaagcccaaacacattcctgagcacagagcaaacactcccatgtcactgaaaagaaacaaaaggatgctaaaaagtgctcagacctgatcacattttttccaatattttttccttttttttttttttttttgagacagggtcttgctctatcacctaggctggagtgcatgtttttgagacagggtcttgctctatcacctaggctggagtgcatgatcatggctcactatagccttgaactcctgggctcaagccatcctcagcctcccaagttgcgaggactacaggtgtgcaccacaacgtcccagctactttttaaatttttagtagaaacgaggtctcactatggtgcccagactggtctcgaactccggagctcaagtgatcttcctgctttggcctcccaaagtgttagaattacaggcatgagccacctcgcctggctggtttttgcctttcttatagaccctgggcatgtaagcatttattagtttgcatttttgaaacagtaatttcaatattttagtgccaatgtcaggccgnttaaacactgnattacatatcttcatctgtctggtggaactattggtgngatcctagagaactgagtcctattctgccttcatttaaag

SEQ ID NO: 813 - DNA, 748 bp, Homo sapiens
  misc_feature (607)..(607): "n" may be a, t, c, g, other or unknown
  misc_feature (652)..(652): "n" may be a, t, c, g, other or unknown
  misc_feature (691)..(691): "n" may be a, t, c, g, other or unknown
  misc_feature (712)..(712): "n" may be a, t, c, g, other or unknown
agtcaaggaggacagtgacatgcatgtgtaggggctggggaccaatctgtcttgggggtcccagagatggatctgctgtgacagagggggccaagaccccgttcagagtgggggagggggagaggagtcacaggttcaacatgaagaacagttttaggaagtgggagggctggggacctacggcccatgcagtgccagatgggaccccatgcaggtgggttgctggaggaggacagggaaacagactgcagttttcagggatgcccttggaccttctgactcagtggcccaactcctggctgctgccctcctcccccactcccaagacctccaggtctgagcagctgtcctgcggttgaggtggacctgttggggaagtccatcaggaacctgccagggcccgaaagagagtgctgggggctctgtggcaggaaatgagggaagtgtccccagccacctccccccttagaggtgtggagattctggtcagtgggagaagctttaaaagagcttgttctccaggccccaaagtagggcaggagaggaggagtggcttccaggcaagtggctagacccagtcacctcattgtgaccttgcactctccanggatgtggtcccctgggtggtgggagctatatacccacattgcanagagcaaaaccaaggaagacgaacaaccactactctggntcttcaccttccacccccatnccccaagaaagaacgggtgcttggtgccgggccaca

SEQ ID NO: 814 - DNA, 847 bp, Homo sapiens
  misc_feature (738)..(738): "n" may be a, t, c, g, other or unknown
  misc_feature (771)..(771): "n" may be a, t, c, g, other or unknown
  misc_feature (799)..(799): "n" may be a, t, c, g, other or unknown
atgctgaaagaagcggagagtgttatcaccaggttgccatgggtcaaggtcaagctgatttagcaattcaaatgctaaaagaatgtgcccgcaatggagactggctctgtttgaagaacttacatcttgtggtatcttggctgccagttctggaaaaggaattgaatactcttcaacctaaagatacctttcgtctttggctcactgcagaagttcatcccaactttactcctattttactacagtcaagtctgaagataacatatgagtcacctccaggtttaaagaagaatttaatgcgtacttatgagtcttggactcctgagcaaattagcaaaaaagataatacacatcgagctcatgctctcttcagtcttgcatggtttcatgctgcatgtcaagaaagaagaaactatattcctcagggttggacaaagttttatgaattttctttatcagatcttcgggctgggtacaacattattgacagactttttgatggtgccaaagatgtacaatgggaatttgtacatggtttacttgaaaatgctatttatggaggacgtatagacaactattttgaccttagagttcttcagtcatacctgaagcagttttttaattcttcagttattgatgtattcaaccaaaggaacaagaaaagcatttttccatattccgtatctctaccacaatcctgcagcattttggactatcgtgctgtcattgagaaaattncagaggacgacaaacctagtttctttggtctgnctgccaatatcgctcgctcatcttcacngcatgacagttctcaaggtatttcacagttgaggattttgggcaaacc

SEQ ID NO: 815 - DNA, 808 bp, Homo sapiens
  misc_feature (250)..(250): "n" may be a, t, c, g, other or unknown
  misc_feature (293)..(293): "n" may be a, t, c, g, other or unknown
  misc_feature (347)..(347): "n" may be a, t, c, g, other or unknown
  misc_feature (526)..(526): "n" may be a, t, c, g, other or unknown
  misc_feature (549)..(549): "n" may be a, t, c, g, other or unknown
  misc_feature (672)..(672): "n" may be a, t, c, g, other or unknown
  misc_feature (717)..(717): "n" may be a, t, c, g, other or unknown
  misc_feature (723)..(723): "n" may be a, t, c, g, other or unknown
  misc_feature (787)..(787): "n" may be a, t, c, g, other or unknown
ttgttggcctactggaaaaaaaaaaaaaaaaaaaaaaaaaaaaacacattcgaggtggtaatatgatacttttaaaccggaacctgcatctgatatcctggaatttgtttctctacttcctgtatttctcctatcatgaatgactgctctgacaaagaatatgtcatgggacacaccttcagctaactttgctttttcatgcttgttttcaattcactagaagaaaatctaacttgtcaggaagcaagtncataataggaagtgtctgtcttagtttgtcttcaacagttaanaaaatgaatgtttccactcttactacattcttagtcacctgtccactgaccaanagccttgtggccctgagtaatcatttagaacttggaatcagcaggggcgctctctctagttgcagtttagggaatgggttattagctttctaggatatttatcatgctttgaaataatttaatgaattttattccataagatccaattcaggttaggcttgtttgattttttttttcanaaaatgtattccataaagtttgnacttagaccagacgggtgtctaagaatcattcatgagtaaatgtgtgttgaatatctacccttgaccttttttttgagaaatagagtaaacacagtccctgtagtctgacagctaatgggganaaagggtaggcttttcatcgaattaaatttctacatgcacctttnccccanaaatcttactcatggctgggctcaagtaagcttttttgaaaaatattggcatatcttcttcctnttccttttcctactggcttcc

SEQ ID NO: 816 - DNA, 808 bp, Homo sapiens
  misc_feature (732)..(732): "n" may be a, t, c, g, other or unknown
  misc_feature (790)..(790): "n" may be a, t, c, g, other or unknown
  misc_feature (794)..(794): "n" may be a, t, c, g, other or unknown
agagaaactgactcaggctccttgtggatattaatttgaggacagtagtggtaatcaaaagtacagtagagaacacttgacattgtgaatgtgacctctgaccccaaccgttgtaaagccaataactttgagggtgaataaggtaacacttgcttagaaaacccagccctttcccccagtctcctgcgctcttatacattgatactttacaactatttttgctgtacctctcagtctttcctggataatgggaccacttaaaaaaaaaagtgattcatcttcctcaaactagaatttcaaagcctaatactacactatgttccagcttcactgagttttgaacaaaaagacttaagcatgccttgtgtttaaggaaaaataattgatgtgtgaatggaatcaatcacctattgacgggaagggtgtcaggatgatgtagggtgatatgcctttaattggataaagagaactgtattaagtataactaatttaataactgattgaagcaccattcttaattttaaaatatttttgttaatttcttttgtggttttaaaaattaataatttttttttttttgagatggagttttgctcgttgcccaggctggaatgcaatggcgcgatctcagctcactgcaacctccgctcctgggttcaagagattctcctgcctcagcctcccaagtagctgggattacaggcgtgtgccaccacgaccagctaattttgnatttttagtagaaatggggtttcaccatgttggccaggttggtcttcgaactcctgancttnaagggatccacccg

SEQ ID NO: 817 - DNA, 820 bp, Homo sapiens
  misc_feature (762)..(762): "n" may be a, t, c, g, other or unknown
  misc_feature (775)..(775): "n" may be a, t, c, g, other or unknown
  misc_feature (813)..(813): "n" may be a, t, c, g, other or unknown
tgacttttgaggcaaaatatcaataggtcacatgaaaagtgagatgttcccggggacagagctggagatcaggagtgagtggacaagaaaggaatccaaggaaaatttcctaattctattatgatataatgtctatgaaaatatggaggagatgatatacattgagaaacacctctttgaagacattaagcattaatgtgtattaacttgatgcctagtataagaggatgaactaatttgcaacgtagtatatatggttaagagcacagattctagagctagactgcctgggtttgaattctggctttgttattttctaaagtatgcattggaaaagttaattaacttctctatgtcggtacacaatggggataatagtagttactctcataggaggctgttgtgaagatagagtacatgcacatatgtaaagcatttagcatatggcctggcacatagttcagtgcccgctgctcttagtattatttaaggagaagagctgtaagttgcaaaggtgattttaatagtgacattttggtggatggaagagattgcagaatggaggtaccagttgcccaggattttgaaaggagcagatcctgcccccaccctctgccccatgcagacaattaaagggtaggaatttttatttatttatttatttttgagacggagtcttgctctgcgcccagctggaatgcatggcgcaatcttgggtcactgcaagctccgcttctgggttcacgccattcttcctggctnaccttctgagcantggactacagcgcccgcaacatgcccggttggtttttnggatttt

SEQ ID NO: 818 - DNA, 821 bp, Homo sapiens
  misc_feature (662)..(662): "n" may be a, t, c, g, other or unknown
  misc_feature (753)..(753): "n" may be a, t, c, g, other or unknown
  misc_feature (812)..(812): "n" may be a, t, c, g, other or unknown
  misc_feature (818)..(818): "n" may be a, t, c, g, other or unknown
gggttgagcgggaggcgcgatcggtccggtcggtggctccccgcggcggggccgggcccgatctcgggcgggaaccgagcgcagagccggtagcgggaaggatgaccacgctcacacgacaagacctcaactttggccaagtggtggccgatgtgctctgcgagttcctggaggtggctgtgcatctcatcctctacgtgcgcgaggtctaccccgtgggcatcttccagaaacgcaagaagtacaacgtgccggtccagatgtcctgccacccggagctgaatcagtatatccaggacacgctgcactgcgtcaagccactcctggagaagaatgatgtggagaaagtggtggtggtgattttggataaagagcaccgcccagtggagaaattcgtctttgagatcacccagcctccactgctgtccatcagctcagactcgctgttgtctcatgtggagcagctgctccgggccttcatcctgaagatcagcgtgtgcgatgccgtcctggaccacaaccccccaggctgtaccttcacagtcctggtgcacacgagagaagccgccactcgcaacatggagaagatccaggtcatcaaggatttcccctggatcctggcggatgagcaggatgtccacatgcatgacccccggctgatnccactaaaaaccatgacgtcggacattttaaagatgcagctttacgtggaaaaaccgcgctcataaaggcagctgaaggggcacctggcancccacttgatgccccaaacttgtcagacttttggggatccccgcctaaggcaatgctgnattggnttg

SEQ ID NO: 819 - DNA, 691 bp, Homo sapiens
  misc_feature (484)..(484): "n" may be a, t, c, g, other or unknown
  misc_feature (528)..(528): "n" may be a, t, c, g, other or unknown
  misc_feature (629)..(629): "n" may be a, t, c, g, other or unknown
  misc_feature (648)..(648): "n" may be a, t, c, g, other or unknown
  misc_feature (691)..(691): "n" may be a, t, c, g, other or unknown
catactgtccccaaggtccatccattctcttccttttgaaggctgagttgtgccccactgtgtgcctagaccgcatctggttgacccatccatccgtcgatggacacattatgaatggtgctcctgtgaacactgtgtaccaataagtgctttttgagcatgatcacgtgcctggcattgtgctgggctgcagtgggaaatgaacttggttcccatgctctgggggtaatgttaagaagcaaacaccaatagatgtttactaagagactgcaatatgtcccgtgatgggaaagagcagtgttcggggagagaattatggcaggggtggaggtgggtggctgggacaatggtcaggtctcaggaagtggcctgaagaatggggaggagaggtgggcaggggtggggagggtccaggcagaagtaacaacatgtgtgaagccactggattgcgacagagttgcccgttggagggattgatgcttanatttctgcttcagtgtcttctccagcaagcatcctatcagcctncaggcccacctctccccaccatcttctcctctctgctcttattctagttcattcaaactgcctctttgctcaactatttctcccactgtccagtgagcggnttgagtgcaggaactggtntattttatgtttgcgccttcttttcatatcttaataggtgcan

SEQ ID NO: 820 - DNA, 841 bp, Homo sapiens
  misc_feature (817)..(817): "n" may be a, t, c, g, other or unknown
  misc_feature (839)..(839): "n" may be a, t, c, g, other or unknown
acatatatagggtacagtactttgcaaacctatttatccctgtaccacctagtaacatttttcaggaaaatgttttgagcacacaaatttgacctgttttaggaattcatacctttgacaatgttgaggacctttttttttctattataaagatgatgtgatattcacctatattactttttcccaattctctatctttaagatatttttccaatgtattatattcaaccctctgcttagtcccttccttctgctaagtaaagtggtggtttccatctgttgctacacatcagaaatacctagctctgaccctggagattctgtatgaatagaaatgccagaatacctgctcaggattctgtgttcattacaaacacccaggtgattctgatgcagccaaccctggtcctccaactgatgctttggaattgttgaaggaaaagcatgcgtgtttttttttttgcaagatggatgagtagcttggggcatagtttgtggtcctagaacacatgggttaaccatccatcctagtgagaacgatagcacaggcctccaatgaccccatgaggtgatgtactggctataacctaacatgagatgattattattaagaaaagcagaatacttctaaatgggcttttagccaccttcctaataatgaagtaccgtatatatgattaccatttgttttagtttcgagtaattcccttgtaaatgatgttttatttattctttaagaagaatactagattatattttctaaatgtgccaagtatctaagaatatattctttcccttctgctgataagagtatccntttaaccttaagccaaatcggnca

SEQ ID NO: 821 - DNA, 807 bp, Homo sapiens
  misc_feature (776)..(776): "n" may be a, t, c, g, other or unknown
  misc_feature (782)..(782): "n" may be a, t, c, g, other or unknown
  misc_feature (802)..(802): "n" may be a, t, c, g, other or unknown
ttgaggaaaataagcagaagaaaaataaaaatattttatattatgctttgtgtgttttacatttttatgcggtatcttctcaaagcttcccaacaatggggtaagctacagtctagaattgatattattctcacttgtgaggggaaaggtttcttggcatgagagaaatcttacaactgagtagggggtgtggaaaggatgacttaaagatttagttggtaaaagacagttacagaatttagcaaccatttgaatgcaggcccctaggataaagagtccaagataactgtgaatctgagccagggttgctggtatgtatggtgattttataacctacagaggaaagtgaggaggaacagctggtttgagatagaagattcattttaaacatgttgattttaaggtgctaatgttgcatccaggttatgtcacaaaatacccaaagccagactggagggcggagaagagctagcgagttctctagataaaaaagattcaggaggcagttgcatgggttgctcattttcgtatcctgtgcccttattttttccttcatctgctccatcgtcttccctacaatatagtcaccataacaaatttgagtagaattttgttttgtgtaaagaatatggtagccatagaagagaacattgacttgaaagaataatatttataaggaaggagttgcaaggaacatctagggaacataaaagtaaatgatccaagaagttaatgggttgggtggtaaagtggttatggaagctcacaactcgggnaggctnaagcaggaaaaatccttgancccgg

SEQ ID NO: 822 - DNA, 872 bp, Homo sapiens
  misc_feature (856)..(856): "n" may be a, t, c, g, other or unknown
attattattattattttttgagacggagcctctgtcacccaggctgcattgaagtggcacgatctcagctcactgcaacctccaccttccggtttcaagcgattctcctgcctcacgcctgtaattccagcacttcgggaggctgaggtgggaggattgcttgaggcctggagttcaagaccagcctgagcaacatagtgagacactttcctctacaaaaaaaaaacaaaaaaactggcccatggtggcgcacacctgtggtcctagcctatagacccagttactggggaggctgagacaggagggttgcttgagcacagaagttcaagcctgcagtgagctgtgattccaccattgtactccagcctgggtgatagactctgtctcaaaaaataaagtcagatggaatcatgctttaatactagatatatggatcattgagactgtctcaaaagaataaatgttatcagaaaaaaatttttactccgaaaaagaaagcatttgggttatggcaaccctattaatggatgaaagaataatagcactcttaattcaggcactttcaagatgaaaggataatgaagaaaagttattaagatatatttctgaactggaaggaaagaaactaacatttagttgcagttaaacaatatttagtacaaactgagttgacatccccgggttataattttatttctatcttggggttaattgaagcatgtccgccattccccagtaatatatgtgaaaatggctacatttacattaagccagatttattgctatgcttatcctgatatttcatagaaattggggtatttttcttttggactttagtagaaagttaaagcaaatntttaatgctgcctcaa

SEQ ID NO: 823 - DNA, 808 bp, Homo sapiens
  misc_feature (715)..(715): "n" may be a, t, c, g, other or unknown
  misc_feature (773)..(773): "n" may be a, t, c, g, other or unknown
  misc_feature (793)..(793): "n" may be a, t, c, g, other or unknown
tgtccggaccatgggcttgatttgagtacctattgccaggaagataggcagctcatctgtgtcctgtgtccagtcattggggctcaccagggccaccaactctccaccctagacgaagcctttgaagaattaagaagcaaagactcaggtggactgaaggccgctatgatcgaattggtggaaaggttgaagttcaagagctcagaccctaaagtaactcgggaccaaatgaagatgtttatacagcaggaatttaagaaagttcagaaagtgattgctgatgaggagcagaaggcccttcatctagtggacatccaagaggcaatggccacagctcatgtgactgagatactggcagacatccaatcccacatggataggttgatgactcagatggcccaagccaaggaacaacttgatacctctaatgaatcagctgagccaaaggcagagggcgatgaggaaggacccagtggtgccagtgaagaagaggacacatgaaggcttgctacccccagtggaagatcatcccctccccttgtgtgtatgtgacagcgtgtatgtaacggcttctgatttctgtgaaagctgctcagcaacaaacgtacttccaccagatgtgtccccagatccacagcaggcacatatctctccaagggatgaccagttttatgcttactgtgtgcttctcatcccctggttgtggtaggtcaanggaaaagagccccttttgatccacccaggagccaatttaagaaaggtcccttcaggtnaatcccttcaattggctggntttggaaccttactt

SEQ ID NO: 824 - DNA, 825 bp, Homo sapiens
  misc_feature (740)..(740): "n" may be a, t, c, g, other or unknown
  misc_feature (806)..(806): "n" may be a, t, c, g, other or unknown
  misc_feature (817)..(817): "n" may be a, t, c, g, other or unknown
ttcctatattttatcaatgaatatttattgagcacctcttttattctagccattttgctaggtatcccaaggaaagcctactgtgttctgaaaaattggaattcattaattaaattaaacaggactaacatactatacttttccatccagagaaatgcaaaattataccttgattcaagacaaaatagtttgtccctcccagccatagagaaagctgagttgtttgttacttttagatcttaggtacagaatctgataaagtctaggtggttctgtataccagcccttgaatttataatcgtagagacttgccttaaatatatgatcagtttaggtaagttcgagaaattctgaagtgtcaattatgttgtattagtccgttttcatgctgctgataaagacatacccaagactgggtaatttataaagaaaaagaggtttaatggactcacagttccacgtgactggggaggcctcacaatcatggcagaaggtgaaaggcctgtcttacatggctgcaggcaagggagaatgagagagccaagtgtaaggggaaactccttataaaaccatcagatctcatgagacttattcactaccatgagaacagtatgggagggaaccccccgcccccatgattcaattatctcccaccaggtccctcccacaacccgtgggaattataggagtttcaatcaagatgagatttgggtggggatagagccaaaccacaccatatntaaaaatagtatagataatagttatatggagtctacccactggaagggatacatgtttacctggtncccccagttanggtagccc

SEQ ID NO: 825 - DNA, 820 bp, Homo sapiens
  misc_feature (729)..(729): "n" may be a, t, c, g, other or unknown
  misc_feature (766)..(766): "n" may be a, t, c, g, other or unknown
  misc_feature (801)..(801): "n" may be a, t, c, g, other or unknown
ctaatcattgagagacatgacaccaagtaattccgaggctcagctttaatcttgacaacattcctgtcacattcactcccatgatagaagacagattgctttagaagacttaagttaccttgaccttaaactagaactttttattaacagctgttcccaagataaacatttaatacctctctggaagggagagattgagaacatttactgattcatcaaaaccttggggatttccttgttctctgaagcgtcagtgatatttttattagctctatttttatttcttaggtgcttagaaaaattcccatcttttcccatcagtgaccattcactagttcaaaatgggaaaaacaaaatctttgttagactttcatttctttcggtttattcaaccttgtattttaattgtagatagggataaattatctggtgtttgatacccttagaaagttcttcccacctggagtgtaaattagtttaaccattgtagaagatagtgtggtgattccgcagacctagaggcagaaatgccatttgacccagcaatcctattactaggtgtatacccaaaggaatataaatcattctgttataaagatacaagcacacatatgttcactacagtactattcaatactattcaatagcaaagacatggaatcaacccaagtacccatcggtgatagactaaataaagaaaatgtggtcatatgcaccatggaatactgnacagccataaaaaggaatgagatcatgtcctttgcanggggcatggatggaagtttggaagccattatcctnaacaaactaatgccggaat

SEQ ID NO: 826 - DNA, 837 bp, Homo sapiens
  misc_feature (775)..(775): "n" may be a, t, c, g, other or unknown
  misc_feature (788)..(788): "n" may be a, t, c, g, other or unknown
  misc_feature (809)..(809): "n" may be a, t, c, g, other or unknown
cttttcctctgggagcttgccgggctgcaggggagtcgagcactcggaggaggataggggaggatatggatgattaatgcggggtcctcacctaagggagcgtaaggggggattgtagaaagggaggcgcagatacgcgagtccacaaatgattgattgataacccttgtttactaagcgcctctcggggccaggagcgcagtcttcggggagtcagacaagtagacgattccactgtggtataaaaagcgtcacgaaggcagctcagggagtagcgagacgctcaggaatgctgtctgcctatgttgagttactgtgtccaagacgctgccaagagggactgggttagagaagaggcaattaggtgtctgcctaccagaaactgaccactcagtgcagaaaacggggaattcgtggagtgggtgaagaaatgagactgtggacaggagggggttcgcagcttacagagaggaatggccctcctctctatgcttcccccctttcttttaattacatacctaaccctcttcacgttggtttttcagcctaagaactctgtttactcaacattctaaattgcttgatgattcccaccacacctttcccatgtatgatttgagtatatgccctcccccacgttgttttatgagagcttttgttgatgttgctggtggtttcctcttcgtttttccttcatctcctctatgctatttgcttaaccattgtggctggacctccttgctctctaaaactggagtggctacggagacagttncagtgaaacttangatgttccatattggcgagtntttcaggctttgaaatgaaaagttctaa

SEQ ID NO: 827 - DNA, 746 bp, Homo sapiens
  misc_feature (512)..(512): "n" may be a, t, c, g, other or unknown
  misc_feature (669)..(669): "n" may be a, t, c, g, other or unknown
  misc_feature (675)..(675): "n" may be a, t, c, g, other or unknown
  misc_feature (732)..(732): "n" may be a, t, c, g, other or unknown
tccatacgcaggggctgcccatgtgcggcttcaaaggccgtgtgagccgagagcgttttgatcgccgactcgggcacctttctctggggaaggttgtctggcgcaggcggctggggctctggggtgcagtggctctcgctttaagaaacaggatcctgtacgcagccagcatctcatccccttcgaagtctgcggcagtaatctgctcacatcaggccacgagtatggtgcgggtaggatgcgtgcttctgtattctgtacctagtttccacccgaagctacaggtggggctcccagtgcagtgaccgtgatactcatgggccacgtggagtctgtagggctactcgctgggctgtgctggcttctgtgagctgatgatatggacctggcctgggcatatgaatcactggtctgtgctagcttctacgaactgatgatatggacctggcctgggcatatgaatcactgggctgtgctggcttctacgagctgatgatatggacctggcctgngcgcataagttcacaaggactttccagtctgggcatctgcccatccgtccacacgggaagggtcaggtcttgcagtcaaacttctcaacaacaaaggagttctcccctggcccctgaccttcttgatgcagcctgggcagggggtggcaatagcganggcggncatgagaagctgaagcggagcgtccgagcagatccgggccatcatgggtcctgcagnggccgcgaattacc

SEQ ID NO: 828 - DNA, 660 bp, Homo sapiens
  misc_feature (625)..(625): "n" may be a, t, c, g, other or unknown
  misc_feature (637)..(637): "n" may be a, t, c, g, other or unknown
  misc_feature (655)..(655): "n" may be a, t, c, g, other or unknown
aatcccagcgaggctggggctccggctcggcgcccccttcctcgctccctggtccggcgccccatgccgcccccgcccggtccccggctcccccagtcccccacttaggcgggctcacagatcccggggtgctggcgcgtgggccgggggcgcgtagggcgcctgcagacggcccctggaagggctctggtggggctgagcgctctgccgcgggggcgcgggcacagcaggaagcaggtccgcgtgggcgctgggggcatcagctaccggggtggtccgggctgaagagccaggcagccaaggcagccaccccggggggtgggcgactttgggggagggtctctgggcctggggggtggaggtgggatgggacctcgggaggctgagcctggggagctagggatagctctgcggggtggcggggctgcagatccccccttctgcccccactatgagaaggtgagtggtgactatgggcatcctgtgtatatcgtgcaggatgggcccccccagagccctccaaacatctactacaaggtatgagggctcctctcacgtggctatcctgaatccagcccttcttggggtgctcctccagtttaattcctggtttgagggacacctntaacatctcggncccctgtgcccccccagnccctt

SEQ ID NO: 829 - DNA, 818 bp, Homo sapiens
  misc_feature (788)..(788): "n" may be a, t, c, g, other or unknown
  misc_feature (794)..(794): "n" may be a, t, c, g, other or unknown
  misc_feature (796)..(796): "n" may be a, t, c, g, other or unknown
gggaaaaagtttgaccagcctcagaaggctttctctgtgtaaagaagtataatttctctgccgactccatttaatccactgcaaggcacctagagagactgctcctattttaaaagtgatgcaagcatcatgataagatatgtgtgaagcccactaggaaataaatcattctcttctctatgtttgacttgctagtaaacagaagacttcaagccagccaggaaattaaagtggcgactaaaacagccttaagaattgcagtggagcaaatcggtcattttttaaaaaaatatattttaacctacagtcaccagttttcattattctatttacctcactgaagtactcgcatgttgtttggtacccactgagcaactgtttcagttcctaaggtatttgctgagatgtgggtgaactccaaatggagaagtagtcactgtagactttcttcatggttgaccactccaaccttgcccacttttgcttcttggccatccactcagctgatgtttcctgggaagtgctaattttacctgtttccaaattggaaacacatttctcaatcattccgttctggcaaatgggaaacatccatttgctttgggcacagtggggatgggctgcaagttcttgcatatcctcccagtgaagcatttatttgctactatcagattttaccactatcaaatataattcaagggcagaattaaacgtgagtgtgtgtgtgtgtgtgtgtgtgtgtgtgctatgcatgctctaagtctgcatgggatatgggaatggaaaanggccantnaggaaattaatacccttatgcc

SEQ ID NO: 830 - DNA, 901 bp, Homo sapiens
  misc_feature (839)..(839): "n" may be a, t, c, g, other or unknown
  misc_feature (857)..(857): "n" may be a, t, c, g, other or unknown
  misc_feature (895)..(895): "n" may be a, t, c, g, other or unknown
tgttgtttttccctgtcccatacattaattctaggttcaaggccatgtcaccctaaagcagccctcacttcttttgcagctgcagtgctgttgcttaaccataactcttggcctctctccagactgtttttttttttttttttttttgcaaaatgtccttgatggtcataatggtgtattttttaaaaattccagttgtttttgtaagttttcttatatcccatcttacattcaattccccctgcaaacctcccactagataaaccacttcccgctctattctttgtcttgagactgacttctaggaagcctgtccacagctgcctcaggccgaaggctaactaggagaatattaggtcgtgtgcttggattcctgttctccaaacgattctaattaaaactagtccactacccccaccaacacgttcagaaggaaaaaaatgtagcagaatccccaaatgccctcatcacttcattataccatttgggtagctttatggcacctgtaggactagttcatgccaggcccatttgtaactgttttctctagttaaacatgatattgccattaacagcacattaaataggattacactgcttaagaatctaggaatttctcaaatatatgagaaaatgtgaaagcacagggataatagaaatttattttataaacacatgctaggagatggaattgtgtcatgatgatccacattaaagaaacatgattgaagggaatccattatttatactctgactttccattatatatatatattactccaaaagaagttattcatgtttcctaaatgggagcttaccccatcggggtaaaaatgggncctaacacttattcacanggccacaatttactttggacatgtaccttggcctctgnatggac

SEQ ID NO: 831 - DNA, 822 bp, Homo sapiens
  misc_feature (784)..(784): "n" may be a, t, c, g, other or unknown
  misc_feature (800)..(800): "n" may be a, t, c, g, other or unknown
  misc_feature (808)..(808): "n" may be a, t, c, g, other or unknown
ggaggagtacccgccaacaagcgggaccgagcaggaatccgtatctgggaacaggtgagagaggatgtgtgctgggccttggaggaagggggccgagaccgggccttacttctgtaacgatactgtgaggcatcggaaggctagcctgttgtgtccgttttgaaggtcggtgggctagactggctggccttctaggggtgtggagacttcccaactctgcccttgtgctttcctggaatccccaatatgcccggaccccggtttactcctttgctgcgagcccttctctcccgtccagagttgctccgagcctatctgctcagtcctagcgattcctgtggggcttgggacgcgcggtccaagcaccccggaccatatggatgcagcacccatgggttctcgctccaatgcttctttcctccttggggcgtaactcagaccctgggcacccctctccactgcccaggggagacctgggttctagatttggctctgcctctactatcttcctacctcctagagcctcagtttggcttgtgtaaaataggatgacttaagggtcctttcagcccctaatcctggggtactttactctgtaccgctccttacccagccttgtgcacgccatcttgaaggcactgagttctagcctgtttattgtaagtggtgattagttgggtctcagtcacccagccatacttttttgttccctgcgtatccttcctgtaattgtccccaagcacatttcacaagaaggaagggcactctgggctaaggccggggntggaagttattctgangaacttgncaccatgccctttg

SEQ ID NO: 832 - DNA, 804 bp, Homo sapiens
  misc_feature (687)..(687): "n" may be a, t, c, g, other or unknown
  misc_feature (733)..(733): "n" may be a, t, c, g, other or unknown
  misc_feature (802)..(803): "n" may be a, t, c, g, other or unknown
agtaactgagcgccagacatgaaccgcaagaaactgcagaagctgacggacaccttaaccaaaaattgcaagcattttaataaatttgaagtgaactgtcttataaagcttttttatgacttggtgggaggagtagagaggcaaggtctggttgttggactggatcgtaatgcatttcgaaacatcctgcatgtgacatttggaatgacagatgacatgattatggacagagtattccgaggttttgataaagataatgatggctgtgtaaatgtattggagtggattcatggattatcactgtttcttcgaggatctttggaagaaaaaatgaaatattgctttgaagtgtttgatttgaatggtgacggattcatttcaaaggaggaaatgtttcacatgttgaagaacagccttctcaaacagccatctgaggaagaccctgatgaaggaattaaagatttggttgaaataacactgaagaaaatggatcatgaccatgatgggaagctgtcttttgcagactatgaactggctgtgagagaagagactcttctactggaggcctttgggccatgtcttcctgatccaaagagccagatggaatttgaagctcaagtattcaaagatccaaatgaattcaatgatatgtgaataactaaatgtctatattgtctcaagtgagtnaaaaaggaggcacacacatattgcttattttttctacttagttcanaaaaatgatgttgaattgtgtgtttcagggtgaagatgaaggtcacttacatatatcatttaacatcanng

SEQ ID NO: 833 - DNA, 793 bp, Homo sapiens
  misc_feature (649)..(649): "n" may be a, t, c, g, other or unknown
  misc_feature (732)..(732): "n" may be a, t, c, g, other or unknown
  misc_feature (746)..(746): "n" may be a, t, c, g, other or unknown
  misc_feature (761)..(761): "n" may be a, t, c, g, other or unknown
aattgagatggtttactgtaaaattaaaatgggagttagttttctagacatgtaactctctggggagtataaaactggtcacaatgggctttgcgttgaagtatctgtccctcagatctcatcagaaggagtatataatacaaaaatataaattcaacctctgtatgttttcttctatgttttatgctgggactcactggagatctttgtaagtaatcaaagctggccctttatctttgattttggcttttagggaattctagggacttcctttccccaaattaaaactcattttgaggtgtttggttttgtcttttaatttttgcaacttcaaaattgatgactcagttctagtgtactttatcctcgaacttgtttaaaataggttactttcttgaaataaataataatataatgaagagatcatgacttggatttgggtgggggaattaaataccttttcaaaattgccatcagtatcatcttggatgaagaaagttcagtggttaaaagcgtcttctgaagtgtggtcatagtcggtgaggtttatttcagtttggcttctcattacaattttcagatgtatatcacatatatgtgaaaagtactgacaaaaataatttatgaaataaacacagtagggcatgangttgtgttatttgtgaggcacaatggagcatgacttgtagtcaacaaacatgggggcctgacaaagctctgctgggctattcngcaagactctatgnggatgcctcttgtanaatgggggtaataataccagcccgatctcata

SEQ ID NO: 834 - DNA, 803 bp, Homo sapiens
  misc_feature (757)..(757): "n" may be a, t, c, g, other or unknown
  misc_feature (768)..(768): "n" may be a, t, c, g, other or unknown
  misc_feature (796)..(796): "n" may be a, t, c, g, other or unknown
gtttaatatgaaggatgataagcatcaggtaaggaaaaaaggagaaataaaaccaagatatggtaatgtgaatacaaatgaaagttagcactggtggaaaggcaacagatctggcctgagtattttagaaagtttaaaaaatagtgaaaggaaacagtgaatagaaattttttattggaaaattatgtgaggcaaaaaaagcactacccaaaaggtctgagggaaaagatagggaattatcatgtagccatctgattaattttttgtttccctagaccccactcctctccctattccccaccaccatttggtgctccacattgcagacagggcaatatttctaaaatacaaaaataggtcatcatattccttgtagccctcagaatcaagtctgatacatgcagccaacaggcatatgaaaaactcagcatcactaatcattagggaaatgcaaatcaaaagcacaatgagataccatgtcacaccagtcagaatgctattattaaaaagtcaaaaaataaatgctggcgaggctgcagagaaaaggaatgcttatactctgttggtagaagtataaattagttcaaccgttgcagaaagcagcgtggctattcctcaaagagctaaaaacagaactaccatttgacccagcatttccattactgggtatatacctgaaggaatataaatcattctaccataaaaacacatgtaggtgaatgttcattgcagcactattcacaattgccaaagaccntgggaatcaancctaaaagctgatcaagtgaccagtttnggattaa

SEQ ID NO: 835 - DNA, 801 bp, Homo sapiens
  misc_feature (639)..(639): "n" may be a, t, c, g, other or unknown
  misc_feature (731)..(731): "n" may be a, t, c, g, other or unknown
  misc_feature (750)..(750): "n" may be a, t, c, g, other or unknown
  misc_feature (795)..(795): "n" may be a, t, c, g, other or unknown
aggtcatttgttgctgcatagcaaatcaccccaaaacatagtgacttgaaacaatttctttgggagaccgaggtgggtggattacttgaggccaggagtttgagaccagcctggccaacatggtgaaacctcgtctctactaaaaatacaaaaattagctaggtgtggtggtgtgtgcctgtagtcccggccactcaggagactgaggcatgagacttgtttcaacttgggggcagaggttgtagtgagctgagatcacgcggctgcaccccaacctgagtgacggagtgaaactctgtctcaacaacaacaacaaaaacaaaaacaaaacacaattttattatcgctcatggctttttttttttttttttcttgcttggggtctctcgtggttgcagccagatggtagctgcagctggattcatctggatggattcctgactcacatgtctggcagttgttgctggcattgtttgggactgacagtgaggaccatcagccagaacctacacatggcctccctgtgcggcccagtttcctcagagcatggtgggtgggcgccaagactgagtatctaagagagaggaactggaattctcttaaccctttgacctggaaactgtcaaaaatcacttctgncatattctgtgggtcaagtctaagagcccaaattaaagagaagggcacatggaccctacctttcaatgggaggagtgtaacagaatttttangttgggtttttaaaccatnacaagagccaaccatttgctaggcactttggaaaaacaccctttntttctg

SEQ ID NO: 836 - DNA, 849 bp, Homo sapiens
  misc_feature (743)..(743): "n" may be a, t, c, g, other or unknown
  misc_feature (754)..(754): "n" may be a, t, c, g, other or unknown
taaaaagcattaggcatataaatgtataaatatattttatcatgtacagtacaaaaatggaaccttatgcatgggccttaggaatacaggctagtatttcagcacagacttccctgcttgagttcttgctgatgcttgcaccgtgacagtgggcaccaacacagacgtgccacccaaccccctgcacacaccaccggccaccaggggcccccttgtgcgccttggctttataactcctctgggggtgatattggtggtgatcacagctcctagcataatgagagttccatttggtattgtcacacgtctcctgcctcgcttgggttgccatgtttgagcgatggccctgttgatttcaccctgccttttactgaatctgtaaattgttgtgcaattgtggttatagtagactgtagcacattgccttttctaaactgctacatgtttataatcttcatttttaaagtatgtgtaatttttttaagtatgtattctattcatatggtctgcttgtcagtgagccagacttgcttactatattcctttataataatgctagccacttcctggattctttagtaatgtgctgcatgcaagaactttccagtagcagtgaaggagggctgcctctccaagcttcctaagggatgctgccctgtgtggggatgcattgcagaggcactagtagcatgggggctagagtggggagcgagatgtaaaagggtggggggataggagaattncagaatgcttncagcattagggtcctgagaacttctgagttcagagaaacatgcaaaggtgactaacaaaatagctacttaccttgcagttctacagaccctggga

SEQ ID NO: 837 - DNA, 853 bp, Homo sapiens
  misc_feature (753)..(753): "n" may be a, t, c, g, other or unknown
  misc_feature (801)..(801): "n" may be a, t, c, g, other or unknown
  misc_feature (828)..(828): "n" may be a, t, c, g, other or unknown
actgtttaaacaataaaatgagctatgctacagactctggcctcatgttttatttttctcctcatcgtctccttgctgttctgcctacattaatgttgggtcagtagtgtcccagaaattgatcttggcccttaactttgggggttttgtagcactgatttaattattagcatctgggatagttaatatttcagttcaatatttaaccgtatatctgtgtatatctatataatccttccttgcagttcctaataaatacagtcatcccaagctttctaaacaatgacagtaaaaaaaaaaaaaagaaagtgcagttatagaatcgcagacctcactctctgagaaaggcctttgagcaatacgttgaagacgatgtgtgccatgatgactggactgtggtctctgtgagagaaaaaccacagggcatcaaacactgaacagaaaaggtaagccccggggacaccctgtggctgtgggtttagtggttacatgaatactgcaggagagcaatttcttcctgcaaatgcctgaaaaggagcagcatcttgtgtttccaagaagcagtgctacttttcaacacaagcaggggtgatgttcccttttcacagggagacatacaccaagggctaaaaccgaggaccgggtcccaaatccagcctcactgaaagcagcatttctgaatggagtcagctggagttcaataatagctaattgaaaaggaatgagcttaaatggttttgtgatccatctgantgatgtgcataaatgaagcaaaaataatgcaagcttcattggaaaatngagataaaaatgcccgggaattggctnttccaacccaagacttgctgagaca

SEQ ID NO: 838 - DNA, 874 bp, Homo sapiens
  misc_feature (633)..(633): "n" may be a, t, c, g, other or unknown
  misc_feature (657)..(657): "n" may be a, t, c, g, other or unknown
  misc_feature (725)..(725): "n" may be a, t, c, g, other or unknown
  misc_feature (835)..(835): "n" may be a, t, c, g, other or unknown
  misc_feature (873)..(873): "n" may be a, t, c, g, other or unknown
tgctgtgttctggctccccttactggaaaaggtctacgccaaggtccatgggtcctacgagcacctgtgggccgggcaggtggctggatgccctggtggacctgaccggcggcctggcagaaagatggaacctgaagggcgtagcaggaagcggaggccagcaggacaggacaggccgctgggagcacaggacttgtcggcagctgctccacctgaaggaccagtgtctgatcagctgctgcgtgctcagccccagagcaggtgcccgggagctgggggagttccatgccttcattgtctcggacctgcgggagctccagggtcaggcgggccagtgcatcctgctgctgcggatccagaacccctggggccggcggtgctggcaggggctctggagagaggggggtgaagggtggagccaggtagatgcagcggtagcatctgagctcctgtcccagctccaggaaggggagttctgggtggaggaggaggagttcctcagggagtttgacgagctcaccgttggctacccggtcacggaggccggccacctgcagagcctctacacagagaggctgctctgccatacgcgggcgctgcctggggcctgggtcaagggccagtcagcaggangctgccggaacaacagcggctttnccagcaaccccaaattcttgcttgcgggtctcagaaccgaatgaggtgtacattggccgtccttgcanaagatccaggcttgaacgccggcgggactggggcaaggccggggccccgggcacttggtggggttgacagtcattactttcgtggaagcccaacgaggcattcccgggcnagcacttaccaagcttgggggttctggaaccttttggna

SEQ ID NO: 839 - DNA, 828 bp, Homo sapiens
  misc_feature (670)..(670): "n" may be a, t, c, g, other or unknown
  misc_feature (742)..(742): "n" may be a, t, c, g, other or unknown
  misc_feature (789)..(789): "n" may be a, t, c, g, other or unknown
  misc_feature (822)..(822): "n" may be a, t, c, g, other or unknown
ttctaaaatggctccaattttgtgttttaagcttcagcttaagaggaagtttatgttctaattcttgactgagaatacagtattgagattctctgttttacagataacaactggtttttattactcattaagttcatttgcatcccgtagccctctgtaaatgtttcccctagttgcatgtacgtaaatgcacgcttatccagtgtatattagacatttttgtgctaaaatatattaagtgggatttttgtagcaaagcattctatttttctgttcttacagtgtgtgtgtgtgtgtgtgtgtgtgtgtgtatgcgtttttttaaccttaacttcagtttaaacactggtgtatttatttttttaagcaacttgactcttagaagccttagactgatttttttcaataaatattcaaccaaaaattataaatttattaagatgtggccttacatatggcattccttgtgttcgtaatgtgagatttttgatttagataaatcaagattcaggattaaagtttcattgtaagttgaaatagaaaatgtattaaaatgtctaggcttctgggaggaagttcttatactcttctttcttggcattagaaagaagcaatatgaatttttgtgaatattctaaatattcaggcaacactgttcagattgatttangtttgtcttaaccaatggtctttttttagaatttcaggtagtggcattcactgattatgcagctactatggnttttgtatgggacgtataaatcttgattatatccacagattttaagnctttaaagacttcctgctggattaacatattgnatggag

SEQ ID NO: 840 - DNA, 885 bp, Homo sapiens
  misc_feature (782)..(782): "n" may be a, t, c, g, other or unknown
  misc_feature (798)..(798): "n" may be a, t, c, g, other or unknown
  misc_feature (804)..(804): "n" may be a, t, c, g, other or unknown
  misc_feature (885)..(885): "n" may be a, t, c, g, other or unknown
tatcagaacaaaagatgttacacactgctggtggagaaataaattttgaaaaacaatgcaaattactgttttggaaagaaatctggtaatatttaggctgggcgtggtggctcacgcctgtagtcctagcactttgggaggccgaggcaggcaaattgtctgaggtcgggagttcgagaacagcctggccggcatggtgaaaccccgtctctactaaaaatacaaaaattagctgggcatggtggcaggcacctgtggtcccggctactcggggggctgaggcaggagaatcacttgaacccgggaggcagaggttgcagtgagccgggatcgtgccattgcactccaacctgggcaacagagcaaaaagattccatctcaaaagaaaagaaaagaaatctgttaatattattaaaatatttatgtcactttggagaatcttcccttagaagtaaaagctccaatacataaaagacagatgaacatgtgaacatggacatttattgtaaaaattgttcttaatggcaaaaaaacccccaaaaccaaagcaaacactagaatcaaagtaaatacccatcaactgggaaattgtagaaaggaaaaaactatagtgtatccattccatagaatgttaatatagccattaaggtggacaaattaaaactatgctagtggacttgagtggaattccacaatgttctcttgagtgaaaaatgcaaggtagatattaagtatgttaaatatgactccatttttgtaaatcattaacaaaatgtctctangtgtttgtcagcaatnaacggnatctatatatggttatttgattttatgtgcatgaagaaaagttttgaagaatatcattggcttggaaggaagtgggtaatn

SEQ ID NO: 841 - DNA, 843 bp, Homo sapiens
  misc_feature (761)..(761): "n" may be a, t, c, g, other or unknown
  misc_feature (797)..(797): "n" may be a, t, c, g, other or unknown
  misc_feature (818)..(818): "n" may be a, t, c, g, other or unknown
agaaactatgtagtgaaattacatagtgatttttcattctcgcagtaaaaatttcctgggatttttttctttttaatgggtgggaaactacctggaaatagtggatgccagagtcttaaacagaaggaatgaaataataaagatcagagcagaaataaatgaaatagaggccaggaatacaacagaaaagttcaacaaaacagagttggtttttgaaaaggtaaacaaaattgacagacctttagttggactaaccaagagaaaaaaaagtcaaaatacatgaaggagacattacaactgataccatagaaataataagatcataaaagactactctgagtaaatatatgccaaaaaattgaacaaactagaagaaatggataaattcctaaaacatacaacctatcaggaccacatcatgaaggaacagaaagtctgaacagacctataatgagtgaggagattgaatcactaagtcaaaacctcccaacaaatagaagcccaagagcagacagcttcacgggcaaattcctctgaacatctaaagacgaattaccaccaacccttctcaaacttccaaaaaaactgagcaggagagaacacttcccagattcattttatgaggccagcattacccttaaccaaagccagataaggacattgtaagaaaataaagttacaggccaatatccttgatgaacagttgcaaaaatcctcaacaaaatactagcaaactggaattggaatagcaccattaaaanggagccgtacacccatggatcaagtgaggatttttncctctggaatggtaaaaaatngggttcaaccattatgcccaaatca

SEQ ID NO: 842 - DNA, 742 bp, Homo sapiens
  misc_feature (571)..(571): "n" may be a, t, c, g, other or unknown
  misc_feature (673)..(673): "n" may be a, t, c, g, other or unknown
  misc_feature (683)..(683): "n" may be a, t, c, g, other or unknown
  misc_feature (736)..(736): "n" may be a, t, c, g, other or unknown
ttccggtcccggctcagcctccgacccaggtggtctggagcctgccgggagagtggtggcatctgagaggctggtcgtggactgtggttgggggaggtgggagctgttttaaccgtgtgccccctctcctgtgccggcgtgggcatcccccggggcagtggaacgcgggcgctcctccagcttccgagtccagccagcctgggcgcggggcgccgcccccgagacacccgaggagtccgttcctccctggttacgtggactgtggagctggtctcttgtggctcagcgccgtgcggaggttgaagcgtacctgcggaggtcgcaccagggcgtgaggaggaggaggaagggcatgagccgagcttgaggaatccgtgctccaaactctacactcaagggtggcccttgggtagggtgaagatcccctgtctttatcctagttccacaccttggtgtgggttactgggtgcaggatgaactgtcgctcggaggtgctggaggtgtcggtggaggggcggcaggtggaggaggccatgctggctgtgctgcacacggtgcttctgcaccgcancacaggcaagttccactacaagaaggagggcacctacttcactggcaccgtgggcacccaggatgttgactgtgacttcatcgacttcacttatgtgcctgnctcttctgangaactggatcgtgcccttgccaaggttgttggggagttcaaggatgcacttgngcaact

SEQ ID NO: 843 - DNA, 636 bp, Homo sapiens
  misc_feature (634)..(636): "n" may be a, t, c, g, other or unknown
gggaaataacatctataattaactataatttagatctcttgttagtattagattgctttttcttgtgttattgtcaacttgtttggtttctgttggaactgggggaaagaggaagaatcttacctgcataggatgtggaggaggcctatctgaaaaaatgatcaattttgcaattatcctcaaattcgtataaatcatgcagagtctaactaaaggatgggaataggaagcaaaacaaagtatctgtaagaggaccagagggattagaactatcaagtgataaatactactaggtggatgaaaatagtagcaaatcaggttacataaaagctttcttttcattggatttatttctcaatgcatttatttatacattctacttgctttaactctgtggtatcttagagatataagagataccgaaacagttggttttgccccaacttgtggagagtaaatatgaacattttagggccatgggcactatagatgattactaagttagataatacaagattactcctgtagctgatgacatttaagtaatgatagtgccctttcaaaattcaaaattcttttttctttattatttatttatttttagtactttcccactttgttttttttttttttnnn

SEQ ID NO: 844 - DNA, 856 bp, Homo sapiens
  misc_feature (720)..(720): "n" may be a, t, c, g, other or unknown
  misc_feature (742)..(742): "n" may be a, t, c, g, other or unknown
  misc_feature (795)..(795): "n" may be a, t, c, g, other or unknown
  misc_feature (824)..(824): "n" may be a, t, c, g, other or unknown
  misc_feature (844)..(844): "n" may be a, t, c, g, other or unknown
gtgaggacatgagatttgggaggggccagagatggaatgatatggtttggctgtgtccccacccaaatctcatcttcaattcccacatgttgtgggagggacctggtgggaggtaattgaatcatgggggcagatctttcctgtgctgttcttgtgttagtgaataagtctcacaagatctgatggttttaaaaagaggagattccttgcacaagctctctgtgcctgctaccatccatgtaagatgtgacttttctccttgccttcctccctgattgtgaggcttctccagccctgtggaactgtgagttctccattaaacctcttccctccattaaacctcttccctttgtaaattgtccactctcgggtgtatctttatcagcagcatgaaaatggacgaatacacatatataaaaattttacatgtataaaaatgaagctgctctgacagaagctgttagccttgtgctttgaaattctcttgtgtagtacttttccccacctcttccttgagttacattactagaattgaacatggagatcaatttgaaaaccactttctagtctagattcttccttttctagatgaggaagctgaaacctattgagtttataattatccttttctttggttttaatctgtaaagttatctggatttagaacagagaagaaaaaaatacatctaaactaacactgattctaggacctttcaacantgtgcaagtctgaaccgtcttncctggttttggtcatggtatcactactggtggtctggggaatcatgcccaaanttaatgcaatactctcttaaattaagttncctaaggcttttataacccnttttcttaactt

SEQ ID NO: 845 - DNA, 864 bp, Homo sapiens
  misc_feature (775)..(775): "n" may be a, t, c, g, other or unknown
  misc_feature (815)..(815): "n" may be a, t, c, g, other or unknown
  misc_feature (841)..(841): "n" may be a, t, c, g, other or unknown
ttttaataatgttgcaaaactctccaaacactactctgtgtggatgtctttcagaatatgatgaatactagtagtcttattctgcccttttctctctatcacaatatatacattctatattgcatacacatattttccaaatattacatatagtttcatgtaatttatagacctattaaggcccaaccattttcttggataggggattctttagaagtccagcttaaataaagcccgtatagaaagtttttttaaaatttatacataatcacctaaagtaaccttatctactgaactcttagtacatgctactggaaccttttatcatgtttcttcctggcttgcattacaacactgttgacatatctcagccttacttctaggcttctttgagagcatgactcatgtttgtattcctcactgaggttgaatgaataagagaaactacagtagtaggaaaaaacagtacatgtagatatcaatgaatatgaaagggtcaaatggatctattatagtaagcacaaaatcaactgacaccagcaaagtaaacccaaaatttttaatggtattttaatagatcaagaggagcaagcagatttttgagacagttgtctcctactttctctatcacagggagtaattttaaaagaaaaatgggaggggtaagtttctttaagagaaaattgtagtttaaaacaggtcatgggataattagaaataatttaatttctttagaggattttaatctttcaactgcttgcaattagatcctaangcaataaaaggaataaggagatttggaaaaccattgctgnaatctctgaagaaaagtggacatttngggagtaggttgaaagcaaagct

SEQ ID NO: 846 - DNA, 767 bp, Homo sapiens
  misc_feature (731)..(731): "n" may be a, t, c, g, other or unknown
  misc_feature (744)..(745): "n" may be a, t, c, g, other or unknown
tagtttaaataaatacatttaaatcttgttaaaatttaattgtttctggctgggcacggtggctcacacctgtaaccccaacactttgggtggctgaggcaggaggatcacttgaggtcaggagttcaaagccagcctggccaacatggcaaaacctcatctgtattaaaaatacaaaaattagccaaatgtggtggtacacgcctgtaatcccagctacttgggcatctgattcacaagagtcgtttgaccccaggaggtagaggttgcagtgagctgagatcgcaccactgcactccagcctggacgatagagtgagactctgtctcaaaaaaaaaaaaaaaaaaaaaaaaaattatttccataaagaatagatcaacatgtaggtataatgcctgctgttacttaataggcaagatcacgtctctggataccagcaccatgagagcagccatgaaaccaggctgggaggacctggtaagaaggtgtattcagaagttccatgcgcagcatgaaggagaatctgtgtcctatgctaagaggcatcatcatgaaggtaagcatctctaaatgatttttcttaaattattgcttcctgtgggagctttctgtcaatgattcctggagttcaccttgggaacagagctggtgactgttctcgtgagctgctcatctggccccagtgttgccatctaaaggaaaatttaacaggagaacctgtaggacagaanaatgatgaaagtnnaacaggagatgatagtgtcaca

SEQ ID NO: 847 - DNA, 868 bp, Homo sapiens
  misc_feature (742)..(742): "n" may be a, t, c, g, other or unknown
  misc_feature (761)..(761): "n" may be a, t, c, g, other or unknown
  misc_feature (864)..(864): "n" may be a, t, c, g, other or unknown
gtatgtgtttttaaactccaatgatataagctgtaattataatacaaagcaactaaattaattttaattattccaaataattagcttttttcataaaaagctagttattccaaatattagcttttttcatgaaaagctagttattccaaataattagcttttttcataaaaagctagttattccaaataattagcttttttcataaaaagctagttattccaaataattagcttttttcataaaaagctagttattccaaataattagcttttttcataaaaagctagttattccaaataattagcttttttcataaaaagctagttattccaaataattagcttttttcataaaaagctaatttaaatttggggcaagtgtattattaatggtacatattgtattaaagtttgtgtaatgtaatataaagtggccacattacaaaatataggttgtttcagcttgcaaaattaaacaactgtataaaacaaatttataactgattgctagtaagaggtaccatgtaagaattgtgtttccagctgaatgaagaaattttaaaacctggttccatatattacaaatcatgagccaggactttggtaggggaggaattgggggctttggctcccaaaaatctctgtcacataccccctccccaccacaagtacacaatctatggaaaacttggcttatcataattacagctttaagtaattttcccttctctttggatattgnatatttgcatattgaagangtcaaaacacagtaatacatgcatattaagagaattgcattcataaatagtcaagatatactaaaaattggcatttgaaattgaagcactagagtgcttaatngatg

SEQ ID NO: 848 - DNA, 746 bp, Homo sapiens
  misc_feature (712)..(712): "n" may be a, t, c, g, other or unknown
  misc_feature (720)..(720): "n" may be a, t, c, g, other or unknown
  misc_feature (738)..(738): "n" may be a, t, c, g, other or unknown
tttttgcgatttggtgtgtgtataaggcacagtcttctgaattactgaggaagcatgactgctgttcttgtctgcaaggtgcatgctttttttttttttttttttaaatcagaaaccactattgtatagatttcttgagagcagggactttgttttgttcattactgtacccatagcctctagaacagcatgtggcacgtagtaggcagtgagtaaatatttattgaatgaaggtatgaaactgtctcatttacttaaacagcaggcttttctttaatgttccttggtttgccccttttgttaggtcttcttttttttcttttgagatagggttgctctattgaggctggcatgcagtggtgtgatcttggctcactgcagcctccgcctcctgggctcaagcaagcctcccatctcagcctccttagtagctgggactacaggcgtgcaccaccacatctggctaatttttgtactttttgtagagacacggttttgccatgttgcccaggctggtcttgaaccccttggctgaagtgatctgcctgcctcggcctcccaaagtgctaggattgcaggcaagagccactatgtccagcctttttttttttttttaaacagagtcttgcgctgctgctcaggctaaaagtgcactggcacgatcagggctcactgcaccttgacctcctgggctgaaactgcctcctgcctnacttccgnatgcctacccccaacttnaccccaca

SEQ ID NO: 849 - DNA, 837 bp, Homo sapiens
  misc_feature (722)..(722): "n" may be a, t, c, g, other or unknown
  misc_feature (810)..(810): "n" may be a, t, c, g, other or unknown
  misc_feature (832)..(832): "n" may be a, t, c, g, other or unknown
  misc_feature (834)..(834): "n" may be a, t, c, g, other or unknown
atcatagtagaaccaccgtgttctaaccttattgtgtatcaccataacagtttattgtggctctgatgtcataaaggaagagacatggaggaagaaaaagggggaaaaacgtagtatttaaaattctttagtctttttctactacataggctgcgagatttccttcaaattttattaaagtataaattatgtatgtaaactaatgtcccgaaataagctcttaaagcttactttagctatttaaaggatttatggctttctgtgtttttctttttgttaatttaattttttttttttcttgagccagagtttgagatcgctcttgttgctcaagctggagtgcaatggcgcgatctcggctcactgcaacctctgcctcctgggttcaaacgattctgcctcagccacccgagtagctgggattacaggcatgtgccaccatgcctggctaattttttttgtatttttagtagaaacggggtttcaccatgttagccaggctggtctcaaacttctgacctcaggtgatccacccgccttggcctcccaaagtgctgggattacaggcatgagccgccacgcccggccaattttattcttaatttaaatagttttcccgggtttatcaagaatctttaaactttattccttccataaagtcattattatgaccacacccagtggaagaggaggaatgaaagatgcaaactttaaggtttcangatatttgaagtgttgggtgcattgagacccgtagctgataataatccctttaaatttccccgtttattaaagggttaaggccttttnctcaatcccaagtcctaaaatngntgg

SEQ ID NO: 850 - DNA, 772 bp, Homo sapiens
  misc_feature (676)..(676): "n" may be a, t, c, g, other or unknown
  misc_feature (719)..(719): "n" may be a, t, c, g, other or unknown
  misc_feature (738)..(738): "n" may be a, t, c, g, other or unknown
cttagacgctccccagatgattctaatgagcagcctggttgagaactacttcacgtggtagcgcctcctgcccagaaccgtgggatatagccctgggcaaaccctcaccaggatcaggcctgtcttccctatgaggtgtaacctatgctccaggctctgtaatgttcccccaggcaagagcttcctcctccagatttaagggtgcccaggctgggagactgtcccctgtctttcccaggtggtcctgtgcttcttgggctcatcacaggaaagacctgtcccaggtgcaaggtctctctgatgtagaaggcctcccctgagatggacagtctgggggatcttcccacgtgaacctgtctcttgctccgcaggtgtaaggtatgcccactgacctttttcaccaagtcagagatgcagatccactccaagtcgcacacagaggccaagccccacaagtgcccgcactgctccaagtcctttgccaacgcctcctacctggcccagcacctgcgcatccacctgggcgtcaagccctaccactgctcctactgtgataagtccttccggcagctctcccacctccagcagcacaccaggtgagtggcctgcctgctgccctgctgcagcccgactcagctcacacccgtggcctggcacatggagccagtgcaaggangggcaagggaccttttcaggtgcccattgcctcgggtcacggnccttgtggacctaactggncttactggtggtactggaccccgtcccactggtt

SEQ ID NO: 851 - DNA, 714 bp, Homo sapiens
  misc_feature (598)..(598): "n" may be a, t, c, g, other or unknown
  misc_feature (670)..(670): "n" may be a, t, c, g, other or unknown
  misc_feature (689)..(689): "n" may be a, t, c, g, other or unknown
  misc_feature (708)..(708): "n" may be a, t, c, g, other or unknown
ttaactgaaaaaagtagaacgttgaacagggcacaaattatcattttgtttatataacgaatacacacacaaaatggaattcattttttaaaaaatataacttatccaatgcctacaacgttccaagcatttttatagttgctagcactgccatggtgaacaaatttctaccacttcatcttgttctaatttgctttaacttactactacgtaaatcaatctgacttacatatatatatttcttgttttccatcagtctttccctactggagtgtcaacttgatcagagcaggaactttgtctgtcttgcccaccacttttcctccaacactagggaagggaattgaggagcctccctgtagagcagagagaaccagtgatggaaatgcaacaccatctggattagaagaagagggctgaggcaaagagaaggcaagagcaaaggaaggcaggaagcagttgcaggaaacaggggtgaactgaagagctggggtccaggaaaggtggagtagagaaggccaaggagacacagagaggtggcagacaggtgggaagaagccgtggtggggaatttcacagggagccttaggagagttgnttttttttttgggacggagtcttgctctgtcgcccaggctggagtgcagtgggtgcgatctcagctcactgntcactgcaagctctgcctnccagattcacgccattctnctggct

SEQ ID NO: 852 - DNA, 866 bp, Homo sapiens
  misc_feature (792)..(792): "n" may be a, t, c, g, other or unknown
  misc_feature (851)..(851): "n" may be a, t, c, g, other or unknown
  misc_feature (853)..(853): "n" may be a, t, c, g, other or unknown
ttgccaaaaaataaaaaaaaataaaaaataaaaacttgcctaagtttcttctcttacattttatttaggatttgcccttagacattatttagtgcttttctgaccctgtagggacggtgagaataattgaaacactagtttcttaaaatttctgttaaaattggttaaaggccatagaatttttttttttaagctaagcatgttatagagaggtatcctataagaagcaaggggcaggtaaagactttagagatgtatagtccagtgtgttaattaaaggatactacctacttctaattcggtatgtattaatcttttctgatatatctgttaaagtactcttcgcatatttttaaaaaattggcattttaaagtatagtctttgatggtagaaatgtgagattgacaaaaatcatgtcctcttatgtatgaatttagtcttacacagttcttcatatgatggaatctaaaacaaatgtagtcttgaaaacttttagtctactttggttacatgtgtttattattgctcaccttatagattaacagcagaaaagtataaattttaatatttctacctttctggcttgaggtctacagcattaatttctgaccagttaatgcaaactgagattcctattgtcctaagaaaatctgggaagttagtaacacaaacacatcttttgatttatttcaggaccaccataaacccattttgaattattcaacccattgctggaacttcttgaggtatgtattaattaagaagttggcctattaattgggaatggttcnttaagaactttaaagttggattattaaaaatttttggggccttaaaagtttggccaatnantcaaaaaccaaaa

SEQ ID NO: 853 - DNA, 847 bp, Homo sapiens
  misc_feature (708)..(708): "n" may be a, t, c, g, other or unknown
  misc_feature (779)..(779): "n" may be a, t, c, g, other or unknown
  misc_feature (818)..(818): "n" may be a, t, c, g, other or unknown
  misc_feature (847)..(847): "n" may be a, t, c, g, other or unknown
aaagattagggaggaaaagtcgcttaaaaatatatatatagaaacacataaacaaattctacaaacattcatgcttacggctataactgaaaaaacggatgagccatcatagtattcctatcttactgaaagcgaagggttatttgtctaatctaaggcaaaaatgagggtggaaattgagtacaaagaaagatatctgggccctaagcatgctctaaaatcccaccatccaataaatcctgcaacttcattttccaatttcattatcactctcttaagtatttcaaaagatcagcatcgtcaatatcagtgtcccaatgactcaccagctctgacagcctcattctccaggacaaccctattaaaaataaaacggatatatttggaggggacaggcgttctagggccctctttgcccaacaagtgtagaatcttagtagccagaacagtgtgttcacagtcctcaatgaattcacaaaggtgggctaggcctgcttctttactctcagggttctcttccacaatgctgattatacagtccacaatggcccgcttgtactcaaagcctccctggcaaaaaagaagataaaactgccattcattctagggacacattttggagaaatgcttacactccaaggtttatgcttataatattcaaatttcatttcccaccttttatgaaagaagcaaaagtgtttttttctncaagtggggaaagcaaagcaatggcatgtttagtaataagacagtaaccagacttagtgtctacttgagangcatactgagatgataaggaaatcttaaaacactatggnatttcatggcaatcctaagaatttaagan

SEQ ID NO: 854 - DNA, 698 bp, Homo sapiens
  misc_feature (641)..(641): "n" may be a, t, c, g, other or unknown
  misc_feature (663)..(663): "n" may be a, t, c, g, other or unknown
  misc_feature (682)..(682): "n" may be a, t, c, g, other or unknown
gaaatggggcccccagacgtggaggaggaggagggaggaggccagggggaggaagaggaggaggaagaggaggatgaagaggccgaggaggagcgcctggctctggaatgggccctgggcgcggacgaggacttcctgctggagcacatccgcatcctcaaggtgctgtggtgcttcctgatccatgtgcagggcagtatccgccagttcgccgcctgccttgtgctcaccgacttcggcatcgcagtcttcgagatcccgcaccaggagtctcggggcagcagccagcacatcctctcctccctgcgctttgtcttttgcttcccgcatggcgacctcaccgagtttggcttcctcatgccggagctgtgtctggtgctcaaggtacggcacagtgagaacacgctcttcattatctcggacgccgccaacctgcacgagttccacgcggacctgcgctcatgctttgcaccccagcacatggccatgctgtgtagccccatcctctacggcagccacaccagcctgcaggagttcctgcgccagctgctcaccttctacaaggtggctggcggctgccaggagcgcaccagggctgcttccccgtctacctggtctacagtgacaagcgcatggtgcanacggccgccggggactacttangcaacatcgagtgggccancttgcacactctgtta

SEQ ID NO: 855 - DNA, 755 bp, Homo sapiens
  misc_feature (562)..(562): "n" may be a, t, c, g, other or unknown
  misc_feature (678)..(678): "n" may be a, t, c, g, other or unknown
  misc_feature (699)..(699): "n" may be a, t, c, g, other or unknown
  misc_feature (729)..(729): "n" may be a, t, c, g, other or unknown
aacctagaaaaggcaccactgaaagtacttgaaaactggtggtcagtacttgaacctccactattcctcaagatagtagaactttttaaggaagttgtggtacatcttttgaaactctacaagatcggtattcccccttctgaaagaagaattttcaacagttttcttcatactgcattaaaggttttagaaatactacatagggtaaatgagaaaatgggacagattatacagtatgataaattttatatacatgaagtacaagaattgatagacataagaaatgattatatcaactgggtccaacagcaggcctatggaatggtaggttttctgtgcaatttgtgatttcatttttatgtatatgtatctaataaaaaaaggaacaattgcttggttttgaaatgagaaagttttttcagaacttttatccagaacttactttttaaataataacacattgcaaaggagtgctatatattttacaatatttatatgcaaacattctactcttttaccaaagccaaaccaaagaaatggattacactgtaaaacaaaacanaacaagacaaaaaaaacctacaagtgtgaaatggatttttaactcttttattttccatgaggttgcctcttatttctccagtgttgaaaatactggcattcttcatactggaactnctaagaatgcattattggtgngaaattggtgcttcaagactaccaaaagangactgggtgtggtggctcatgccctg

SEQ ID NO: 856 - DNA, 793 bp, Homo sapiens
  misc_feature (724)..(724): "n" may be a, t, c, g, other or unknown
  misc_feature (758)..(758): "n" may be a, t, c, g, other or unknown
  misc_feature (765)..(765): "n" may be a, t, c, g, other or unknown
agcaaattttacatattttaaacgagaaaattggtaatgtgagaccaaattgcgtgtactatagctgggagaactttttgaataaggtctgtctgaacgtttctttttgctctaagagtaatttttgaggaagttgaaaacttatggaagagatgagaaacaagtggtttatcctaaataggtattttttatcagtgagttagattgatatggagtcatctcacttggatttatcccagtagctgagtgaacttctgttgtttcccttctagactcatatgtagcctcagtgttagagatgaagaatatagatacgaaacttttcagaatagtgtttgcaagtagaaggtgcacgttattcattggtttaacaactctcttgattaagaaaattcaggctttttgtcagggcagcataaatacctaaattagacctcaaaattttagtaataattcgtcattgtatatttagcttgcagttgtaatcatgtgacttttattaataccagtagctctggaaatatgactcttttaagacatatttacagtagaaagttaaaattagtattttaatttaatatttagttaatgtggttgaggcttaggtatttcacacttaagaaatctgtggtaattggtcatgattgtgcttttcacagtttatttatttagagacaaggtctcactctcttgcccaggcttgagtacagtggcgtgatctcgntcactgcacctctgctgccggctcaagtgatctnctacctnaaccttgcagtactggactattgcatgc

SEQ ID NO: 857 - DNA, 834 bp, Homo sapiens
  misc_feature (767)..(767): "n" may be a, t, c, g, other or unknown
  misc_feature (790)..(790): "n" may be a, t, c, g, other or unknown
  misc_feature (832)..(832): "n" may be a, t, c, g, other or unknown
gcagaaccagaaaaaccatgcaactactttaaccaccttctactcctttcatcggaaatgaggtaggtacaaggtacgaggtgtgaggtgcaacacctcaaactgaagtgaaacacccgaaccaagatttttcttatataggcaattaaactgcttgtttcaaatttccctttagttggatgtggcaatctggagcaatttcctcatagtactatgaaatataaatggtgagatttccaactagatccacaaatgcctaggtagttagaaaccaaaagtcaagaaaccaaaagtcaacaactgaagtactttagaaaccatgaattaactacccacattaaccccactccaccaaaactgctctagaccttatcattaccaaattattattttcctagacacactatttgacagttgagactctgctcttaaatcactcccttattagcatttcgcccttccaattcacccctcagatgactcaaacatattttacttagtgatttccccatgtttcagccattgcctctttcaacagttgtctctacctgtttttctacttgtaaacacccttcccctgccatttcaccatcaatacattatttggagggaattcattagggacatagttctaagaagggtaaagaaggaaaatcattaagtgagaaaacatttattatgcagtagggaatggtatggacttacaggaatcaagggagtacttttaacaattatttagaatgtatagcattctgacctttttcagntaaagtgctatcaaaaccaaacngaagttggtagggacaaacaggctaggaatcccagtggatantg

SEQ ID NO: 858 - DNA, 751 bp, Homo sapiens
  misc_feature (553)..(553): "n" may be a, t, c, g, other or unknown
  misc_feature (660)..(660): "n" may be a, t, c, g, other or unknown
  misc_feature (667)..(667): "n" may be a, t, c, g, other or unknown
  misc_feature (705)..(705): "n" may be a, t, c, g, other or unknown
gcatcccgggactgaacccctcctccctttcacagattacctcatccgagcaagattcctccctccctccctcctagagacctgatcccgccacatccccgcctccctctctgggcagatgtgttactcctagggcagttttcctctcgggcgtctctcgggtgatggcctcatccagggccacgttctcctggcccttggggatcgtgtcccttccagcaccttgctttcgaaaacccgatgaaccctcgcgccatccccgggccaggtccctatactgccagccactcccccttccttcacctccaccctctacccccaccccaagcagaccgatcctcccccatcccgcccttctcttctcgtcatttcattattgatccaccttttcctaggccaatcctggggcttggaaggggtgggggaagccaggttggggtgaggagagtagataagggacagttatactttagtgtggtggcggtggttgctttgggatgggagaaaaaggattatcaagcaaagttattccttagaaaggacttggggttgnctctgattcttgtaaggggacccaaggtggatgaagggtcagagcgttgccccttccccattagtactggggcaagaacggagttgcttctataaacattattcggnccccttnagcaaaaaggaaagttgcccaaggaaagggaagttganttcaagttcaaccagtggcgttgcgcatttggtttccattggatgc

SEQ ID NO: 859 - DNA, 832 bp, Homo sapiens
  misc_feature (692)..(692): "n" may be a, t, c, g, other or unknown
  misc_feature (710)..(710): "n" may be a, t, c, g, other or unknown
  misc_feature (738)..(738): "n" may be a, t, c, g, other or unknown
  misc_feature (805)..(805): "n" may be a, t, c, g, other or unknown
  misc_feature (821)..(821): "n" may be a, t, c, g, other or unknown
gtgatcggtttccggtcagtggtgtggtaccgggtacccggagacgtgtatcggacggtgggccgcagccatggccgagagaaaacctaacggtggcagcggcggcgcctccacttcctcatcgggcactaacttacttttctcctcctcggccacggagttcagcttcaatgtgcccttcatcccagtcacccaggcctccgcttctccggcctccctgctcttaccgggagaggattccacagatgttggtgaggaggacagcttccttggtcagacttctattcacacatctgccccacagacatttagttacttctctcaggtatcaagcagcagtgatccttttgggaatattggacagtcaccattaacaactgcagcaacctcagttggacaatcaggattccccaagcccctgactgctctcccttttacaactggatcccaagatgtctcgaatgcattttcaccatccatttcgaaggctcaacctggtgctccaccttcctcactgatgggaataaattcttatctgccttctcagccaagtagtctccctccttcatattttgggaaccaaccccaaggaattccccaaccaggatacaatccatatcgccatacccctggcagcagcagggctaatccttacattgcaccaccccagctgcagcagtgccaaacaccangcccttctgctcatcctncacttctggaccccctgtcagatgtacnagatgcctcagttgaccattggtggttgtggtgcatggcattggacctggtgtgacttacgctttangacattattgatgtgnggatgaattta

SEQ ID NO: 860 - DNA, 841 bp, Homo sapiens
  misc_feature (793)..(793): "n" may be a, t, c, g, other or unknown
  misc_feature (802)..(802): "n" may be a, t, c, g, other or unknown
  misc_feature (837)..(837): "n" may be a, t, c, g, other or unknown
aaacgcaaggcttgaattttctcggggccttatgatgctggttcttgagaagttagccactgatattccttgtctgctatatgatgacaatctcttctgtcatttggtggatgaagtactcttgtttgaaagggagctacacagtgttcatggctatcctggcacttttgctagttgtatgcatattctatcagaggaaacctgttttcagagatggttgacggtggagagaaaatttgctcttcaaaaaatggactcaatgctttcctcagaagctgcctgggtatcgcaatataaggatatcactgacgtggatgaaatgaaagttccagattgtgcagaaacttttatgactctactcttggttataactgacaggtataaaaatcttcccacagcttcccgaaagcttcagttcctggagttacagaaggacttagtagatgattttaggatacgattaacacaagtgatgaaagaagagactagagcttcccttggctttcgatactgtgcaattcttaatgctgtgaactacatctcaacagtactagcagattgggctgacaatgttttctttctacaacttcaacaggctgcactggaggtgtttgcagagaataatactctgagtaaattgcagctaggacagctagcctctatggagagctctgctttgatgacatgattaacctcttagaacgtttaaagcatgatatgttgacccgtcaagtagaccacgtttttagagaagttaaagatgctgcaaaattgtataaaaaagaaagatggntggccttgncatctcagtcagacagccatgatgtccctgtccantcgg

SEQ ID NO: 861 - DNA, 858 bp, Homo sapiens
  misc_feature (750)..(750): "n" may be a, t, c, g, other or unknown
  misc_feature (857)..(857): "n" may be a, t, c, g, other or unknown
aaagagtgtaatctcacgtatcactaaggtgctgatgagtcccaaatcataatacctaccatgccttttctgtatgacatttccagctgttggacatctttttgttttttgtttttttctcccctagacggagtcttgctctgtttcccaggctggaatgcagtggcacgatctcagctcactgcaacctctgcctcccaggttcaagcgattcttctggtctcagcctccggagtagctgggattataggcacatgccaccacgcccagccaatttttgtatttttagtagagatggggtttcaccatgttggccaggcttgtctcaaactcctgaactcaggtgatccaccagcctcggcctcccaaagtgctgggattacaggcatgagccaccacgcccggccttttttttttttcttttctttttgagatggagtcttgccctgtcgcccaggctggagtgcaatggcgcgatctcggctcgctgcaacctccgcttcccaggttcaagcgattctcctgcctcagcctcccgagtgtgggattacaggtgcgcaccaccacgcccagctaatttttttgtatttttagtagagacggggtttcaccatgttggtcaggctggtcttgaactcctgacctcgtgatccacctgctttggccttccaaagtgctgggattacagacatgagccaccacccccagctgctggtagacatctttatctggatgtcctacagataactnacatgacttcactggttgccattgcagttaaagcatgactgccttcaaagcttgaaacatgagaatcatcttaacaaatggggatttctttaattcaacagatattnt

SEQ ID NO: 862 - DNA, 863 bp, Homo sapiens
  misc_feature (835)..(835): "n" may be a, t, c, g, other or unknown
  misc_feature (859)..(859): "n" may be a, t, c, g, other or unknown
aaaatcctatagacagactacaggggaaaaatcccagagcccctacaaatccatctccaaactcaaatgagaactgagctcaaaaagcccactagcaaaccagaagtgtgctagccacccacttaaactttctttttcagacatctctttcagatatacattttccattactatccagggagacaaaataagcccttaaacctcccttcactcagacatcgtatgatgaatgtcagacatcctactgatatggtttggatgtttgtccgctccaaatctcatgatgaaatgtaatccccagtgttggagatgaggcctggtgggaggtgtctggatgatgggggcagatccctcatgaatgggttagtgccatccccttggtgatgagtcagttcacaccagatctggttgtttaagtgtgagtggcacctctccctccctcttttgctctggctgttgctgtcaccatgtgatatgctggctcctcattgccttccaccgtgactgtaaacttcttgaggcctcaccggaaagatattccagcaccacacttctcgtactgtctgcagaaccttgagccaggcaggtgtcttttctttataaattacccaggctaaaatggcatcatgatttctcccactaatcttcagactgttaataggatgcactttactcctgtgactagattgtgttaccagtacaaggaaagggagaccacctgggtggtcctaaccaaatcatgagaaccctctggaactcgattggccctggctggtaaccaaggaggaggtcagagagtccaagcctgtgaaagattccccgcatcattactggntttagagttgaagggccacatggngagg

SEQ ID NO: 863 - DNA, 861 bp, Homo sapiens
  misc_feature (852)..(852): "n" may be a, t, c, g, other or unknown
gaaatgaaggcaagaattttgaatttttaaaaaccaactaagactttgatcacttgttgaggatgtttctctctcataaatgaaagaaaaacgtattcacaagacaagaagtataaaaagttgagaggaatgacaactgagtccactcactcgaagaatgtcagtacttcatcatcttctttgggcaaacatacacaaatgcatcatacatgtgtggtgagcttatcaccagtgatggttttctgtgctagaaatgactcttaatttgaattttggagtgctttttctcttttttttacaatgtgtgttccaactctttgtgttaaatagatttaagtaaaggaggtaaatgctaaattcatagtgttttttacctgtatcacttccctgtgtattatggaaaaattagagattttaacgttattcaaagttttactggaagcaaaactgtgccagggacagagatatacaatttaagttttctctttttggcaactgcacttgcttaaaatgtactgaatgtcagctggatttcacagcatatcagatttacagtctttgtcttatcaaggcctttactgtatgttttatactaaccagatgggaaacacattgagcatcatatctgacatgtatgcctaagggaggagctcccccatggatcatggcgttaatgtttacaggacacttactattcttagcattattgatgtttgctttctctacttttgaggaatctgtgagcaattattccgaatgggcagttttcacagatgatatagatcagtttaaaaccccagaaagtgcaagatttcagacccacccaaagcttgaagaaaagtatgcttcatncaagtttat

SEQ ID NO: 864 - DNA, 877 bp, Homo sapiens
  misc_feature (759)..(759): "n" may be a, t, c, g, other or unknown
  misc_feature (848)..(848): "n" may be a, t, c, g, other or unknown
  misc_feature (874)..(874): "n" may be a, t, c, g, other or unknown
cttctacaaggaaacaaaaggaaaccgaattcactgctcaataaatgtgggaattcctggagttatctacattggcagctgtcatgagtggttactaggaatctagctaaatccctaagtaactgggcgatggatttgggtgggggaattgtcacacctctgcttataagagaggatggagtcgtgtagttgggcttcccacgtgacgtctaggtcctagaattgtgttctgtggacagacagtccagcacgcatgttttgaatacttcctacgggccaagaattggactaagtaagactttcaggttgaagaaggcttagtccctgcccttgtggagggcatggttcagattgagagagaaatgaatatgtaactatggttaattataataaccagtcaaagtactaattactagaggcatgagaaggtgttgtaggtaccagaggggccaacctattttgcccttgtggatgagaaacttatcacagagggtgacatttaggatggtcttcgctgcatgtagtaggtactcaaggaacatgcagcttgctgtgtgctgatatttcttaaaattcttttgtgcctattttatcagtctgtgggccaatttgcaaattagttattaaaaggtattgctttcagtgagaaagctttatgaaatgggccagccctcctccttgttagaatgagtggccgcttagcgatttcatgtttggcccacttggagctgtggctgacctatgggcccagacatgtanctggtgttttcacaaatagccctgaacctggatcccatgagcacacttctacttttcaagcagttgcttggaagaacccatatcttatnccagcatgccccctaaacccaaaagnttt

SEQ ID NO: 865 - DNA, 874 bp, Homo sapiens
  misc_feature (771)..(771): "n" may be a, t, c, g, other or unknown
aggcattttactaaccaatactcattaagcatagcgtggattcatatgacatcaaggagctattttatttggtaaaacgaaaaagcacaagaatgaacgaacgcaagaactgaaacagtggagacacctagaatgacttgtctaagatctaaatcattttgttgtcttcccagcgtacttattatcctgatcattgtcatcagcattgtttgggtccttttagcacagatttctcaaaatgggtaactccataacagttggaagcttacgaattcatataatttgtaagaggtcaatttggaagtacctatctattttaaaattccaataacctgggaatttcatcccatgtctagagtcttttatgtaaaatatttccacaattaggagaaatatgtgcatggggattttctatgtagcggtgttttgatggaatagaaaattgggataaaccaaatttccatcacgaaggaaatagtaatatgctgaataataatacagcgaatattatgcaggctttaaacatcaaaaaagagttcaacttctgacttccgatgatggtgttgaagcaggtcactgctggtttacatttgattttcatgtgggaactctggaagtccgccttagtgattttacatgtggctaaattgagctaatgacaagctgttcgaagtatggcaaaatggaactttaaaacagtatcttgtcaacaaccaagaggacctgtttcacataaagcccacgcattcatctgcctgtccatcattctgnctggccacacgggcatcattccgttagtggactgaatgcccgtgtcgagctgacaagcccatacctcctggtcctagtcacccttaattcttcaacaagtcct

SEQ ID NO: 866 - DNA, 820 bp, Homo sapiens
  misc_feature (740)..(740): "n" may be a, t, c, g, other or unknown
  misc_feature (744)..(744): "n" may be a, t, c, g, other or unknown
  misc_feature (816)..(816): "n" may be a, t, c, g, other or unknown
cttcctggggggctgtggcctgagccctgcacccactggggactatggcttcccagcagatggcaagccatatgtggcaggtgcgctgacagccattgtggccggcgaggaggagctccgtggcagctataactgggactacctgctgagctggtgccctcagttccaaccactggccagtgtcttcacagagatcgctcggctcaaggatgaagcgtggcccacccaggagccaagtctgtgccccccaagccagcaaacacagctgcagcccgggccatcttcccaccagcttctcaccgctcccccatcagccatgaaggctccctgtcctcagctgccatgtcccccagcttctcaccctctctgtctcctctggctgctcgctcacccgttgtctcaccatttggggtggcccagggtccctcagcctcagcactcagcgcagagtctggcctggagccacctgatgacacggagctgcacatctagctgtggcccaggctgggccccgacctgggatgcgcacagtgtccccaacgcaggccccactctgagcctgccctgggcagcctcggactatgactggctacggggaggccaccaccaggccccagctctccaccctgaactccccagccccctcagagtactaggaccacagaagccctgttgctactgacctgtgaccaggtccaatgtggggagaaatatgaaggaggtagcagccctgggttctnctcntgagggatccctgccctgaccagcaccctgagatggagctgagactttatttattgggggtaagggggattnggag

SEQ ID NO: 867 - DNA, 871 bp, Homo sapiens
  misc_feature (784)..(784): "n" may be a, t, c, g, other or unknown
  misc_feature (811)..(811): "n" may be a, t, c, g, other or unknown
gatttccttaattaagatgatcagaggagacttccaagtggagatggtatttgacatgagcagaattttgaaatcaggaaagggctatcatcaaggtgatttttttaaaaaacttgctttaaatatttattgtaaaaagcaaagctgtaaaaactatttaagctgatacttctgcctcttaatttgttttcatgtgaataatttttaagtaattaaatggcattttagtcgggaaaaatagaaaatatgaaacatttataattcttaatattctgaaaactcttcaagttttcagcatggtagaagtagattattttagctatttatttaaactcaattttcttcttgttttaaaaaaccatagcctttcgttgttgtttctcttctttttgacaactattgccaaataagttttatggaatacttgggtttttcttccccatgtaatgctgggcagttagcaatagttctgaattcaggtcacttctctgttgataagtgtaaaatgcatatctataggtcagtgctaacaaggggtctagttagcttcttagctatctgcagaatatattttcttttcatcacaaaacaagtaagactagatttggcatccttcattatcccaaaatgaagcaaaactacttgagtcatttggattatgcccaggaaaacatattgactcagaaagataaacaaggctgggcgcagtggctcacgcctgtaatcccagcactctgggacgccaagcggacagctcacctgaggtcaggagttcgagacccgnctagccaacagggcgaaacctcgtctncagtaaaaatccaaaattaccggcctggtggtggcccctgtaccccagccctcaggaggt

SEQ ID NO: 868 - DNA, 822 bp, Homo sapiens
  misc_feature (743)..(743): "n" may be a, t, c, g, other or unknown
  misc_feature (798)..(798): "n" may be a, t, c, g, other or unknown
  misc_feature (822)..(822): "n" may be a, t, c, g, other or unknown
gttgaagattttcctgagacctcagagcccgtttggatactgggtagaaaatacagcattttcacagaaaaggacgagatcttgtctgatgtggcatctagactttggtttacatacaggaaaaactttccagccattggaggttgtcgggacatttcactctccccacctcggacacaggctggggctgcatgctgcggtgtggacagatgatctttgcccaagccctggtgtgccggcacctaggccgagattggaggtggacacaaaggaagaggcagccagacagctacttcagcgtcctcaacgcattcatcgacaggaaggacagttactactccattcaccagatagcgcaaatgggagttggcgaaggcaagtccataggccagtggtacgggcccaacactgtcgcccaggtcctgaagaagcttgctgtcttcgatacgtggagctccttggcggtccacattgcaatggacaacactgttgtgatggaggaaatcagaaggttgtgcaggaccagcgttccctgtgcaggcgccactgcgtttcctgcagattccgaccggcactgcaacggattccctgccggagctgaggtcaccaacaggcccgtcgccatggagacccctggtacttctcattcccctgcgcctggggctcacggacatcaacgaggcctacgtggagacgcttgaagcactgcttcatgatgccccagtccctgggcgtcatcgganggaagcccaacagcgcccactactttatcggctacgttggtgaaggggcttaatntacctggacccccacaccaacgcn

SEQ ID NO: 869 - DNA, 818 bp, Homo sapiens
  misc_feature (809)..(809): "n" may be a, t, c, g, other or unknown
  misc_feature (811)..(811): "n" may be a, t, c, g, other or unknown
  misc_feature (813)..(813): "n" may be a, t, c, g, other or unknown
ttccagccctggccccaccttcccttcagcagtccgtgttgtctgggtagtctgtggccagtgtagccctgttgcagagtgaggtctccgctgaaaggagaactggcgtggtcgttgtttgaaaagaatcaggccccagcaaggttcactggaagctaacactggacgcagcagagtctgggtctgacaggaggtcagcgtcaccattttgagggtgatggacatgttttctgcactctagcactgtgtggaagcgctggctgacagcagcctggctgtccgaattccaaagaaatgggctccttctaaatattcaggtgctgctgcatactcgggagcacacgctttccttgcccttgcaggtgggggtgtccttggatggagagggtgctcctctgtgccgcgtctcagcagccccaccagagctgcctccccttccccatgcaggtgcagggagctcacctgaggctgaggcaggcccaggcccagcacttgcaggaggtccggctggtgccccaggaccgtgtggccgagctgcatcgcctgctcagccttcagggagagcaggccaggaggcgcctggatgcacagcgggaagaacatgagaaacagctgaaagccacagaagagcgggtggaagaggcggagatgattctgaagagtatggaaatgctccttcaagagaaaagtggataagctgaaggagcagtttgaaaagaacacgaagtccgacctgcttgctgaaggaactgtaccttggagaacgcccacctggtgagagcactttaaggccaccgaggagaagcaancnangcgcc

SEQ ID NO: 870 - DNA, 738 bp, Homo sapiens
  misc_feature (704)..(704): "n" may be a, t, c, g, other or unknown
  misc_feature (718)..(718): "n" may be a, t, c, g, other or unknown
  misc_feature (736)..(736): "n" may be a, t, c, g, other or unknown
tttatattttacccaaacaattagtaaactggtagttgaaaaggaaaggattaagtaatgtagtttctttctccacattctgctgctgcttgaatcccattccaaaacagtttagcatcatatattattaccactctctgaatatcactgttgttgatatgcttaacataccttgatcttcaaaaaggaaaaaaagcgagaaagagaatgagttttggggagttgtctcttttgtctttacatgacacaaagcatgaaacatgttttctttttcagcagtcctttgccatgtgttatgactgaatgttgctccccaaataccatcacaccgggggttagagcttcaacctccagtatgatggtattgaggttagagcttcaacctccagtgtgatggtatcggggttagagcttcaatctccagtgtgatggtactgcggttagagcttcaatctccagtgtgatggtatcggggttagagcttcaatctccagtgtgatggtatcggggttagagcttcaatctccagtgtgatggtactgcggttagagcttcagtctccagtgtgatggtatcggggttagagcttcaatctccagtgtgatggtatcggggttagagcttcaatctccagtgtgatggtactgcagttagagcttcaatctccagtgtgatggtattagggttagatcttcaatctccantgtgatggtatcanggttagagcttcaacctnca

SEQ ID NO: 871 - DNA, 872 bp, Homo sapiens
  misc_feature (759)..(759): "n" may be a, t, c, g, other or unknown
ttagcgtctcagttgcgctgcagccggggaggaaggaggaggccgagcctggggcggagtttgggctgactggggctggaccgggcaagacgccgccgctgcccggatgttgcgatggctgatcgggggaggccgagaaccgcagggactggccgagaaatctcctttacagacaataggtgaagaacaaacccagaatccctacactgaactgctagtactgaaggctcatcatgatattgtacgatttctggtacagttagatgactacagatttgcatctgctggtgatgatggaattgtagttgtgtggaatgcccagacaggggaaaaacttttagaactgaatggacacactcaaaagataacagctattattacatttccttccttggaatcttgtgaagagaaaaatcaactcatcttgacagcctctgctgatagaacagttattgtgtgggatggtgatactaccagacaagttcagagaatatcatgcttccagtctactgtaaagtgtttaactgttcttcagagactagatgtttggctttctggtgggaatgacctgtgtgtgtggaaccgaaaattagatctcctgtgtaagactagccacctttctgatacaggtattagtgctttggttgaaatacctaagaactgtgttgtggcagcagttggcaaagaactgataattttcaggttggtagcacccacagaaggatcactagaatgggatattcttgaagttaacgcctncttgatcaccaggataatattctctcattgattaatggcaatgatttgagttttgcaccggttccacgttggaaaacttgatcatttgggatccctgactgggacctgcaggc

SEQ ID NO: 872 - DNA, 863 bp, Homo sapiens
  misc_feature (746)..(746): "n" may be a, t, c, g, other or unknown
  misc_feature (776)..(776): "n" may be a, t, c, g, other or unknown
  misc_feature (837)..(837): "n" may be a, t, c, g, other or unknown
tttttttttttggtggaggtggggtttcgccacgttggccaggttggttttggactgctgacctcaggtggtccacccacctctgcctcccgaagtgctgggattacaggcgtgagccaccacaaccagcctcccttttgtcagcttatcaccccacccttatgaccttatttaaccttaattacctcccaaaggccctgtctccaaatacagtccctgttggaggtcagagcttcagcatatgaatttagtcatgggtaggtgacacaattcagtccataacagatggtcaaagtctgacccatagtgttcaacagctgctgttagttactctccttggctagtagtatgccttgaggcattaaagaacaaacacacaaagctagtgtggtgtaggaggcaccctgagaagttctgtgatgggctctgtctcctggtgctgcagaggaaggcatttgtgtgtaagtgactggtggcctcaaccatgggagggtctcagatttcaacatcctcctaaatcccttgggggtgtttttgtggaattcagattctgcctaacaggctggggaggtacaggctaagggcctacatttcttttctttttcttttttgagacacagtctcactttgtcacccaggtgaggcgatcatggctcaatgtagcctcaacctcccccaggctcaagcgatccttccacctcagcctcctgggactacaggcacataccaccacagctggctaatgnatttttttgtagagacgaggttcactatgntgcccagctggcttgactctgggctcagtgatcctctgccttggcttccaagggctggggntatagggggagccccacacctgatca

SEQ ID NO: 873 - DNA, 588 bp, Homo sapiens
  misc_feature (561)..(561): "n" may be a, t, c, g, other or unknown
  misc_feature (587)..(588): "n" may be a, t, c, g, other or unknown
aagttacaaaactgtagaaatagagaagagattggtggtttccagggcttaaggaagggattagggtaagggaggtgagtggatgtcaccctaaagggcagcccctcgggatcctggtggtgataggacagttctgtggctgtgtccacgtcagcatcctggtgaccctgtgatatagtgacacaggctcctaccatgggggaaagaaggcacgtgagacctctgtatttttacttccaactacacgtgactacacttatctcaaaatgaaaagtttaattaaaaagaaaaacctcggctgggcgtggtggctcatgcctataatcctagcactttggaaggccgaggcaggtgggtcacgaggtcaggagatcgagaccatcctggccaacatggtgaaaccctgtctctattaaaaatacaaaagttagctgggtatggtggcgggcgcctataatcccagctactcgggaagctgaggcaggagaatcattcgaacccgggaggcggagattgcagtgagccgagatcgtgccactgcactccggcctggtgacagancgagactccgtctcaaaaaaaaaaann

SEQ ID NO: 874 - DNA, 888 bp, Homo sapiens
  misc_feature (83)..(83): "n" may be a, t, c, g, other or unknown
  misc_feature (858)..(858): "n" may be a, t, c, g, other or unknown
  misc_feature (880)..(880): "n" may be a, t, c, g, other or unknown
atacttagagctagaggagaggcccctacacatgtccaccatcatccttcgggctcatttaacacttactatttctatactgnaaatggcaacaagattttccctacctcaacctgactttgagcaggagctgttgctggctaagcagcctgaacaattcacatgctcagaacagagcctactcgaccccctccctcccagagcagtcggccccagaagaaggagagacggttcaacgtgctcaaccaaatattctgcaaaaacaagaaagaagagcagagagcccatcagaaggatcccagcagggaccgatacagagaggaggacacctcagaagtcaatgacatcatcaccacctttgatagcatcgtgggtaccaactgccaagaacagcctggtgatcaggtggctatggttgaatttaagaagaaaacctcagacaattcaaaatatctcttaccagaaaagaaaccgctggcccgtaaggggcttccaccaatcagaacgcagagtctcccacccatcaccctgggcaataacttcctaacagcctcccatagggccacttcccatgcaggcctgagctctgctcctcatcatatggcccagcgatctcagaaaagtcgaagtgagcaggatttattaaataacagaactggctgccagatgttactagataacccctggaagagtgattctaatcaggtattttcctacaaagtttgggactgtgtcttcttctgataagctgctggacagattgctcagtgtccgggctggtcaccaagaggtttccgtgccaccacaccttcgccatctacttaatccatcatcaggacaaaattttaggattctttncccaacggacccaaatcagggnctttcttt

SEQ ID NO: 875 - DNA, 852 bp, Homo sapiens
  misc_feature (809)..(809): "n" may be a, t, c, g, other or unknown
  misc_feature (850)..(850): "n" may be a, t, c, g, other or unknown
aataaacaaacccgtaaactgttttatacagagacagcaaaatcttggtttattaaaggacagtgttactccagataacacgtaagtttcttcttgcttttcagagacctgctttcccctcctcccgtctcccctctcttgccttcttccttgcctctcacctgtaagatattattttatcctatgttgaagggagggggaaagtccccgtttatgaaagtcgctttctttttattcatggacttgttttaaaatgtaaattgcaacatagtaatttatttttaatttgtagttggatgtcgtggaccaaacgccagaaagtgttcccaaaacctgacgttaaattgcctgaaactttaaattgtgctttttttctcattataaaaagggaaactgtattaatcttattctatcctcttttctttctttttgttgaacatattcattgtttgtttattaataaattaccattcagtttgaatgagacctatatgtctggatactttaatagagctttaattattacgaaaaaagatttcagagataaaacactagaagttacctattctccacctaaatctctgaaaaatggagaaaccctctgactagtccatgtcaaattttactaaaagtctttttgtttagatttattttcctgcagcatcttctgcaaaatgtactatatagtcagcttgctttgaggctagtaaaaagatatttttctaaacagattggagttggcatataaacaaatacgttttctcactaatgacagtccatgattcggaaattttaagcccatgaatcancccgcggtcttaccacggtgatgcctgtgtgccgagagatngg

SEQ ID NO: 876 - DNA, 800 bp, Homo sapiens
  misc_feature (710)..(710): "n" may be a, t, c, g, other or unknown
  misc_feature (746)..(746): "n" may be a, t, c, g, other or unknown
  misc_feature (779)..(779): "n" may be a, t, c, g, other or unknown
gcagtaccaagtttgtgcaccacgtcatgagcctctacgaaaagcagctgtcccaccagtccccagaatgactgcgcttctcctacaaggttctctgggcactgcccagcctgagtctcggccctcacccagggccctgcctcgggtcctgggcctgctccccgcttcctccccttcagtcagctccctctgtcctctgtcagcctggcctgacccctaccctccagcattgctcttcctactgtacatattggggagtggggggcagggtcgggaagggacatgccaggccaggcctggggccccggggcctgacccacaccacgcagaccccgggctccagtttttaacgatggttccatcaatacctgatccagaatgtttccgtgctacactttgtgtcctgctgcaatgtgttctgtctgtccatccatctctgccctctgtaccggacactgtgtctcctcagccaggaaggggtaatgagctccagcccctaagcaaccggacttgcctgcctcggcctcacccgcacttctcccaaaaggcagatgacggggagttaggcatggggagctccagaaggtcaccagagagctttcagctgagggagagttctctaggttggagtgggcatcacagccagggtggcctctgggtgtcagatgctctcaggagggtgcccagcctgtgaggcactggcaaggtanggggcagatggggcatggagaacccagaggatctangccctgttggggaaggggaagggagctcaaggnttgggtggggacttaagccca

SEQ ID NO: 877 - DNA, 817 bp, Homo sapiens
  misc_feature (615)..(615): "n" may be a, t, c, g, other or unknown
  misc_feature (626)..(626): "n" may be a, t, c, g, other or unknown
  misc_feature (645)..(645): "n" may be a, t, c, g, other or unknown
  misc_feature (759)..(759): "n" may be a, t, c, g, other or unknown
  misc_feature (792)..(792): "n" may be a, t, c, g, other or unknown
  misc_feature (816)..(816): "n" may be a, t, c, g, other or unknown
attgtttttagagatggggtcttgctgtgttgtctgggccggagtacactgggtactcacagatgtgatcattgcatactacagccttgaactcctgggctcaagtgatccttctgtctcagtttcctgagtacctgggactagaggtgtgtgccaccatgctggttatctataagcacttttacatttatttatttatttaattcttgtagtaactctttgtggtaggtactattatcctaagtatcctataagaaaactgaggcactgcagtttgaagtaacttgctcagggtcactcagccaattaatggtggagcagcggtttgaacccaggctgtctagttccagagcctatagccataactactgtcttatattatccctaagaatatgtaaacgacgtcaaaccccgatcctatttgcattcccctccccacgggtaactatcttgaatcagagccaatactacactattgcattagggtataatttaatcattaggggatagttttcatgcagaaactagaaagcactgatgagattctactcatgttcctttaccagctttagttataaaggggaagcgggaaaatggaagcacgtagaggataangtgataacctncaccttaccatcttccttnttccccttaaaaaagaaatggaatgttgagtctatctggaatgttgacaggttaaaaaaggagctgttgaagcctgtcgtcacagtagcatcgaaaaggtgaaaaatttggctncacttggagtccttggaaatggcaaggtgtgtnattgggaatattgggctattggtng

SEQ ID NO: 878 - DNA, 859 bp, Homo sapiens
  misc_feature (270)..(270): "n" may be a, t, c, g, other or unknown
  misc_feature (375)..(375): "n" may be a, t, c, g, other or unknown
  misc_feature (592)..(592): "n" may be a, t, c, g, other or unknown
  misc_feature (622)..(622): "n" may be a, t, c, g, other or unknown
  misc_feature (695)..(695): "n" may be a, t, c, g, other or unknown
  misc_feature (798)..(798): "n" may be a, t, c, g, other or unknown
  misc_feature (814)..(814): "n" may be a, t, c, g, other or unknown
  misc_feature (842)..(842): "n" may be a, t, c, g, other or unknown
ccatcatgcatcttcaggtctgctagagcaaaccctgagggctgctttagagagggttatcaagggagacttcttggaggaggtggtttctgactgacttgaatgccaggactgtttgccctgccccctgccatctctccttcccagatggtgctccaagaggcagcttgtggacctggtgatggaaggggtgtggcaggagctgctggacagcgcccagattgagatctgtgtggctgctggtgagtgaggagcggcaccctgccccanagcagcaacaggcttggcagcggctctgcaacaggggctcatttcccgccccatcaaccccacgggtagcggctgtcactgtgcaccctttgtgatgaggctganaggggaagtgatgcagagccggggaaggtagagctttggagaagccagagcccccactctgcactcctgcccaccctcatcccagcaggctggggtggtccacagggggccactgtggcttgatacccctctgaaacgagacacctcccctgaccaccttgtggatgcccagggtctgaaggggtgggagcatggtgccctgtgagctgatgctcanggagcatagttgggacaggactggcttganagcctacaggcttaggatgaatgccttcttcccaaaacacccaggttctgccccaaaagcattccagctcctnctttcaggctgtggctttttccatagaaaatctggtctcttcccttggggctctggctcttcccttgaagtcatcaggcaccttgccctgcattgggggtttntttcccaaaagcattncttttcccgttcccccaacttcccttanccaaaaagccctttcaa

SEQ ID NO: 879 - DNA, 870 bp, Homo sapiens
  misc_feature (688)..(688): "n" may be a, t, c, g, other or unknown
  misc_feature (728)..(728): "n" may be a, t, c, g, other or unknown
  misc_feature (737)..(737): "n" may be a, t, c, g, other or unknown
  misc_feature (793)..(793): "n" may be a, t, c, g, other or unknown
  misc_feature (841)..(841): "n" may be a, t, c, g, other or unknown
  misc_feature (852)..(852): "n" may be a, t, c, g, other or unknown
agggaaatgtttgtactatatagaatccatatatttgactgcaagttacaaagttttaagaacatgatggttggtctctaatatatttggaactgattcataagaaaagttattaaaattatctttgaaacacctcttgaagctaatttattagaaaaaatatttcagttggaaggctgtagaagtaatgtttaaatgctaagtcataagttcaggatatttcttttctatttggttgtgcaaaatgtttttcccagttatttaatcgaagtaattccttttaatagaaagagtcagttaaaattcagcattcatggatagatttttggaacgaaaaagggtaagtataagaaaatattgcaaacacattaaaacagttgtatggtgcaggaaaagaagattggaaaaagaccaaaacacacttctccagcaacactccatcagctttttaaaatttagagctatctgctaattttttccctcttccttctcaataaatgaaacaaacactgggcagctgcaggtttctcccaatcatgtctctttatgtaaagacagtaacatgcaaacacttttagtttacatccctcattcacagtgtaaagcaggaaatggtgtgggagatgtgagaccattctgaggtcagcgatagcccaaaggctctgcagtattccctccaatggccaangattccgtgtgtcatctgcaggagtgagtaggcctgctgnatttcttgnaactgctgggtggtacaaaataagttaccatggtttacactttaaaaaaaaaaccngaaggacatttgctttaattgggtacttactaagtttaacccctaggntatggcacagntgctaaaaaatcatgggg

SEQ ID NO: 880 - DNA, 704 bp, Homo sapiens
  misc_feature (634)..(634): "n" may be a, t, c, g, other or unknown
  misc_feature (650)..(650): "n" may be a, t, c, g, other or unknown
  misc_feature (693)..(693): "n" may be a, t, c, g, other or unknown
cttcttcttaaaagagaaacgctgcgcgcgcgaggtgggcccctgtcttccagcagctccgggcctgctcgctaggcccgggaggcgcaggcgcaggcgcagtgggggtgagggcgcgtgggggcgcacagcctctggtgcacatggcttcctccccggcggtggacgtgtcctgcaggcggcgggagaagcggcggcagctggacgcgcgccgcagcaagtgccgcatccgcctgggcggccacatggagcagtggtgcctcctcaaggagcggctgggcttctccctgcactcgcagctcgccaagttcctgttggaccggtacacttcttcaggctgtgtcctctgtgcaggtcctgagcctttgcctccaaaaggtctgcagtatctggtgctcttgtcagcatcctcattgagttccagagctcctccacctgcagaagtcagggtgcagccacagctcagcaggacccctcaagcggcccagcagactgaggccctggccagcactgggagtcaggcccagtctgctccaaccccggcctgggatgaggacactgcacaaattggccccaagagaattaggaaagctgcaaaagagagctgatgccttgtgacttcctgctgtggaangatcttttcaaccggnagtatttgaatcaccacaaaaagtaccaagcacattcaccaanaagtcttttct

SEQ ID NO: 881 - DNA, 734 bp, Homo sapiens
  misc_feature (666)..(666): "n" may be a, t, c, g, other or unknown
  misc_feature (683)..(683): "n" may be a, t, c, g, other or unknown
  misc_feature (701)..(701): "n" may be a, t, c, g, other or unknown
acaactggcctgaccttcaaaggccttcacagctcctgccttcatgttaccgtctactatgttcctcgtgcaccttccactcagcacaaacaggctgcactgcctccgaaacacatcacttgaatcctacctctgctcctttgtccatctgaatcaccctctccacatttctgaccgtgtaatcctgatctcacttcatgaggcagttcgcttctcttttgcatttagctttccccggggtacactgtcaatagcctactgtctgatgtcatcagtcagcacttcatcagaggcaattatgtccacagagcttttggctaattactgtcactcctctttacatgtgtgcatatgcatatcatctttccctaatgagactggaaatcatgattcattccctggagcagtggtttccataagtgaccaacccacagaccagtgcaaactggctgcaaaagagcttcctctgaggaacttattagaatgcagattctttgactgcatgggagaggaggatctcataaatctgggtgtaataggcacagaacgttaggtgtaatatgggcgggactctggactcagcatatccaacaagctgctggctgattccgacgatgccgatgaattgccaggttgggaactgctgcccccagagaacctacaganagctctgtacgtggtangtgctcactccctattgnttgggtgtatgcctcctgatatgaacttgatcg

SEQ ID NO: 882 - DNA, 817 bp, Homo sapiens
  misc_feature (654)..(654): "n" may be a, t, c, g, other or unknown
  misc_feature (672)..(672): "n" may be a, t, c, g, other or unknown
  misc_feature (769)..(769): "n" may be a, t, c, g, other or unknown
  misc_feature (809)..(809): "n" may be a, t, c, g, other or unknown
  misc_feature (814)..(814): "n" may be a, t, c, g, other or unknown
tctttgatgtttataacacaagttgtaattggcacattacaaaacattttctacaaacaggacagggtatgctataagtaacattcttactgcagaagatgacaggcgttggttatttgtacttctcttgctcaattattacagttttaaacataaagacaatgatttcaagttttatttgatgaagaaacaggaatgcttcatgattgaggatcagtatgatgactgaagaccttgattctagcgtgctcagtagtttagttccttagacatgcctttggtttcagtcatttggtgagtatttagtgcctctcacatgcactgcactgtgcggagagcacttggattacaggaagcatgctctgtactctcagtggtgtgttcagttgaagaaacacataaaataactgaaagatattcagttactagactaggtagtattgactaagttcaggagttgagaaaaggattagatcagtgaaaaaatagactgccttgtgagcaatagcagatatgggctgcgctttgaaacgaacaggtgggatttgcagggaagggtattctgattgggataatggctcgtaggagacagtgaagatcaggactaccaaaatggaatggatgggcctgttggggattagcagaagtgcttangtgggtggaattacaganggctaggaaagctagacagactagtcaaaatgagacctgatgtgaaagggcactagggcccagcctttttaatctgaaagctctgcttcctctggtnctttatcctggtgctggttggtgaccccataatatttggntaccncat

SEQ ID NO: 883 - DNA, 763 bp, Homo sapiens
  misc_feature (726)..(726): "n" may be a, t, c, g, other or unknown
  misc_feature (741)..(741): "n" may be a, t, c, g, other or unknown
  misc_feature (748)..(748): "n" may be a, t, c, g, other or unknown
gttgttgaggcccttcttgtgtatctggagaaaatagaggttctgactcctcaggagcaaaaaacataacctgaagagggaggaagtggatttggggttcaccatttcttggggcacacttgattgaaaactgagacttctgaagagaaggccagaagatacaaagacagaccatcccagttgaatgctgtcttccaagaacagaagaaaatgatccaggcccaggtaactgacttttggtttgttttattctttcctttgttccataatagatttgtagaagcctataaacatcaatttcactaatataaaaagtataaatttcaaaaagcaggatctggagagaagtaagcttagtttttaaactcaatatcatgcaaaatagtaggataaggaatataatgttcatagcattaacactaaattatgaattttgtgacaccatgcatggctggaggatcctgtggattatattagctgtcagcttgcatctaatatctctgacagccaatgtcacaagaaaatcataatttacatggtatgtcctgtttttgaagataaaacagattacttcctgggggttgccattatttcatggcactttggtctcaggaaatttcttcagtggttcttcctagagttgatgtggtggatggtgtccagaatagcagccttctcataaattcagatgcaaggtttcctgtggctggttcttgaaggactccntatatactggtaccnggaatanacttaagccaaccgt

SEQ ID NO: 884 - DNA, 771 bp, Homo sapiens
  misc_feature (648)..(648): "n" may be a, t, c, g, other or unknown
  misc_feature (708)..(708): "n" may be a, t, c, g, other or unknown
  misc_feature (747)..(747): "n" may be a, t, c, g, other or unknown
  misc_feature (756)..(756): "n" may be a, t, c, g, other or unknown
tttggaggagaaaggatcacaatgaactcctgaaacatacaacgtgctagtttctttcatgcctctgagctcttaagtcttcagagagagaggcaggcaggtataatgcagagaacacaggctttggagttagaacctgagttggaacctcactgtaatcagctacctgtgtggttccctgaagttgcatgtctccaactgtaaaatgaggcagaatcatgcctgccttgaagggctgctgtgaggaatgactaaaacaacatatttggtattgaatactcatcatttttagtattctggaaataagagaacaaattttattataaggcaagggggctgaagtgtgggactcagaggatgcagatggaggaggacagtcgtgccatggggagcatcctgtgtgcatcagatgcagtttaattgctgagagtccacaataccaaggaagagggcgcccctcaggaagcttatggtagagtggagaatacaggaaacaagtaacaaactaaatcacagaagaagaaacattcaagtcactatcaaaggaataagaaacagcacattcagtaggagggttcagtcaagagcagagggctttgccaggcgtggtggtgcacgcatgtaatcccagctactcgggaggctgangcaggagaatggcgtgaacccgggaggcggacttgcagtgagctcaaatcgtgccactgnactccacctgggtgacaaacagactctgcttaaaaaagnctctatcangaagttgaagaaatg

SEQ ID NO: 885 - DNA, 845 bp, Homo sapiens
  misc_feature (793)..(793): "n" may be a, t, c, g, other or unknown
  misc_feature (809)..(809): "n" may be a, t, c, g, other or unknown
  misc_feature (825)..(825): "n" may be a, t, c, g, other or unknown
aacaggtacgaaaaaatcaggctactaagcccactgttaatatagacgcagaccaattgttaggaacaggtccaaattggagcaccattaaccaacaatcagtgatgcagaatgaggctattgaacaagtaagggctatttgcctcagggcctggggaaaaattcaggacccaggaacagctttccctattaattcaattagacaaggctctaaagagccatatcctgactttgtggcaagattacaagatgctgctcaaaagtctattacagatgacaatgcccgaaaagttattgtagaattaatggcctatgaaaatgcaaatccagaatgtcagtcggccataaagccattaaaaggaaaagttccagcaggagttgatgtaattacagaatatgtgaaggcttgtgatgggattggaggagctatgcataaggcgatgctaatggctcaagcaatgagggggctcactctaggaggacaagttagaacatttgggaaaaaatgttataattgtggtcaaatcggtcatctgaaaaggagttgcccagtcttaaataaacagaatataataaatcaagctattacagcaaaaaataaaaagccatctggcctgtgtccaaaatgtggaaaaggaaaacattgggccaatcaatgtcattctaaatttgataaagatgggcaaccattgtcgggaaacaggaagaagggccagcctcagccccccaacaaactggggcatttccagttcactggttggtcctcaagggtttcaaggacacaacccctacngaaatacccccacttnagggagtcagccaatnccacaattcaacagttgtcc

SEQ ID NO: 886 - DNA, 827 bp, Homo sapiens
  misc_feature (753)..(753): "n" may be a, t, c, g, other or unknown
  misc_feature (770)..(770): "n" may be a, t, c, g, other or unknown
  misc_feature (797)..(797): "n" may be a, t, c, g, other or unknown
ataaatagagccggttttgtggtgttttcactactcggttggatgcctcagccatagtaagtgggaaagtgagcgagcaagcgagctactagcgaccggaggaaagtgaacagggggagaagggaacagcaagaacaggactccagagcgataaacactcgctggagagggagacgcaggaagcgatgaaagagatgtctgcaaacaccgtgctggacagccagcgtcaacaaaagcattatggaattacctccccaattagtttggcatctcctaaagaaattgatcatatttacacacagaaattaattgacgccatgaaaccatttggagtgtttgaagatgaggaagaattgaaccacaggctggtggttcttggtaaattgaacaatttagtaaaagaatggatttctgatgtcagcgagagtaagaacctcccaccttctgttgtggctactgttggtggtaaaattttcacatttggatcctataggcttggagtacacaccaaaggagctgacattgatgcactttgtgtagctccaagacatgtggaaagatctgatttttttcagtctttttttgaaaaattgaaacatcaagatggcattagaaacttaagagctgtagaagatgcctttgtacctgttataaaatttgaatttgatggtattgaaattgatctagtctttgcaagactggcaatcaaaccatatcagataatttagatctaagagacgactctcgcctganaagccttgatataaggngtattcgcagctttaaatgggttgtanaagttactggatgaaaattttgccatttaa

SEQ ID NO: 887 - DNA, 783 bp, Homo sapiens
  misc_feature (690)..(690): "n" may be a, t, c, g, other or unknown
  misc_feature (750)..(750): "n" may be a, t, c, g, other or unknown
  misc_feature (766)..(766): "n" may be a, t, c, g, other or unknown
gtaggagtccgcggcagcctccgggtaagccaagcgccgcgcagtgctgagttcccgcacgccgcagagccatggagatcggcaccgagatcagccgcaagatccggagtgccattaaggggaaattacaagaattaggagcttatgttgatgaagaacttcctgattacattatggtgatggtggccaacaagaaaagtcaggaccaaatgacagaggatctgtccctgtttctagggaacaacacaattcgattcaccgtatggcttcatggtgtattagataaacttcgctctgttacaactgaaccctctagtctgaagtcttctgataccaacatctttgatagtaacgtgccttcaaacaagagcaatttcagtcggggagatgagaggaggcatgaagctgcagtgccaccacttgccattcctagcgcgagacctgaaaaaagagattccagagtttctacaagttcgcaggagtcaaaaaccacaaatgtcagacagacttacgatgatggagctgcaacccgactaatgtcaacagtgaaacctttgagggagccagcaccctctgaagatgtgattgatattaagccagaaccagatgatctcattgacgaagacctcaactttgtgcaggagaatcccttatctcagaaaaaaacctacagtgacacttacatatggntcttctcgcccttctattgaaatttatcgaccacctgcaagtagaaatgcagatagtggngttcatttaaacaggntgcaatttcacagcagc

SEQ ID NO: 888 - DNA, 740 bp, Homo sapiens
  misc_feature (524)..(524): "n" may be a, t, c, g, other or unknown
  misc_feature (534)..(534): "n" may be a, t, c, g, other or unknown
  misc_feature (656)..(656): "n" may be a, t, c, g, other or unknown
  misc_feature (688)..(688): "n" may be a, t, c, g, other or unknown
  misc_feature (729)..(729): "n" may be a, t, c, g, other or unknown
gggcaaagttttggcggagccatcgctggggctgagcgcgcccccggggggagatcggggagcgcccgatgccgggcggccggagccattgacccgggacgccgccgtccgctgagcagccgaccaccccgccgcctccggtgcatggggactggctgaggagccagcatgggcaactgcgtggggagacagcgccgggagaggccggcagccccgggacacccccgcaagcgagcaggacgcaatgagcccctgaagaaagagcggcttaagtggaagagcgactaccccatgactgacgggcagctgcggagcaaacgggatgagttctgggacacagcgcctgccttcgagggccgcaaggagatctgggatgccctcaaggctgccgcctatgctgctgaagccaacgaccacgagctggcccaggccatcctggatggagccagcatcaccctgcctcatggcaccctctgtgaatgctacgatgagctgggcaatcgctaccagctgccatctactgnctgtcaccgncggtgaacctgctgctggagcacacggaggaggagagcctggagccccccgagccttcacccagcgtgcgccgtgagttcccgctgaaggtgcgcctgtccacgggcaaggacgtgaggctnaacgccagccttgccgaacaatggggcaactnaagaagcaacttgcacgcccaggaaggcattgagccattgngggaacggtgg

SEQ ID NO: 889 - DNA, 839 bp, Homo sapiens
  misc_feature (667)..(667): "n" may be a, t, c, g, other or unknown
  misc_feature (807)..(807): "n" may be a, t, c, g, other or unknown
  misc_feature (813)..(813): "n" may be a, t, c, g, other or unknown
  misc_feature (823)..(823): "n" may be a, t, c, g, other or unknown
agttcgccgcttgcaccgggaccgatgccatctgagacgcacgcgatgctggcgacgctggcgagggtggcagctctgcgcagaacctgcctcttctccggccggggcggcgggagggggctgtggactggccgcccgcagtcagatatgaacaatataaagccattggaaggggtaaaaattctggatctaacaagagtcctggcgggaccttttgctactatgaatttaggagatcttggagcagaagttataaaagtggagagaccaggagctggtgatgatacacgaacttgggggccaccttttgttgggacagaaagtacatattatctcagtgttaaccgaaataaaaaaagtattgctgttaatatcaaggatccaaaaggggtgaaaatcatctattgttccatcacagggtatggtcagacaggtccaatttctcagcgagctggttatgatgctgttgcctcggctgtttctggtctgatgcacatcacagggcctgagaatggagatccagttcgcccaggagtagctatgactgatcttgccactggcctgtatgcatatggagctattatggctggattgatacaaaaatacaaaactgggaaaggactgttcattgattgtaacctgctgtcatcccaggtggcgtgtttgnctcacatagctgcaaattatcttattggtcaaaaggaagcaaaacgttggggtacagctcatggcagtatcgttccttaccaggcttttaaaaccaaggatggctatattggaattggagcaggaaataccacagtttgncaccgncttgcaagancttggatttgcctgaa

SEQ ID NO: 890 - DNA, 769 bp, Homo sapiens
  misc_feature (721)..(721): "n" may be a, t, c, g, other or unknown
  misc_feature (744)..(744): "n" may be a, t, c, g, other or unknown
  misc_feature (759)..(759): "n" may be a, t, c, g, other or unknown
gtgcctaacagaggtgtcctctgacttttcttctgcaagctccatgttttcacatcttccctttgactgtgtcctgctgctgctgctgctactacttacaaggtcctcagaagtggaatacagagcggaggtcggtcagaatgcctatctgccctgcttctacaccccagccgccccagggaacctcgtgcccgtctgctggggcaaaggagcctgtcctgtgtttgaatgtggcaacgtggtgctcaggactgatgaaagggatgtgaattattggacatccagatactggctaaatggggatttccgcaaaggagatgtgtccctgaccatagagaatgtgactctagcagacagtgggatctactgctgccggatccaaatcccaggcataatgaatgatgaaaaatttaacctgaagttggtcatcaaaccagccaaggtcacccctgcaccgactctgcagagagacttcactgcagcctttccaaggatgcttaccaccaggggacatggcccagcagagacacagacactggggagcctccctgatataaatctaacacaaatatccacattggccaatgagttacgggactctagattggccaatgacttacgggactctggagcaaccatcagaataggcatctacatcggagcagggatctgtgctgggctggctctggctcttatcttcggcgctttaatttcaaatggnattctcatagcaaagagaagatncagaatttaagcctnatctctttgg

SEQ ID NO: 891 - DNA, 773 bp, Homo sapiens
  misc_feature (506)..(506): "n" may be a, t, c, g, other or unknown
  misc_feature (720)..(720): "n" may be a, t, c, g, other or unknown
  misc_feature (734)..(734): "n" may be a, t, c, g, other or unknown
  misc_feature (756)..(756): "n" may be a, t, c, g, other or unknown
gagcggacacagccccacgcgcggggccatgcaggtggccatgaacggtaaggcccgcaaagaggcggtgcagactgcggctaaggaactcctcaagttcgtgaaccggagtccctctcctttccatgctgtggctgaatgccgcaaccgccttctccaggctggcttcagtgaactcaaggagactgagaaatggaatattaagcccgagagcaagtacttcatgaccaggaactcctccaccatcatagcttttgctgtagggggccagtacgttcctggcaatggcttcagcctcatcggggcccacacggacagcccctgcctccgggtgaaacgtcggtctcgccgcagccaggtgggcttccagcaagtcggtgtggagacctatggtggtgggatctggagcacctggtttgaccgtgacctgactctggctggacgcgtcattgtcaagtgccctacctcaggtcggctggagcagcagctggtgcacgtggagcggnccattcttcgcatcccacacctggccatccatctgcagcgaaatatcaacgagaactttgggcccaacacagagatgcatctagtccccattcttgccacagccatccaggaggagctggagaaggggactcctgagccagggcctctcaatgctgtggatgaaccggcaccattcggtcctcatgtcctgctctgtgcccatcttgggctganccccaaggacatantggagatggacttttgccttgnagacacccaacctgcgg

SEQ ID NO: 892 - DNA, 749 bp, Homo sapiens
  misc_feature (698)..(698): "n" may be a, t, c, g, other or unknown
  misc_feature (709)..(709): "n" may be a, t, c, g, other or unknown
  misc_feature (744)..(744): "n" may be a, t, c, g, other or unknown
ccctaagtgagaggaccaacagttccgacagcgagcgctccccagatctgggccacagcacgcagattccaagaaaggtggtgtatgaccagctcaatcagatcctggtgtcagatgcagccctcccagaaaatgtcattctggtgaacaccactgactggcagggccagtatgtggctgagctgctccaggaccagcggaagcctgtggtgtgcacctgctccaccgtggaggtccaggccgtgctgtccgccctgctcacccggatccagcgctactgcaactgcaactcttccatgccgaggccagtgaaggtggctgctgtgggaggccagagctacctgagctccatcctcaggttctttgtcaagtccctggccaacatgacctccgactggcttggctacatgcgcttcctcatcatccccctcggttctcaccctgtggccaaatacttggggtcagtcgacagtaaatacagtagttccttcctggattctggttggagagatctgttcagtcgctcggagccaccagtgtcagagcaactggacgtggcagggcgggtgatgcagtacgtcaacggggcagccacgacacaccagcttcccgtggccgaagccatgctgacttgccggcataagttccctgatgaagactcctatcagaagtttattcccttcattggcgtggtgaangtgggtctggntgaagactttcctttcacagcaggcgatggggacnattct

SEQ ID NO: 893 - DNA, 745 bp, Homo sapiens
  misc_feature (719)..(719): "n" may be a, t, c, g, other or unknown
  misc_feature (722)..(722): "n" may be a, t, c, g, other or unknown
  misc_feature (730)..(730): "n" may be a, t, c, g, other or unknown
atttcattaatttgatcttcagtcactgaaaccctttcttccattgatcgaatcagctactgaagcttctgtgtgtgtcacgtagttctcgtgtcatggttttcagctccttcaggtcatttaaggttttctctacactggttactctagttagccttttgtctaatcttttttcaaggtttttagcttccttgcggtgggtttgaatatcctcctttagctcagagaaatttgtttttaccgaccttctgaagcctaattctgtcaactcgtcaaagtcattctccatccagccttgttctgttgctggcgaggagctgtgatcctttgaaggagaagaggcactctggtttttagaattttcagcttttctgctctggtttctccccatctttgttgtttttatctacctttggtctttgatgatggtgacctacagatgtggttattggtgtggatgtcctttttgttgatgttgatgctattcctttctgtttgttagttttctttctaacagtcaggtccctcagctgcaggtctgttggagtttgctagaggtccactccagacactgtttgcctgggtatcacctttggaggctgcagaacagcaaatattgcagaacagcaaatattgctgcctgatccttcctctggaagcatcgtcccagaggggcatacggcagcatgagatgtcagtcagcccccactgggaggtgnctncctggtangctacacgggggtca

SEQ ID NO: 894 - DNA, 833 bp, Homo sapiens
  misc_feature (78)..(78): "n" may be a, t, c, g, other or unknown
  misc_feature (611)..(611): "n" may be a, t, c, g, other or unknown
  misc_feature (765)..(765): "n" may be a, t, c, g, other or unknown
  misc_feature (794)..(794): "n" may be a, t, c, g, other or unknown
  misc_feature (802)..(802): "n" may be a, t, c, g, other or unknown
taaaatgtagacattggtgtcctgtattccaggttgaatttaaaacaggtatggggtttgacacaaaaatgatactgnatatgaaggttaggtaaaatatgtatttgaagtgaggctatcagggtactatgcaggcttttggggcctggcccgaaacttggaatgcagtttttcatagaaacccacaatcagtttacaaatagacttttgaaacactggctaggtggtatctgaagttttggcccattgcaagctgtgtctgaattgcaagcatgagggaagtaaaaagcatcccaaatcagaaattaggagatctgccattaaaccttattaccttgacaaaccatttaatgtttggatgatagcttcctccttttaaaaatacaatttggattatattgatctaagttatattttagctcaagattcctgaagttcacagtggtttttaaaaatttttcttaagaaaaaaaaaagaacaaaaaacttttccaagcttgaatatacataatcagccctgtttccccttgtacctcaaatcatggcaacaaggaagttgaatttctcttttgagacttttgaaccttcttcacattcatttttaattgttntgttttaaaacaatatcattttgggaagtgaggggaagggatgaagcacatgttttcaaagtcttgctgtctgcctctaccctagtctgagattacatatggtagttttggccaggggaaagtgcttgggatttcacctttatactcaagtgangctcatgaaagtggtcatttaaagggaantggaaggnggtcatggaattagccaagccctttactggg

SEQ ID NO: 895 - DNA, 814 bp, Homo sapiens
  misc_feature (472)..(472): "n" may be a, t, c, g, other or unknown
tctgcagccacgagaagcaaagttgacatttctggatcactctccccagacgcgtcacttgcccacaagcgggacacggcagtctcgctgagccagctgtgcagagggacagatggaagaaagctagagatgctgcttcgtgggcgctgaagttgcagaacttgggctggttttctttcttcccatcccccctcctcctgacaaaccacatcttgactcagatggtcgaaagaaaaactctttcagttatttgatatttgggaaccctccaggagaccataacttatttttgagggaggctccttctctccctttgctgggaacacacacacacacacacacacacacacacacacacacacacacacacacacacacagctgtacaccatggtggttcaggctgcagtggctccgaatagatcccaaagacttttactgaaaattccttatggatctctgagaaggcgcancgttgaaaggatgacggagggccgccgatgtcaagtacatcttcttgatgacaggaagctggaactcctagtacagcccaagctgttggccaaggagcttcttgaccttgtggcttctcacttcaatctgaaggaaaaggagtactttggaatagcattcacagatgaaacgggacacttaaactggcttcagctagatcgaagagtattggaacatgacttccctaaaaagtcaggacccgtggttttatacttttgtgtcaggttctatatagaaagcatttcatacctgaaggataatgctaccattgagctttttttctgaacgcgaagtcctgcatt

SEQ ID NO: 896 - DNA, 818 bp, Homo sapiens
  misc_feature (755)..(755): "n" may be a, t, c, g, other or unknown
  misc_feature (803)..(803): "n" may be a, t, c, g, other or unknown
tcttcccttcccgcgatggcggcacagggagctgctgcggcggttgcggcggggacttcaggggtcgcgggggagggcgagcccgggcccggggagaatgcggccgctgaggggaccgccccatccccgggccgcgtctctccgccgaccccggcgcgcggcgagccggaagtcacggtggagatcggagaaacgtacctgtgccggcgaccggatagcacctggcattctgctgaagtgatccagtctcgagtgaacgaccaggagggccgagaggaattctatgtacactacgtgggctttaaccggcggctggacgagtgggtagacaagaaccggctggcgctgaccaagacagtgaaggatgctgtacagaagaactcagagaagtacctgagcgagctcgcagagcagcctgagcgcaagatcactcgcaaccaaaagcgcaagcatgatgagatcaaccatgtgcagaagacttatgcagagatggaccccaccacagcagccttggagaaggagcatgaggcgatcaccaaggtgaagtatgtggacaagatccacatcgggaactacgaaattgatgcctggtatttctcaccattccccgaagactatgggaaacagcccaagctctggctctgcgagtactgcctcaagtacatgaaatatgagaagagctaccgctttcacttgggtcaattgccagtggcggcagccccccggggaaagagatctaccgcaagagcaacatnttcgtgtacgaagttgatggcaaagaccataagattacttgtcagaancttgtgtctgctgcc

SEQ ID NO: 897 - DNA, 810 bp, Homo sapiens
  misc_feature (808)..(808): "n" may be a, t, c, g, other or unknown
tgctacaaccccgggcaggaagagctcgtcgcggtagcagcggtcgaaggggaccaagctccagagggcgggcgcccgagccgtgcggggagcgggcggggcagccatgctcctgtctgggggcgatccttctcctgctccccttacacgccaacctatgcccacctggcagccgtggcctgcggcctggagcgctttggccagtccccactcccagtggttttcctcactcactgcaactggatcttcagcctcctgtgggagctcctgcccctctggagggctcggggcttcctctcctctgatggggctccactccctcacccaagcctgctctcctacattatatccctcacctctggcctctcatcccttccgtttatctaccgaacctcctaccggggctctctgtttgctgtgacagtggacaccctggccaagcagggtgcccaggggggtgggcagtggtggagtttgccaaaggatgtgccagcccctacagtgagtccccatgccatgggcaaggggcccaatttgctggcattacagctgagtgacagcaccctggccgacatcattgccaggctgcaggctgggcagaaactgtctggctcctaccgtttagttctgcctttaactcactcagcctcgacaaggagagtggcctgcttatgttcaagggagataagaagcccaaggtctgggtagtcccgacgcaacttcggagggatctgattttctctggcatgacattcccttgggggcccaccagaggcccgaagagacctacaagaaattgcgtttgctngg

SEQ ID NO: 898 - DNA, 816 bp, Homo sapiens
taagttaattcatactggagaaaaaccctacaaatgtaaagaatgtggaaaagcttttcaccgatactcaatccttagtacacataagaaaattcatactggggagaaaccccacaaatgtggagaatgcggaaaagcctttaactggtcctcaactcttattacacataagataattcacagtggagaaaaaccctacaaatatgaagaatgtggcaaagcttttaaccagtcctcacaccttatgagacataagaaaattcatagtaaagagaaaccttacaaatgtgaacagtgtggcaaggtctttaagaagtcctcaactcttactgcacataagatcattcatactggagagaaaccttacaaatgtgaggaatgtggcaaaggttttagccaactctcaaaccttactaaacacaagaagattcatactagagagaaaccctacaaacgtgaagaatgtggcatatcttttaaccagttctcacaacttgctatacataagatgattcacacttgaatgaaaccctacaaatgtgaacgatgtggcagttgttttaactagttctcgaactttactatgcataagaaaattcaaactggagagaaactctacaaatgtgaagaatgtggcaaagcttttaaccaagtctcaacacttactatacataagataatttatactggagcaaaaccttggaaattcaaagaatgtggtaaaacttataatcctcaaaacttcttacacctaaaattcatgcaggagagaaccccacaaatgtgaaaaatttggtaaattctttacaaatcttc

SEQ ID NO: 899 - DNA, 814 bp, Homo sapiens
  misc_feature (752)..(752): "n" may be a, t, c, g, other or unknown
  misc_feature (776)..(776): "n" may be a, t, c, g, other or unknown
attctttcattattatgacataagctacctgggtccacttgtctttttttttgtttgtttcacagaaaagatgggttcgagttcagtggtcttcatcttccaagcatcattactaaccaagtcagacgttaacaaatttttatgttaggaaaaggaggaatgttatagatacatagaaaattgaagtaaaatgttttcattttagcaaggatttagggttctaactaaaactcagaatctttattgagttaagaaaagtttctctaccttggtttaatcaatatttttgtaaaatcctattgttattacaaagaggacacttcataggaaacatctttttctttagtcaggtttttaatattcagggggaaattgaaagatatatattttagtcgatttttcaaaaggggaaaaaagtccaggtcagcataagtcattttgtgtatttcactgaagttataaggtttttataaatgttctttgaaggggaaaaggcacaagccaatttttcctatgatcaaaaaattctttctttcctctgagtgagagttatctatatctgaggctaaagtttaccttgctttaataaataatttgccacatcattgcagaagaggtatcctcatgctggggttaatagaatatgtcagtttatcacttgtcgcttatttagctttaaaataaaaattaataggcaaagcaatggaatatttgcagtttcacctaaagagcagcataaggaggcgggaatncaaagtgaagttgtttgatatggnctacttctttttgggaattcctgccattaattaaagaa

SEQ ID NO: 900 - DNA, 819 bp, Homo sapiens
  misc_feature (673)..(673): "n" may be a, t, c, g, other or unknown
  misc_feature (715)..(715): "n" may be a, t, c, g, other or unknown
  misc_feature (764)..(764): "n" may be a, t, c, g, other or unknown
  misc_feature (816)..(816): "n" may be a, t, c, g, other or unknown
tttttgtatgcaccacgggcggcggtggtcggtgcgggaggagggaggggagcttgcgggcccgagagggggcgacggcggcggcggtggcctgaggaggcccgagcggcggcggtggcggcgaaggccgaggcgtctaggtgtttttggaagagctgcagccctcttctcacagatgagctacgaggagatgatgacactgactgagcagcacctggagtctcagaacgtcaccaaaggtgcccgccacaagatagccctgagcatccagaagctgcgtgagagacagagcgtcctcaagtccctagagaaggatgtgctggaaggcgggaacctacgaaacgctctgcaggagctgcagcagatcatcatcactcccatcaaggcctacagtgtcctccaggccaccgtggctgccgccaccaccacccctactgccaaggatggggccccgggggaaccaccgctgccaggtgctgagcctcccctagcccaccccggcacagacaaaggcaccgaggccagagccgggaccatgtgacggcgctggccctcgccaccgccgtcccccgaccctggccccaggcccggcaccatgatgttccgagaccaggtgggcatcctcgctggctggttcaaaggctggaatgagtgtgagcagacagtggccctnctgtcactttcgaaacgggtcacccgtacccaggcccgcttncttgcagcttttgcctggagcactcactggccggacttgcaatgacatncaccttgctggagtcggaggccaacaattgcttgccatcgtcagccagtggnaac

SEQ ID NO: 901 - DNA, 808 bp, Homo sapiens
tttatttcccaactcacatttgaggtttacaagttttgcttagtgtgcttggtgctactcgatcaattgagacacagttcctctctggtgggggttcatgtctgtgtccagacatcttgttggctgtgctctaatcacagtgatcattttgagctgttgttaagaaaaaacatggcttccaacatagatgccttgttttctccaacaaatatttaagctatattgccacctccattttagttgtttccctttagatctggctgtcataatttatctgttttgcttcatccaagatgattgctgtaaacaggcatagggtgctgtcttcccttctaggcagcccagtaattccatctcagataatttctagttacctgttggatacttacgtgaaggtctgaataaattatgatcattacgaacatgatacatgagtaatgaattaaaagaaatatttaaaagttttatattttaagtctccagggagtaaggcattgagaaaatggggtaaatatttcttgtcgaagagaaatcaaatatgggtgaatcattgactactgggagtccttgggtttattctcagatctttcactttttggcagtattctggaagcaagttagtgacttgactgaagctcagtttgcacatctgtgaagaggacagtaatttctggtctcatagggctgttaagagcatggaatggaatccaattcggcttcatctatctttattttcatgtaatctgtcaggcaccatgttagtggaatgtcttggaaataatgaatcgtatagccttggtctcaagga

SEQ ID NO: 902 - DNA, 812 bp, Homo sapiens
  misc_feature (750)..(750): "n" may be a, t, c, g, other or unknown
  misc_feature (801)..(801): "n" may be a, t, c, g, other or unknown
gtgtttatgtataagattggtcaatgggttcagtccaatcggttcatgtgtagtctgttttttaaaaatctggaataagtttgtgtgtatcctgctaaatgtcatcttatttgctttagcccatcatcccattgtttggttcccatgtctgccaccaaatgtctccttcttagattcatatcatctgaaaatttgttaagcctgttaactttgtattcatccaaatccacataaacatgttgaacaggatagagctgaggacagagccctgtggcatgctactaaagactttcctccagactgacatggatcaagcatttttggggtatggtaactcaaccagttctgaatccacttagtatgataacacaatccacaatttctcatgttcttcatcgaaatatcattagagagagacagagatatctagttttcagttagaaagataagattatagtttaatagagagataagggctggagagaaatttggaagcaatctgtatcaggttttgtcacctggctaccacagaatcccctggggaacttcctggcttcacctggagattctgattctgtagtctggagtgggactaagaatctgtgttcttactaagttccccaggtgattcaaatgcagctggtctgatgactgatgttgggggaccacagatctgtatcactgggatagctggggcagagaggatggataaagttctctgaggagagtgtttcatggggccgggagganggctaaggataacactgaggagtgcgcatgggagaaaaggaaagagagccnaagaccaggga

SEQ ID NO: 903 - DNA, 757 bp, Homo sapiens
  misc_feature (64)..(64): "n" may be a, t, c, g, other or unknown
  misc_feature (99)..(99): "n" may be a, t, c, g, other or unknown
  misc_feature (510)..(510): "n" may be a, t, c, g, other or unknown
  misc_feature (720)..(721): "n" may be a, t, c, g, other or unknown
  misc_feature (723)..(723): "n" may be a, t, c, g, other or unknown
ttacagccaagggtcaggattaggatgtaaactcctgggagtgtgtgtgtgttttatcctggtntctctcgtggtgactaattccttgcttgtgcattncaagagctcaaaatatttttgctctttgcaatggtctgaatgtattctcccaaaattcatatgttgagacttaattgccaatgtggtagtaatgcaataaatcagattatatctttgtaagctttaagagataattaagttatgagggtagagccttcatggaaggaattaaggctcttacaaatgggcttaagggagtgggttcattaccttctatcccttcctccacgtgaggacacggcatttactccctctggagcatgcagcaacaacataccatcttggaagcagaccacagtgcaatcaaattggaacacaagattaagaaactcactcaaaaccacacacctacatggaaattgaacaacctgctcctgaacgacttctgggtaaataatgaaattaaggtanaaatcaagaagttctttgaaaccagtgaggacaaagagacaatgtaccagaatctttgggatgcagttaaagcagtgttgagggaaatttatagcaccgagtacccacatcaaaaagttagaaagatctcaaatcaacaccataacatcacaactaaaagaactagagaaccaagagcaagcaaaccccaaagctagcagaagacaaatnntnaaaacatcaggatcagagcagaactgaaggagat

SEQ ID NO: 904 - DNA, 729 bp, Homo sapiens
  misc_feature (674)..(674): "n" may be a, t, c, g, other or unknown
  misc_feature (696)..(696): "n" may be a, t, c, g, other or unknown
  misc_feature (725)..(725): "n" may be a, t, c, g, other or unknown
gagaggccgcgtcctcagctggtcctagacatgcgtggcgtcggggctgtggcacggtcgggtccgggcttgaatgcaccaaggaaaggccatttgtggggacatagcaagaaggcagctgtctgcaagccaggaggagaaccctcaccagaaacctcacagaaatcggccaacaccctcatctcgggcttccagcttcagagcaacgagaaaacaaatttctgttgtgtcctggttcccatttgtaattggcaccctaatgaaaccgttttctgtagccctggaaatggctgaaaatgaggggagggaaataaagtgctataattcagagcatggagcacaccttcctggttcacctgagctggattcggagaggtaaaatggccattacctcgtctaagctgccacttacagacatctgcttaggaatcaggcactggatcacagccataccctactcattaacacctgggggacctcaggcatgtcactcgaccttctgtgagcctcatctataatatgggaatgatatctcctacttcactgaggtttgtgaggactggagatcgaacatgtacctactgggccctctagaaatggtagacatcatcactgctctttcagacatgcagcaggagggggaaggtgccatttaaagcaataattgactgcanggttggtttttttcttgagacngagtctcgctctgtaactcaagcttggantgca

SEQ ID NO: 905 - DNA, 840 bp, Homo sapiens
  misc_feature (753)..(753): "n" may be a, t, c, g, other or unknown
  misc_feature (766)..(766): "n" may be a, t, c, g, other or unknown
  misc_feature (820)..(820): "n" may be a, t, c, g, other or unknown
gagagtgtaaaatagaacaactggctgggcgcggtggctcatgcctgtaatcccagcactttggggggccgaggcgggcggatcacggggtcatgagatcgagactatcctggctatcatggtgaaaccccgtttctactaaaaatccaaaaaaaaaaaaaaaaaaaaaaaaaaattagccgggtatggtggcgggcgcctgtagtcccaactagtcgggaagctgaggcaggagaatggcgtgaacctgagaggtggagcttgcggtgagcccagattacgccagtgcactccagcccagacgacagcgcgagactgtgtctcaaaaaaaaaaaaaaaagtggaacaaccgctttgaaaaataattcgcctctcaataaggccaacatacatctaccctatagcacagcaatgtcaattctagaaatttatccaacaaaaataaaagcatatatttacacaaaaacctgtttgagaatgcacctaagtcctttatttgtaaaagctaattctgaaagcaatctgaatattcactaacagactaatgaataagcaaactctgacaaatacgtaggcaactcagaaatatgaggaaaaataaacaaatgatacacacaaatatttggctaaatctcaaatatgtatttatgctaaagaaaataaaccagatacacacttacacacacatcctgtaggaattctaattattggaatttgaagatgaacaaaattaatcaatcatgatagaaattntaagggtttaatnccgagttatttgggatgctgaagccggagaatcgcttgaacccgggaggcggangttgcagggacctacattgg

SEQ ID NO: 906 - DNA, 838 bp, Homo sapiens
  misc_feature (772)..(772): "n" may be a, t, c, g, other or unknown
  misc_feature (834)..(834): "n" may be a, t, c, g, other or unknown
ggattgaattgcactgaaatgaaataactgcttaggcatgtatctttacatatgatcccagtattgcaaagtacaagagagaaaaagttattttatagctaaaatcaggaaattataaaaacaggaaataataacaagagttttaatgaaagataagtgaaaatgctgtaactttttgtttgcatgtttgtctgtttaaaattgaggtataattatgtaaactaaaaaatcatctattttggctggacgcagtggcttacgcctgtaatcccagcactttgggaggccgaggcgggcagatcacttgagatcaggagttcgagaccagcctgaccaacacagtgaaaccccatctctactaaaaatacaaaaattagcagggcgtggtggcacacacttgcaatcccatctgctcaagaggctgaggcatgagaactgcttgaacccagaggcagaggttgcagtgagcggagaccatgccactgccctccagtcagggtggcagagcaagactccgtctcaaaaaaaaaagagagagaaaatatatatatattttactgttcaatttgatgagtttcagcaattttatatatctttgttaaccaccatgcaacacaacatacagaacatttccatcacacttcaaaattcccttgcgtctttttccagtcgatactgccccttcccactagtaatcattcttctgactcctctcactgtagatttgctgtgcctgttcatgaatggaatcatacaatatttggtcttttgngtttggcttctttcattcaatacagtggtttttgagaatcatctggttggtgcttatattancagt

SEQ ID NO: 907 - DNA, 838 bp, Homo sapiens
  misc_feature (831)..(831): "n" may be a, t, c, g, other or unknown
  misc_feature (833)..(833): "n" may be a, t, c, g, other or unknown
  misc_feature (838)..(838): "n" may be a, t, c, g, other or unknown
gaattatgccaagcatttgtataaggctaatgtttagcaggaagcattcatgatcaacgatttatcttgaaaataagattccttcgtctgagggattgatctgtatgtgtgtgtatatttagtttctcatgacaagaaaaatggtattcagtcagctataatatcagtatctataatctatttctcggtaaacatatttgtacatatacacgtttatttttctaatttaacagatgtccttggtatttatttgcattttgtcatagcattcttgctcatatgacctgcactccagcctgggtgacagagccagacttatcccaaaaaaataaatgtacagtttacagagaaatactagacacaggtaagttgaaaataaatagattgaaaagcatattttaagaaaacagtaaaagattgaagtgactatattaatatcaggtaaaatagattgcaacagaaaaattttgtatcaggtaatgtggattcttcatagtaacaaaagttcatcaggaggacatatcaatcataagtgtatatttatttaatgcagaatgacttaatacatgaaaactgactaaaggcagaaatagttccacaatcagattgagattttaatgtaactctttcagcaactaataaaaaaaaattactcagaagatttggaatttattattagccattcttgatcatattgatggttattaaacgttatatcttacagctagagaattctcattcttttcacatgcatatggtacattcacccaaaaccagagcatgctgggctttgacatgctgggccataaggtccaaaggattaagattatntngagtn

SEQ ID NO: 908 - DNA, 786 bp, Homo sapiens
  misc_feature (650)..(650): "n" may be a, t, c, g, other or unknown
  misc_feature (713)..(713): "n" may be a, t, c, g, other or unknown
  misc_feature (769)..(769): "n" may be a, t, c, g, other or unknown
  misc_feature (773)..(773): "n" may be a, t, c, g, other or unknown
tgtccagtctggtctcgaactcctgacctcaagtgctccacctgcctcagccttccaaagtgctgggattacaggcgtgagccactgcacccggctagaactcactttctccaaatccctctgcttcgaatttcaccgtcttcagctctttctagttctgggcctcaccagcctctcattctgcctgttttcaaaccttacgatccccaaaaattgtctggttctgggcctctaactccctctggctctatagtctatgactaccagattcttttggttctagaattcactaacttcctctggttctagacctcttcctataaattaatccctcttgttttagatctcacaccctccaacgccctctggttccagatcttatattcagtgatttcctctggttctggaccccacaactccaagcttcctattggttccagttctcctgatcggtaatacatttggttccaaatccagacctcttaatctctctcttttttttttttttttttttgagacagagtcccactctgtcacccaggctggagtacagtggctcaatctcggctcactgcagcctccacctcctgggttcaagcaattcttgggcctcagcctcccaaatagctgggattacaggcatgtgccgncacgcccagctaagttttatatttttagtagagacagtgtttcaccatgttggccaggctggncttgaacttccgacctaactggatccacccggcttaagcttccaaagtgctgaaantacnggagtgagcctgg

SEQ ID NO: 909 - DNA, 836 bp, Homo sapiens
  misc_feature (680)..(680): "n" may be a, t, c, g, other or unknown
  misc_feature (689)..(689): "n" may be a, t, c, g, other or unknown
  misc_feature (795)..(795): "n" may be a, t, c, g, other or unknown
  misc_feature (827)..(827): "n" may be a, t, c, g, other or unknown
caagatgtctgctcaccaaactcacttgcttttaatgcttaggaatatgtatattccagtattccttgtatgaaaataattagtaatgtcagacattgttgtaacactgtactaagtagaagtctagggttagcttgaatgaatgttaactttctctgtgaattttgactgcttacaattgctggtacctggtagcatttattttccctcaagtacctagtaaccttatgaaggtagggagggtagatgctctaccacattccttcagctgtattgagtgttccatttgcttatcaatttagagctcttctatggaaagagggtgaaaatctgttttgtgcctcttttttttgtatgtaaatgtgcaattatactggattttctcttgtaaaaaacactacaattcttttactgaagctcctaaactgccatttgcctgactccagcaattaattctgcggtgactcattgggcttccagtacttctgttgattagatatggtcccaaaagaaagagcaaaatggaaaatgcgatccatgtcaccaaatataattgctacaagtaacatgaaatacagctcaccaaaacactaaactttgctcttgagcaattatatagtttgatgtccttttaaaaaataagaaaagctaggttttatcatactaaaattttattttgnatatgatgnttggttttttaaacttactaacataaggatttcctttaatattccaaatcaagtcttgaaacagtattccaacatgaaatcttatctccttgcttttaaacttaangctatttactatctaaaggacttttctatggnaagcccggg

SEQ ID NO: 910 - DNA, 832 bp, Homo sapiens
  misc_feature (578)..(578): "n" may be a, t, c, g, other or unknown
  misc_feature (708)..(708): "n" may be a, t, c, g, other or unknown
  misc_feature (744)..(744): "n" may be a, t, c, g, other or unknown
tcttaattttacaagcgaggaaatgagagtgtttcttgtaggggtgtagtgagaatttaataaaacagtttaaggaaagaaaacaaaaggtagtattgctgcactttctagatggtaaaaagcaaaccaccatgtctgtttaatatatatcacctgctggtccctcggtctagcaggctgaactgtgtgcctgggaattttcttctcgctgtgtgcacccctttacgtcacagggtggactctcttcagagtcctagtggagcagctggccaggctgacatgatctgacaacattgtaggttaccactaccatctctcaccgtctcactttcttcctaggggtctcctgctgccagctaagtgtgggagaacttgtgcacgtatctcccctccgaatcccaacgatgggtaacgccagctttggctccaaggaacagaagctgctgaagcggttgcggcttctgcccgccctgcttatcctccgcgccttcaagccccacaggaagatcagagattaccgcgtcgtggtagtcggcaccgctggtgtggggaaaagtacgctgctgcacaagtgggcnagcggcaacttccgtcatgagtacctgccgaccattgaaaatacctactgccagttgctgggctgcagccacggtgtgctttccctgcacataccgcagcaagagtggcgacggcaaccgcgctctgcancgccacgttatacccgggccacgccttcgtcctggnctactcagtcaccaagaaggaaaccctggaagagctgaaggccttctatgaagctgatctgcaagaatcaaaggtaccaaccctgcat

SEQ ID NO: 911 - DNA, 830 bp, Homo sapiens
  misc_feature (649)..(649): "n" may be a, t, c, g, other or unknown
  misc_feature (697)..(697): "n" may be a, t, c, g, other or unknown
  misc_feature (764)..(764): "n" may be a, t, c, g, other or unknown
  misc_feature (806)..(806): "n" may be a, t, c, g, other or unknown
  misc_feature (811)..(811): "n" may be a, t, c, g, other or unknown
cacatttctcagaagcacaccattctgctctgcaaatatctttgtaggagaaattggaaattgacaaatacattcacttaaattttgctttgtgctgaaaattgaggaaaaatttaaattggccatttgcacattattagtagtaaatcaacccatgtaaagatggaaactatggtcatttcaaaagtgattttcatttttggtaagtgggtcctacagcattatgtcctcatatttgtgagttattgcaccctggctagtattttcattgctgccttatgtttatttgctgcaaatccctctcaaaactgtgtgcattggttataatgctaatgaggaagataattcaaactaaaattcaaatcataatagctttaggattttagagagatagtataaggttaactcattttcagcatgtgcagacttaattatgcatgggatgaaatacagtaggcaagtctcagcctaataataaataattgaaaaatataacctgtacaatatttaaactggctttaatattacttaattatcacattattctttttcattcatcatttcttttccaattctctcaccctaccattaagacagtaatgattttataagatgtagatccggtattaagttttgcttgctctactgnctcaaattattataacttctttggtattactggcttggttctggttgnctttcacaagtctttgactcagtagtagtagcaaatgacagagatcttcaagtgtcttaatgcttgncaatataatattattccacttgataggatgtgtccccagatncattnccgagtttaatcggtggtc

SEQ ID NO: 912 - DNA, 475 bp, Homo sapiens
  misc_feature (449)..(449): "n" may be a, t, c, g, other or unknown
  misc_feature (454)..(454): "n" may be a, t, c, g, other or unknown
  misc_feature (473)..(473): "n" may be a, t, c, g, other or unknown
ataatgtgctgttcttgttattactgctattctgtgtcatcactctattccttctctactggatcattctcatcaacctaggatctctcttttttttttggagagagggtctcactctgtcactcaggctggagtgcagtggtgtgatcatagctcactgcagcctcgaactcctggcctcaatccatcctcctgcctcagcctccagagtagctgggaccgcaggtgtacaccaccatgcccacctaatttttttttaaaaaaaggccaggcatggtggctcacacttgtggtcccagcactttgggtggccgaggcaggcagatcatgaggtcagaagctcgagaccagcctgaccaacatggtgaaaccccgtctctactaaaaatagaaaaattagccggtcatggtggcacacgcctgtaatcacggctactcaggaggctgangcacngagaatcgcttgaacctgnga

SEQ ID NO: 913 - DNA, 740 bp, Homo sapiens
  misc_feature (720)..(720): "n" may be a, t, c, g, other or unknown
  misc_feature (728)..(728): "n" may be a, t, c, g, other or unknown
cactccatgccctgtgaatgaaacagatggctttcctgacctctaatcaaagcctacccatattgatctgttccttctagtccttagtatgtgctacctcttcttttctgtgccgaagtggtgagtagccaatagttatttcctctaccagtggtattttactaggcaattattggaaatagaatgctgccacccggtagtgataaatctaacatttctcgtagaagatataggtggattagttactccctggggcaatatggattagttcctgtgtccttcaaattgcactcaccaagcctgagccatgctttactgctgaaacatcctagcagagagaagtaagtggctcagggtggccctcttgtggtggacaagcattcccaggactctgctggtcactaaagaaaaggtagccctcaaacagtcctttttattatttttgattttattgtcatcattatcagtatcctccaagtcaagaatccgtaaataatacaatgagatgctaaaaacaagtttgaaaaatgtgagcaaggtctgtttctagttttaaaatagcccacatttctcaaatatgttactgtttggttcagaatttggaccactacctaaaaagaacagatcattcaaacgtgtcttttgaatatttctgtcatctggaaatgcctgcgcataagccccatgacggatgtgcttggctaaaaaacctgttgacgntttggggnttttcccccccc

SEQ ID NO: 914 - DNA, 742 bp, Homo sapiens
  misc_feature (726)..(726): "n" may be a, t, c, g, other or unknown
tagtaaagtaaaaggagctatcttcttctgttccataaatgtttaatgaggatgttagattatctagggggatagtgagatgaataagatagaggttttgaactcaaggtgcttatgtgctaattatgttatgttgcaagtaatattaaaatttttcattgttttgatatttaaattgcttcatcattaatttttcatcactaaatagtttttctttgccagagggagactgatcaggaatgggggctagagcacatgacatatgttctctgtagcgatagctattggaatttcaaaatttattttacttgaaaacacaataaatggtagttgctgctgctattgttatttggagcctaaaacagaataaagaactgatccttaggattttctagtcataccagtggaatgagccacatgttttagggagctcacttgacataaagcaaagttattactttgaataatggttgccatatagttgtgagtggacacactgatagttaaagtagctgcaaatgcatttgtcttattttatttgtggtattttccttctttgttacttctagacccttgctaaaggagaaaatctagaaaacttagagaaatatatagtgattaaataaataggtaatagttaatgagtattaaagctcttctgctttcagtattaaaatattggatttttggaaatgttcttaaattgacagagtaaaagaggttttnaaaaaaaatttttttt

SEQ ID NO: 915 - DNA, 721 bp, Homo sapiens
  misc_feature (700)..(700): "n" may be a, t, c, g, other or unknown
  misc_feature (712)..(712): "n" may be a, t, c, g, other or unknown
  misc_feature (721)..(721): "n" may be a, t, c, g, other or unknown
caatggacaggagtgggctccctgaccttcaaggaagatttgagctatctgggaaaaacagacagtatccactggatgcattggaaccccaacccagcattggggatattaaggacattaaaaaagcagccaagtctatgctagacccagcacataaatctcatttccaccctgtgaccccaagtttagtattcttgtgtttcatatttgatgggttacaccaggcattactgagtgttggtgtgagcaagaggtctaatactgtggttgggaatgagaacgaggaaaggggtactccttatgctagcagattcaaagatatgcctaactttattgcccttgagaagtcatcagttctccgccactgctgtgaccttttgataggcattgcggctggatcaagtgataagatttgcaccagcagtctccaagttcagagacgattcaaggcaatgatggcatctattggaagactttcacatggtgagagtgctgatctgctaatcagctgcaatgcagaatcagccataggttggatcagctcaagaccatgggttggagaattaatgttcacacttctatttggagactttgaatcccctctacacaagctacgcaagtcaagttagttgccaagaaagcacagatgacaacctattaatgctgtgagaatgtttctagatcagtgcatggatggctncattgctctacnggccattgn

SEQ ID NO: 916 - DNA, 728 bp, Homo sapiens
  misc_feature (719)..(719): "n" may be a, t, c, g, other or unknown
  misc_feature (723)..(723): "n" may be a, t, c, g, other or unknown
  misc_feature (728)..(728): "n" may be a, t, c, g, other or unknown
tctcagttgaatgcaccaactggtttgagtcctgtgagcattcagtcagttgaaattaaagattcctcatttctcctgatttctattcttgtctcaatcttaaatttagagaccagttgtttttatgatatcagccatttgatttttttcattttctatttaagaaatatgaagaaaaaatacaccaagatggtcaaattactacacaaatcagcaccagcacagtctgatagctgcaaatgtccattcatctgctgtgtatgtatatccagaatcagcgtaggaagtcgttcaggatatcagtatataatgcacagaagtgtgggttgtttgaaagccaaacaggagaatcacatgaatccaggaagtggaggttgcaatgagccgaaatcctgccactgcattctagcctgggcacagagcaagactccatctcaaaaaacaaaatggtccagcaaggtggctcacgcctgtaatcccagcactttgggaggctgaggcaggcggatgacaaggtcaagagatcgagaccttcctggccaacatggtgcaaccccatctctactaaaaatacaaaatttagctgggcatggtggcacgcacttgtagtcccagctacttgagaggctgaggcaggagaatcgcttgaaccggaaggcagaggttgcagtgagctgagatgcgccattgcactccagcctggcgacagagcgaaaatnaaanttttn

SEQ ID NO: 917 - DNA, 711 bp, Homo sapiens
  misc_feature (654)..(654): "n" may be a, t, c, g, other or unknown
  misc_feature (702)..(702): "n" may be a, t, c, g, other or unknown
  misc_feature (711)..(711): "n" may be a, t, c, g, other or unknown
acacttccatgcacatttcaagaatgcagatggacacctctccctttggtgctactgtctgagggtgtaagattttaaagtgagcatctggcggtagtagcatttttagatatattcttggctaagtttctcattgcagtgcctttctttcctgccagtagtttcacagctatttatccagcttggagaaccttccctaatttcatatcttctagccaagtttttacatgtctgtcaccacaacataaacatgtgagttgaataacttttaaaagcagagtctgtctgtaaacaagtttttgccttctactttcaattgccttcttagatgagctaagtgttgaacggccggctcagtgctgtttttgggactatggaatgcatcttcctccaccactcccctcatttaatgaaaggactttcttctctctccatctagcacagtaatcgctaatcccttagacaatgttttcccaaaatttcaggcagctattctatcaacaaactgataattaaacttgtgtcacatctttgatattctgttgtattaattctgttggggtagtctttaatcttcgtgaaactttttctttccatattaggaaatattttcctaatatctctaaagcctaacttgtccatctgacttactgnctgaatcttcccaacttatgcatgcccacttttattggttaaatttgnttctttttn

SEQ ID NO: 918 - DNA, 741 bp, Homo sapiens
  misc_feature (707)..(707): "n" may be a, t, c, g, other or unknown
  misc_feature (734)..(734): "n" may be a, t, c, g, other or unknown
ggtagtggctgctgtgaccgtctcccagcatatcctaagaatggaactttctcaggattcttcatggctcatggaagaaaacatataagagcatgcagatcctgtgtatctacggcagggaacattagctccctgctcagcctccatggaaccacaggattgtattgtatattcctaggagtgaaactgctgggtcatatggtatctgtgtcatctgtttgaggaaccaccagacggtttttctaaatgcagcatttttctgttcctaacaacagcatatgggggttctgatttctccacatcctcaccaatgcttgttattgtttgactttttgattctagccaccccagtggatgtgaactgatatctcactgtggttttgatgtacatttctgtattagtcagctagggctatcataataaaataccataggctgggtagtttaaacaacagaaattctcatgattctggaggctgggagtccaaaatgaaagtactaataagttggtttctggtgaagcgtctcttcctggcttgaagacagccactttcttgctgtgtgtccatgtggcctttcctctgtgcacatgcagtgggagagagagaatactctggtgtttcttccgcttcttataaagatatcagtactactggattagggtcctttcctgtgacctcatttttaccctttttgcctccttgaangccttgtctgcaaaaaaaattttttanccccccc

SEQ ID NO: 919 - DNA, 744 bp, Homo sapiens
  misc_feature (729)..(729): "n" may be a, t, c, g, other or unknown
  misc_feature (740)..(740): "n" may be a, t, c, g, other or unknown
  misc_feature (744)..(744): "n" may be a, t, c, g, other or unknown
aagcttttaataaggagaaggaagagctgaagaaatggcacagtgttcttagaatgacagatagtcctatggggactgcagcataaaagtgaaaaatgtataagataaacctttagatggtaagcaaggcaagattctcaaattctgtatgaatcagctccacctccgccccatggacagtagatgaccgttaatggcttttaaggaaagatgcaacctggaaataaagaaaaaaaacttgttttagaatggtaaccactggcaatatgaagaataattagactaaagaagagaggtaggataatcatgggcattggcagtggaattgaaagagtaatttcagaagcagaatggtcagatgttggaggtgattggttatagagtttaagaattgtactgattttctattgtgtaacaaactaccccaaaacttaatggcttaaagcaactattatttctcctgattctgtggttgactggatggtcgtctgctgctcttgcttagacttaggcatctgcatttagctgagggttcagccagggctggacatcctttaatggcctcattcccatgtctggggcctcaggtcagatagctgggactaccgggtctcactccagaagaggcttcttcagagcatggtagtcttggggttctaagagaatgagagtagaagctgcaaaacctcttgaaactggggcttgggagtcacacatgacttttttttnccccctttttncccn

SEQ ID NO: 920 - DNA, 742 bp, Homo sapiens
  misc_feature (724)..(724): "n" may be a, t, c, g, other or unknown
  misc_feature (729)..(729): "n" may be a, t, c, g, other or unknown
ctacaaagtagttcctgtttcgctctcagaggtttatttactccagtgcaatatgaagttcccaacccagtcttcctttgaccgggtgatgcctctcctgaatgtggcagtggcctctctccacccactgactgatgagcatatcttccaggccatcaatgctgggagcattgaaggcacactagaatgggaggattttcagcagagaatggagaacctctccatgttcctaatcaagcgcagagacatgactcgtatgtttgtacatccttcttttcgagaatggcttatctggagagaagaaggagagaaaaccaaatttctctgtgatccgaggagtggtcacacgttacttgccttctggttttcccgccaagagggaaaactaaaccgacagcagactattgaactgggacatcacatcctcaaagcacacatttttaagggtttgagtaaaaaagttggtgtatcatcctccatcctccaaggtctctggatctcttatagcacagaaggtctttccatggcactggcgtctttacgaaatctctacactccaaatataaaggtcagccgactgctgattttgggaggtgccaatattaattaccggacagaggttttaaataatgctccaattctatgtgttcagtcccatcttggttacacagaaatggtagccctgctgctggagttcggggccacgtggatgcctcttcctttnggggnaaaaaaaaaaaaa

SEQ ID NO: 921 - DNA, 745 bp, Homo sapiens
  misc_feature (725)..(725): "n" may be a, t, c, g, other or unknown
  misc_feature (732)..(733): "n" may be a, t, c, g, other or unknown
ccgcaaaatgccgtgactgggtagcttataaacaaaagtaatttgtcaccattcttgagtctcagaagtccactcaaggcacagactgtgcctggtgagggcccactttcaggttcataagtgatacttggctatatcctcacatggtggaaagaacaggacagcactctggagtctcttttatcagggcactaatcacattcatgagggctctaccttcctaattgaatcatagccccacctcctaatactatcatattggtaattagacttccacatatgaattttgtgggggacacaaacattcggagtatagcacaggttcacaggaaaaacgtaaggaaaagagtactcagaatatagggtgatagatacatataattttaaggtaattcaaaggagggagtgattaacttgtgactgaatcaacaaagactttttgatgagtttgtagctgaggttaagcataaaacagttttttagtggaaaatttgaagcatgtcattgttgggcagaggaattgacatgtaccagaaaatcagaagtatgaaacatcagatgctaacagaaagagacaggtacatcaatatttgtaaagcaaagaaatgaggatgaaaatcagtaggaacaagccatattaagaaagtatattgactattttaaagtaacagactgtgtgttcatttattcttttggtcattcttggagtttcttattcacatttnaaaaaannggggggggggga

SEQ ID NO: 922 - DNA, 739 bp, Homo sapiens
  misc_feature (718)..(718): "n" may be a, t, c, g, other or unknown
gcacacatatgtctaggatagccagcattcaggaaaattgctgtgaacctcctgtttttaattttaatatagaaaaagtctttcaggtttgtgacacgaagacagatttagcttcccacttgtcagcaaatttgtaaaaacctcaaaacaaatgaatatttggaattcactctaagagatacaaatcctgaatttctaactatcttctcaaatattactgaggccagcaagatgcaagtgttctacaaaataatgaactgttctaagtgacagtgttgatgctggaagtggaatgttatgttttcgctcagctgtattcattcagaaagtttttcttgaacatctgccacatgaggtgcagagaatactgccaggtgctagtttttccagtatttgacttctgattactatttccttttctcatctttagtttttcaagattttgctttaccaaaatagtaaagcctttatcatcagcttatattgaataatgttgtaattggtttcaatcaaagtttctcctcaggtacttgggggcccctagccttctaaggaactcccaggcacctacttaacaaggccagctacacactcagtatgtgataagccccatgatggatgaaggttagaattcaaagacctggttggagtcctagatgtggagacaggatgatcaggtcacacttgttagatgactaacactatcagtagaagcttncccttttttttggggggggga

SEQ ID NO: 923 - DNA, 727 bp, Homo sapiens
  misc_feature (725)..(727): "n" may be a, t, c, g, other or unknown
tttctaacttaaaagatttttctggagaagatagatttaagaatgttgaattactccaacaattgttttgaaccaagataattttttttcatatcatgtgaggcttcaaggatttgaggctacacatgttagattccaaattcttttaaaatgctttcctgatttaataacaaacagcattttccttctttttaatatgtctatcttgagatatggtttaaatgaaacagatcttgaaagggtctctgagaaggaaattttcatggcatgtcctctagcaccagacttgactgcaccaggtcaggggataaacagcactttgcagatgagtgtgctttattttgaggccctcagacacttcatgagacccctgtattctggaattcactgcctcactactgctgatatacacaatgctatgaaaaatggggaaccattactcatatatttgctaattatgatacctctcacctcttcccctcttttcccatcctcttctcttttcccccaaccaaataaaaaactaaaacaaatacatatatttgttttattttttgcttatttagttttactgtcttattccttaatgtgtgcacctgtagtctcagctactctggaggtttaggcaggaggatcacttgagcccaggagttctgggctgtagtgcactgtgctgatccactaagttctgcatcagtatggtgacctcctgggagttggggggnnn

SEQ ID NO: 924 - DNA, 743 bp, Homo sapiens
  misc_feature (726)..(726): "n" may be a, t, c, g, other or unknown
  misc_feature (737)..(737): "n" may be a, t, c, g, other or unknown
attgtacccagagtgcagagccgcctttccagcatgcaggggctgctcagcgtttagtcacatcaagaaatagaacagaattcagccatggccccaagaaagagaggtggacgaggtatttcattcatcttttgctgtttccgaaataatgatcacccagaaatcacgtatcggctgcgaaatgatagcaactttgcgcttcaggccatggaaccagcattgcccatgccccctgtggaggagctggatgtcatgttcagtaaagcattcctcagcccacaaatgccctgaaatccttcaactggtctaaactgcccgagaacaaactggaaggaacagtatggaccgaaattgatgatacaaaagtcttcaaaattctagatcttgaagacctggaaagaaccttctctgcctatcaaagacagcaggatttctttgtgaacagtaactccaagcagaaagaagcagatgccattgatgacactctgagttccaaacttaaagttaaagagctttcggtgattgatggtcggagagctcagaattgcaacatccttctatcgaggttgaaattatccaatgacgaaatcaaacgggcaattctaacaatggacgaacaggaagatctgcccaaggacatgttggaacagctcttgaaatttgttcctgaaaaaaagtgacattgacctattggaggaacataaacacgaactggatcgggggggnaaaatttttgngggggg

SEQ ID NO: 925 - DNA, 721 bp, Homo sapiens
  misc_feature (691)..(691): "n" may be a, t, c, g, other or unknown
tctattgtgcggctgcaggaggtgtcgagcggcgttatttttttttgcggtttgcctttttttttctttttttttttttggaaccgcggttgtttaaaagcctgagggaacctggaggggggctcccactctctaccttctttcctccgagtttgtgactccgagatggacaaagtgtgtgctgtttttggaggctcccgaggcattggcagagctgtggcccagttaatggcccggaaaggctaccgactggcggtcattgccagaaacctggaaggggccaaagccgccgccggtgacctcggcggagatcatttggcatttagctgtgatgttgctaaagaacatgatgttcaaaatacatttgaagagatggagaaacatttaggtcgagtaaatttcttggtaaatgcagctggtattaacagggatggtcttctagtaagaacaaaaactgaagatatggtatctcagcttcatactaacctcttgggttccatgctgacctgtaaagctgccatgaggactatgattcaacaacagggagggtctattgttaatgtaggaagcattgttggcttaaaaggcaactctggccagtccgtttacagtgccagtaaaggaggattagttggattttcacgtgctcttgctaaagaggtagcaagaaagaaaattagagtgaatgtanttgcaccaggttagtgaaaactttattttt

SEQ ID NO: 926 - DNA, 813 bp, Homo sapiens
  misc_feature (813)..(813): "n" may be a, t, c, g, other or unknown
tcatcaatggatgaatggattttttaaaatgtgatacatacatatatatatacatacatacatatatatatatgcacaatggaataatattcagccataaaaaataatgaaatcttgtcatttgcaacaacatgaataaacctagagacactatgttaagtgaaataaactgagcataggacaaataccacattatctcattcatatgaggaattttaaaaaattgatgtcatagaagtagggagtagaatactggttgccagaggttggagaaagcagagcggcaggggagatagagataaacggttggtcaacaggtacaaagtaagctacacttagataggaggaacaagttctgttgttctattgcacagtaggacgactatagttagtgataatgtatatttcaaaatagctagaagagaggatttttaatgttttcaccacaatgaaatgataatgtttgaggtgaggaatttgctaattaccctgatttgatcattacacaatgtatacatgcattgaaacagtatactccttaagtacatatgattgttatgtcaattaaaaacaaaataaaactaaagaagaaattgctaagggagtaaattccaaatgttctcaccacaaaaataagtatttgaggtgatggatatgacaattagctggattccattattccacattgtattcataaatcataacatcctgtaccccataaatatatacaattataatttgcaatttacaatttaaaataaaaattaaaaaagaattgatggttctgtaaataaattagttaattcaaaacan

SEQ ID NO: 927 - DNA, 811 bp, Homo sapiens
  misc_feature (712)..(712): "n" may be a, t, c, g, other or unknown
  misc_feature (769)..(769): "n" may be a, t, c, g, other or unknown
  misc_feature (811)..(811): "n" may be a, t, c, g, other or unknown
ataccaatgtcaatgcagatgtgcaaaagttgcagcaacagttacaagacattaaagagcagacaatgtgccctgtgtgtctagatcgtctgaagaatatgattttcctttgtggtcacggaacctgtcaactctgtggagaccgcatgagtgaatgtcctatctgtcgcaaggctattgaacgaaggattcttttgtattaactaagacacatggtgtattttgttagctaatgtatctagtcatgagatcttaataggcttttgatctagttggaagttctgatgagttaatttctaatatcatagtttctttactagagtataattgggctgtaaatgtaccagaacaaaaaaccctacaaaatggtgttggaaattgtgtttcttgtttttgttttaaatttgaaacatcaaattcatgtaactcataggataatttacctttggcttctaagaggaaagtcctttaaggatatccttttttaaaaaattgcatttttctcttataatttgtaaatttgttggatctcaaaagacataattctttgtgatcagttatccttcatttcatcgtggttttacacagtgagttgataacgggttctctgagaagtcatgcatcaaataaaagaggcaggtcaaacaattatgtcacatggtaaattataaaatgacagtacaagttccagatagttaagggaataccgaanggatgattctttttttaagataacaggaagttacccacatgtttggttctgaattcntagagtaaatggaacatagaatgagggaataatgactttgcn

SEQ ID NO: 928 - DNA, 813 bp, Homo sapiens
  misc_feature (810)..(810): "n" may be a, t, c, g, other or unknown
tgttctggaagatagtccagctggcaaaaatggaaccttgaaacctggagatagaatcgtagaggtggatggaatggacctcagagatgcaagccatgaacaagctgtggaagccattcggaaagcaggcaaccctgtagtctttatggtacagagcattataaacagaccaagggcacccagtcagtcagagtcagagccagagaaggctccattgtgcagtgtgcccccaccccctccttcagcctttgccgaaatgggtagtgatcacacacagtcatctgcaagcaaaatctcacaagatgtggacaaagaggatgagtttggttacagctggaaaaatatcagagagcgttatggaaccctaacaggcgagctgcatatgattgaactggagaaaggtcatagtggtttgggcctaagtcttgctgggaacaaagaccgatccaggatgagtgtcttcatagtggggattgatccaaatggagctgcaggaaaagatggtcgattgcaaattgcagatgagcttctagagatcaatggtcagattttatatggaagaagtcatcagaatgcctcatcaatcattaaatgtgccccttctaaagtgaaaataatttttatcagaaataaagatgcagtgaatcagatggccgtatgtcctggaaatgcagtagaacctttgccttctaactcagaaaatcttcaaaataaggagacagagcccactggtactacttctgatgcactgtggacctcagttcatttaaaaatgtgcaacatctggagctttcccaggatcaagggggnttg

SEQ ID NO: 929 - DNA, 814 bp, Homo sapiens
  misc_feature (706)..(706): "n" may be a, t, c, g, other or unknown
  misc_feature (732)..(732): "n" may be a, t, c, g, other or unknown
acagcgctaaaaaggcctggaggttcggactgggtggagctcaacacagtgtggcaaagtggctgcagccagactgcctctctagattcctcttcactgggaagggcatctctgaaagaaaggcaccagccccagtcaaggggttatagataaaactcccatctcactggaccagcgtatctgggggaaggggcggctgtgggcacaacttcagcggactttaaacgttcctgcctgctgactctgaagagagcagcagatcctgacaaggagggctctcccagcacagcgcttgagctctgctaagggacagactgcctcctcaactgggtccctgacctccatacctcctgatggggagagacctcccaacagcgattgtcagacacctcatgcaggagagctctggctggcatcagcctggtgcccctctgggacaaagcttccagaagaaggagcaacagcaatctttgctgttctgcagcctacactagtaatacccaggcacataaggtctggaatggacctccagcaaactgcagcagacctgcagaagacgggcatgactgttagaagaaaaagtaacaaacagaaagcagtaacatcatcaacataaggaacccccatacagaaacaccatccaaagatcaaaggtaggtaaatccataaagatgaggacaaaccagcacaaaaacgctgaaaattncaaaaaccagaatgcctcttctcctncaaatgattgcaacttctctctacaagggcacaaaactagacagagaatgagtttgatgatttgacagacgtaggctttaaa

SEQ ID NO: 930 - DNA, 816 bp, Homo sapiens
  misc_feature (756)..(756): "n" may be a, t, c, g, other or unknown
  misc_feature (764)..(764): "n" may be a, t, c, g, other or unknown
cgatatgccacacagtacttccaggtggagggataccgccaatgacaatgagggccactcggatggcctggcaagaagagggagaggcgagagttcaagtggctatcccgagccaaagtaccctgaagacaaacgggaagcgaggagtgaccaagtgaaaccagaaaaggtgccgagacgacgacgcaccatggccgaccctgacttctggacgcacagtgatgattactacaaatactgcgacgaagactctgacagtgacaaagagtggattgctgctctgcgtcggaaatatcgaagccgagagcaaaccctgtcctccagtggtgaaagctgggagactctgccggggaaagaagagcgggaacctccacaggctaaggtgagtgccagcactggcaccagccctggccccggtgctagtgccagtgccggggctggcgccggggccagtgctggcagcaatggcagcaattaccttgaagaagttcgagaaccatcccttcaggaagagcaggcatccctggaagaaggagaaattccttggctccagtaccatgagaatgacagtagcagtgagggggataatgattctggtcacgagttgatgcaacctggggtattcatgctggatggaaacaacaaccttgaagatgactccagtgtgagcgaagacctagaagtggattggagcctctttgatggatttgcagatgggtttaggaatggctgaagccatttcctatgtggaccctnagttcctnacctacatggcacttgaagaacgcctgggcccaggcaatggaaacttgcctt

SEQ ID NO: 931 - DNA, 656 bp, Homo sapiens
  misc_feature (627)..(627): "n" may be a, t, c, g, other or unknown
  misc_feature (644)..(644): "n" may be a, t, c, g, other or unknown
  misc_feature (652)..(652): "n" may be a, t, c, g, other or unknown
agagaatcccggctcctgctgcaataagaggctgttctggaagctctggggttcgggtctttgtccctgcaggttggtggtgggatgaaacaggagacagcgggcttggaggcaccactgggaggcgggaccgacgtgccacagttggtgggagcagaggcgtgggcacatattgagggggcggggcctgacgcacaggtgcgggccgcggaccccggctggggctgaaagggcggcgctgctgggagggcgggcgtggaatccccgcactgaagccagttccagaggcgccaaagcggctgggcgaagccggtggcgcgggaaaggggtctgcagaccgcccgagcctgggaggtctgcggggaggctgcgctccggcactgcatggaccttgtgcagcattccgtgcacgccattgtaagatcagcatatggacagttctagggagatgcctctcattcccagaagaggactacgaaacgcgtgcacaccgtcctactgcctggcgagtgtattagtagggtttcccggtgtctttcagcaagtgaagattctccttgtgtcccattcctacgcatcccatccatgttttagtttataggagtttataaaagatctggtttctanggaagttggggatccanatgatggncctg

SEQ ID NO: 932 - DNA, 810 bp, Homo sapiens
  misc_feature (727)..(727): "n" may be a, t, c, g, other or unknown
taaaatactttcagttttcacattttgacaactggcaatcttgaatggtcaaaaatgaattatctgtgttataccatttgggccttgtttgcttgtttttgcctctggttcttacatttatcattaaaatctccactgtagaaagcagttgggtgaagcaaggaggaaattgaaagtcaatccatatggatgttgcttagcagcttttgtaaagtacaataacaaatctccctcacaaatgagagaaactaaaaggacttgttaaataaaactccaaacttaagtctgcttctaggaattgtatttatttatcgtttcaagtatatcttttcatactgactatgagtaaagcaaagcaatagattgtttgaaagtctatagtttatgatgagctttgtcttttcttttcttcttacttcaggctttgagttacacaggtagccacatgaaagtccacttacccagcttagtagagaatgaaatcctgaaagaggatggatcaataattaaaaggtttgggttagcatggggtgatgctttgccaactaacaccataaaaatttttccaattttaagaaaagaaggggagaatccctacatctaccctaaagaggatagaaaactgcctactctcctgtattataatactttggtcaagtaatggatctattgaagtatcatccctgaagtatcctcttgatacttcaaacataatactaagtcatancaagaatgagactcacgcttacacagtctgactccctgggtttagcaagccatcaacttaattgaagccagcctgatggtatt

SEQ ID NO: 933 - DNA, 309 bp, Homo sapiens
  misc_feature (267)..(267): "n" may be a, t, c, g, other or unknown
  misc_feature (273)..(273): "n" may be a, t, c, g, other or unknown
  misc_feature (293)..(293): "n" may be a, t, c, g, other or unknown
acggttgcccggcaacaacaagtcccgtcgggtggcagcggctggcggcaaaacctctcgagtgagcccctgcccgagtgccgcgggggagaggccgcgagcgggaccgagaagtgggctgggagcagaggtcgcggaggtggcgagcgaggccggggcccaggcggggaccggcaggggcccgggagtggcgggcacgccagggcggccgacctcggctcaagggcgcctcgagggaaacgcgctgaagctggacttgctgacttncgaccnggccctggacaccaccgctncccgtgtcccctgcat

SEQ ID NO: 934 - DNA, 806 bp, Homo sapiens
  misc_feature (806)..(806): "n" may be a, t, c, g, other or unknown
agttcaatgcgagctgagcagacagggctgcaaggaaatctggcgcggttcaatacctcgtctagcctgggttccagtatctaattttttttttgttttaactgacaaactcatttctctactgggacaggatgctgtgctggctggaagttccatttctacagcaagaatcctatctggaaacacagaagttgtcctctagccacagcagctcgaacttttttgattgtcgttgctgctttctcccatcacccccatccccttttgacaaagatccaactgtaaaaagtcttacgtaacagttcaggactacttcggttcttttactgggtaagcactttcaattttttttttttaactaaaagccattttaaaattgaatctgttgaggggcttgactaaaatcttttaagtaatttgtgtaatggaatactgtcagtggattttttcgtctcatttctgcacgtgctcctttgttctcagaacagaagctttttatacacatcccataacgcagctggagagagttatgaagtcagttattataaggaacacaaaggttgctttccattctttgcctttagataattaatttttttgttttcttaaaatggagtatttaaagaaggaagaaattcacaagaaataaactgttggagaatttagaaaagtttgaagtttttaccaccttttctatctctagttttgtgtggccaaacacttgtgccgcctggggcggtgggggtagaggcaagcatagacagagaggaactaaccagacatggacaaaggccgagccaaaaccn

SEQ ID NO: 935 - DNA, 692 bp, Homo sapiens
  misc_feature (488)..(488): "n" may be a, t, c, g, other or unknown
  misc_feature (606)..(606): "n" may be a, t, c, g, other or unknown
  misc_feature (639)..(639): "n" may be a, t, c, g, other or unknown
  misc_feature (656)..(656): "n" may be a, t, c, g, other or unknown
acttctggggcagccgtgagcagcgggcacacgggcagccacgaaagcagcagcgagggtggtgcaaacacctcataactacaccgaatccagtagcgcctggcgcccccggcgcgcaaggccgcctctactccgcctcatctttgtcccaagtcctttcacagcctgccttcctcaaacggcccgatgcgcccccgtctttgccggagtaagcagaccgccagcagccggcccgcaggtcagtcgaccctctctggatgcaggtcgccgggaaaacccggagcggagcatccctcgggccgggaaacgccctcggcgcgcacccactggcgcgcatgctcagtccgcgcggcggctgcgagtaggaagctccgcgcggcggcgggggcggcgacggcgactggcgggtgggagtggaggcaccggctggcgggcgggggtacagggacggggcaggggctcccgctccaggttccttgaagcacttncgaccgcgaagcccggcgcgagaagcgagctaacccaagagccaacaacgagcgcggagagggcagcggactgagcggagccgccggccaaaagcgggctcggagcccgggtctccgncgctcgggacccggctaggcggcggcgggggcngcatgttccactggatncccctgtggcggtgcaaccgtcatgtggagagcatt

SEQ ID NO: 936 - DNA, 814 bp, Homo sapiens
  misc_feature (617)..(617): "n" may be a, t, c, g, other or unknown
  misc_feature (688)..(688): "n" may be a, t, c, g, other or unknown
  misc_feature (733)..(733): "n" may be a, t, c, g, other or unknown
  misc_feature (755)..(755): "n" may be a, t, c, g, other or unknown
  misc_feature (789)..(789): "n" may be a, t, c, g, other or unknown
tagatgaaatcctttttcgggccaaactcaattgttttaacttaaaaaaaaattcattcagtttaagataaaataatgcttccttaataaaactaaaaacaaaaagcatctttagaagctgtgtagcgtactttatttatttatttatttggagacagggtctcactctgttgcccaggctggagtacagtggcacagtctcagttcattgcaacctccgcctcccgggttaaagcgattctcctgccttagcctcatgagtgactgagactacaagtgtggaccaccacgcctggctaattttggtatttttttggtagagacagagtttcaccatattggctaggctgttctgttgaccatgaggcaccatacctgggctgtgtagcagacttaaaaaaataagatttgaagttagaacttaaggctttgggccaattaatagttttgtttgtttgtttgcggcggaatctcgctctttcacccaggctggagtgcagtggcgcgatcttggctcactgcagcctctgcctcttgggtttaaggagtcctcctgcctcagcctcctaagtagctgggactacaggcgcatgccaccacacctggctaatttttgnatttttagtagagatggggtttccccatgttggccaggctggtctcaaactcttgacttcaggtaatcctnctgactcaaccttccaaagtgctgggattacaggcgtgagccatnacgcccagccccagttaatggntggggtaccttgagcaattcacttaatctctganactcagttgctcatttgtaaaatgg

SEQ ID NO: 937 - DNA, 773 bp, Homo sapiens
  misc_feature (406)..(406): "n" may be a, t, c, g, other or unknown
  misc_feature (472)..(472): "n" may be a, t, c, g, other or unknown
  misc_feature (716)..(716): "n" may be a, t, c, g, other or unknown
  misc_feature (722)..(722): "n" may be a, t, c, g, other or unknown
  misc_feature (741)..(741): "n" may be a, t, c, g, other or unknown
ttttgttttgaaactttttgtagagatgaggtcttgctgtcaagaccagcctggccaacatggtgaaaccccatctctactaaaatacaaaaatgctgggcgtggtggtgggcgcctgtaatcccagctactagggaggctgaggcaggagagttgcttgaatccaggaggcggaggttgcagtgaactgagatcacaccactgcactccagactgggtgccagagcaagagtctgtttcaaaacaaacaaacaaaaagaactttaaagatctgggccattgtcgacccataacattaaagcaaactttgtgagattttacattttaattctattaatactgctgttttaattgaggaactaatcaggtaaagattctgtccaccttcaatgcttctgtaaactanagcattttatcttgtaaaatatatgtttttcaaggtgttattctgacacttcttaatgtttttganagacagggtctcgctctgttgcccagtctcaaactcctgggcttaagtgatcctccacctcagcctgccgagcagctgtgactacaggtgcacaccactgcacgtggcttgatggtttccctataaaatataatcatcgactgagtcacctgaatccttttggaactagatgggagtaaacacacccacaaataagtgcttatcaagagtattccatttcccgtcattactcaaggctgcacanattttnctaagtgctcatcaaaagntcagtaaataatgtagggctatttcataaatc

SEQ ID NO: 938 - DNA, 835 bp, Homo sapiens
  misc_feature (6)..(6): "n" may be a, t, c, g, other or unknown
  misc_feature (81)..(81): "n" may be a, t, c, g, other or unknown
  misc_feature (796)..(796): "n" may be a, t, c, g, other or unknown
  misc_feature (800)..(800): "n" may be a, t, c, g, other or unknown
cattangagagaacaatgtaaaactgaagaaaaacttgacttacttacttctaaatgtgctcacctatgcatggattctgntaaaacttctgatgatgaagttggttctcccaaagaagaaagtagaaagtttactaatttccaaagcccgaacattgaccccacagaagaaaatgatttggatgattctttaagtgtaaaaaatggtgatagtagtaatgactttgtgacttgcaatgatatcaatgaagatgattttggtgattttggtgactttggctctgccagtggctcaactccaccttttgttactggtactcaagattcaatgagtgatgccacttttgaagagtcttcagagcactttccacattttagtgaaccaggtgatgactttggagaatttggggatataaatgctgtttcttgccaagaggagacaatattaacaaagtcagacctaaaacagacttctgataatttatcagaagaatgtcaattggcaagaaaatctagtggaacaggcactgaacctgttgcaaaacttaaaaatgggcaagaaggtgagattggacattttgattctgtgccaaatattcaggatgactgcaatggttttcaagactctgatgattttgcagacttcagttcagctggtcctagccaagttgtagattggaatgcttttgaggatgaacaaaaagatagttggtcttgggctgcttttggagaccacaggctactgaatctcatcatcgaaaggaagcctggcagtcacataggacagatgaaaatnttgntactccaggaacccccaaacgcacagtggtccctt

SEQ ID NO: 939 - DNA, 740 bp, Homo sapiens
  misc_feature (648)..(648): "n" may be a, t, c, g, other or unknown
  misc_feature (657)..(657): "n" may be a, t, c, g, other or unknown
  misc_feature (709)..(709): "n" may be a, t, c, g, other or unknown
ttatttataaaatcagtagagagtactagcaatgcgtcattctattatagagaagcttgtactgtagtgagatgataatctcttagagaaaaggggaaggcaggagaggaagcggaatctgccagcttaaagtcacagcatccaaatacctcaagtcctcactccaggtgaaaggagtctatgcaaaactgtcccaaaaacctcacgattcctgcttctttcttcctccatgtgtcaaggttgaaaggaattctgccacttccacgtgcttctgttgttatatgtaccgtcattattttcctaccttatcccagcccccagctgcaaaacaaactgtcatttatcaaatacttgcctgaccccaaatgctgagatctagtataattttaagcatatacaaaaaagacaaaaacatccctactcaaatgtaatctgtttttgtgtctgacatcaacttttaaaatttattttttaattaattaattaattttttttaagagacagggtctcactgtattgctgggctggagtgcagtggcacaatcacggctcactgcagcctcaagcgcctgggctgaggcaatccttccatttcagccttccaagtagctgggactacaggagcacaccaccatgcccagctaattnttttaattntttgcagagacggggtctccctttgtgcccaggctggtctcaaactcctggngtcaagcaatcctgctttcatcttccaaaag

SEQ ID NO: 940 - DNA, 745 bp, Homo sapiens
  misc_feature (653)..(653): "n" may be a, t, c, g, other or unknown
  misc_feature (719)..(719): "n" may be a, t, c, g, other or unknown
  misc_feature (726)..(726): "n" may be a, t, c, g, other or unknown
gctgcagatggcggaaatggatccggtagccgagttcccccagcctcccggtgctgcgcgctgggctgaggttatggctcgcttcgcggccaggctgggcgcgcagggccggcgggtggtgttggttacgtcaggcggcaccaaggtcccactggaagcgcggccggtgcgcttcctggacaacttcagcagcgggcggcgcggtgcaacctcggccgaggccttcctagccgccggctacggggtcctgttcttgtatcgcgctcgctctgccttcccctatgcccaccgcttcccaccccagacttggctgtccgctctgcggccttcgggcccagccctttcgggcttgctgagcctggaggccgaggagaatgcacttccgggttttgctgaggctctgaggagctaccaggaggctgcggctgcaggcaccttcctggcagtagagttcaccactttggcggactatttgcatctgttgcaggctgcggcccaggcactcaatccgctaggcccttctgcgatgttttacctggctgcggctgtgtcagatttctatgttcctgtctctgaaatgcctgaacacaagatccagtcatctgggggcccactgcagataacaatgaagatggtgccaaaactgctttctnctttggttaaagattgggctcccaaagcatttataatttcctttaaagttggaagactgaccccgncattggnaattaaatcgaagcttcgg

SEQ ID NO: 941 - DNA, 803 bp, Homo sapiens
  misc_feature (646)..(646): "n" may be a, t, c, g, other or unknown
  misc_feature (684)..(684): "n" may be a, t, c, g, other or unknown
  misc_feature (710)..(710): "n" may be a, t, c, g, other or unknown
  misc_feature (782)..(782): "n" may be a, t, c, g, other or unknown
  misc_feature (784)..(784): "n" may be a, t, c, g, other or unknown
ggacggagatgtgctttatgacgagtacattcttcccccctgccacattgtggactaccgaaccaggtggagtggtatccggaagcagcacatggtgaatgccacacccttcaagattgctcgaggccagatcttgaagatactcacagggaagatagtggtggggcatgccatccacaacgacttcaaagcccttcagtactttcaccccaagtccctcacccgtgacacctcccatatcccccccctcaaccggaaggctgactgcccggagaatgccaccatgtctctgaagcatctcaccaagaagctgctaaaccgggatatccaggttgggaagagcggacattcctctgtggaagatgcccaggccaccatggagctatataagttggttgaagtcgagtgggaagagcacctagcccggaatccccctacagactagtggcagtggggacgctggtgatatgaggaggcagaggcagcacccaggagaaacagggcagtggaccaatggacagctccaccagctccacatctttggaagctagatttggggagagagaagctctaccccagacttaatacccattgaaatttcacctcaggtgttgtgtcctgtgtctggttaagtgtcccatggaangggaaagccttcacgtcagaacccaaccctataccttntacttcttaaatggtgctaaccacangtgtcccaaggtgctcttgtgcccagttaagatttttaactttcaaggggcaagggcatactggggaaatgnantttcccaaactggccttat

SEQ ID NO: 942 - DNA, 731 bp, Homo sapiens
  misc_feature (611)..(611): "n" may be a, t, c, g, other or unknown
  misc_feature (656)..(656): "n" may be a, t, c, g, other or unknown
  misc_feature (670)..(670): "n" may be a, t, c, g, other or unknown
  misc_feature (729)..(729): "n" may be a, t, c, g, other or unknown
gaagctcttcatttcggttctgaatgcctattttggggaaacatttctgggattatgacagacatttcaatgacaacctgctctaggaggtttcctgcattgtcattgttaagtccatctatttattccttcttttaaaccagaatttctggcctgtaattttactgagaaatagaaatactatctttacaataggtgatattctaactgtctctacagcatgatggctttgcagctatttgaaagttgaaccccacatatactctttgttaaactgttattttgattctggttgtttctgaaatgcgtattggaaatgcagcattgtttgaatatctattgtgtgtgagttgctttctaaatgtaccttaatccttacaaacctggaggaaaaaaatgtttttgaccctgttttacaagttcgtgaactgaaatttacataggtattttttgtatgcccaagccatactgccaatgtcagaactagaacttgaacccaagttgtgactctcctttaccacttgatcaggagtttgctgatttagccaagtaacttgtaagatcttcacatgctttcttttagtgggattgcccagcaaagtgcttatcangtgatgatcccagtgaagtatgtcacagttatgcagtaacttaangctgctgtaatacngagatacattgaagtcattagtacttttcagggccccaaatggatctttaatgggtatnta

SEQ ID NO: 943 - DNA, 742 bp, Homo sapiens
  misc_feature (670)..(670): "n" may be a, t, c, g, other or unknown
  misc_feature (688)..(688): "n" may be a, t, c, g, other or unknown
  misc_feature (714)..(714): "n" may be a, t, c, g, other or unknown
gattacaggtgtgagccaccatgcctggcctcacccagaaacattttgaatgagcttaatggaagtagaagtctttgttagtagttctctgtaaacattttcactttcttcatgggacgatcctttccgcccccacttaaggcacccagtcctggctgggccctggacacattgctgagatgggctgaccaccaataccaggcccagtcattaaaagtacctgatgttagaagatcaagtgttaaatgtcatagcctagaaggagcagttctgggagaagaacccagatgtcctcagtgctccactccatacgagccctgggatgctggggtgtgagctaggccgtgcacaagccattagaaggtgttccacacaggggagcgtctctacccccttatccatgatgtccacacccagctggctggcaagatcacgggcatgctgctggagattgacaactcagagctgttgctcatgctggagtctccagaatccctccatgccaaggtaagcaggagcccgggcagcagggagcccgagggggcaggaggagagctaacgacaagggctctcctagtggagccagtggatagctgtttggccagataaagtgtttcttcttgctaatacctgaaggcctgctgaatcttaagagtggaaggggccttangtaagggtttgctacttnagccctttcgtagactaattctgggntggtcttgtaggtagggcttttggtcca

SEQ ID NO: 944 - DNA, 745 bp, Homo sapiens
  misc_feature (728)..(728): "n" may be a, t, c, g, other or unknown
  misc_feature (735)..(735): "n" may be a, t, c, g, other or unknown
  misc_feature (740)..(740): "n" may be a, t, c, g, other or unknown
ttgcattcataaaaattaaaattattcattaaaaacaccgtgaatgaaattaaaagtcaaaatgtaagccagaaaattatttacaatgtatgtgtcaggaaaagacaatacccttcaaactttgagagtttacatcagaaagaaaacagcaaatgacatgatccaaacttgataaaggacatgaaaaagagccagcacttagtatgttttctgaatgaataagtagccaacagcacatgaaaatgcgtgtaatccatttgtaagcagagaaatgcaaactaaaacagtaaagtgtcattttcatttcctggattggcaaagggttttatgtattttactgatagtgctcaatattagcagtaaacaacaaatggtgagtaaatatgagcttcggaacctcagggaaatgatctccttatttcaacctgtagattccttcctacaaccagtgtctacagagcacctactatgtgccaggcacagcctaagtcctgaaggtgtagtctccactgagaaggtgatatttgcacaaagacctgaaagacaggagtgaactgtgtggataactgtgggtacccctacaggcagaggagtagcaatgtgggtcccaaggtgggaccacatcagacatgttcgaggactagctgagggagagaggtgggaggtcagaggagatgggggccggctctgctggcccgcacgagcactctgggtgcagaaggccaaangtgggangtcanaagaa

SEQ ID NO: 945 - DNA, 508 bp, Homo sapiens
  misc_feature (74)..(75): "n" may be a, t, c, g, other or unknown
  misc_feature (91)..(91): "n" may be a, t, c, g, other or unknown
  misc_feature (492)..(492): "n" may be a, t, c, g, other or unknown
  misc_feature (500)..(501): "n" may be a, t, c, g, other or unknown
agcatctgtaacaagtatggagagatgcctgtggacaaagccaaggcacccctgagagagcttctccgaggtcnntctccccatcccctancttgtgtcctctcgtcccttcccacctgtcttctccctctgtaccacagcttaggttgtttttcttccctagagcgggcagagaagatgggccagaatctcaaccgtattccatacaaggacacattctggaaggggaccacccgcactcggccccgtgagtcaccactgtgggaagaagggttgtaaaaggaaataatcctggcctcttggggctgggttagggtgaagctgggtacctgacctgcccacactcttaggaaatggaaccctgaacaaacactctggcattgacttcaaacagcttaacttcctgacgaagctcaacgagaatcactctggagaggtgacccctgcccttcttgcccttccctcactaaacccccataaattacttgcttngtacctgnnttaagtt

SEQ ID NO: 946 - DNA, 798 bp, Homo sapiens
  misc_feature (702)..(702): "n" may be a, t, c, g, other or unknown
  misc_feature (769)..(769): "n" may be a, t, c, g, other or unknown
  misc_feature (790)..(790): "n" may be a, t, c, g, other or unknown
actagaaagatggcggagcaagacagaagaaaggaaaagggctcaggtttaagcgactggaatcattcctacatgattcctggcggcagagacgtgacaaggtgcgtctcagacgactagaagtgaaacctcatgccttggaattgccagataaacattccttggcctttgttgtacgcatcgaaaggattgacggcgtgagtttactggtgcagagaaccattgcaagacttcgcctaaagaaaatttttagtggtgtctttgtaaaagtcaccccccagaatctaaaaatgctgcgtatagtggaaccttatgtgacctggggatttccaaatctgaagtctgtccgagaactcattttgaaacgtggacaagccaaggtcaagaataagaccatccctctgacagacaatacagtgattgaggagcacctggggaagtttggcgtcatttgcttggaagacctcattcatgaaattgccttcccagggaagcgtttccaggagatctcatggttcttgtgccctttccacctctcagtggcccgtcatgctaccaaaaatagagtgggcttcctcaaggagatgggcacacctggctatcggggtgaacgcatcaatcagctcatccgtcagctgaactagacccaggtgccaaactgcggtaaattttttatcagtgaagtggaagcatgtgttttgntttggaaatttttatcaagtatcttcagagaagattatttcctgctttatcttcagaaactggaaanggtcaaaagaaaaagacgtancttggctt

SEQ ID NO: 947 - DNA, 829 bp, Homo sapiens
  misc_feature (704)..(704): "n" may be a, t, c, g, other or unknown
  misc_feature (797)..(797): "n" may be a, t, c, g, other or unknown
  misc_feature (810)..(810): "n" may be a, t, c, g, other or unknown
  misc_feature (817)..(817): "n" may be a, t, c, g, other or unknown
tcttaaattattcagtctgagcctctgtctttgggataaagatagatccatatgactttttaaattctaattagggttgaatgttttaaggatgaaagatgggaaagttgtctagcatttgctcttagtcactccttcaggccctctcctagaccagcctatatagaaacagcccacgcagcagctaatccaggggccagggctgtcgaaagccagctgctgttcccacagcgactgaaaaagaaggaacatgatgtatcctgcttttctaatagattgccttaatgtgtgctgctaagatgggatgcttggactgtaaattttaatcctatcttgtgccagtaactctccatgctttgattccaaagtgtatgtttccaccgtggatggagtagctctaagtgcttgaggagacagctttcacgtgtatggtatttataatgtaaactctgagggcccaattcttaaatctaaagggcactggaagaaagagtgtggttagttcaaataatttgcttttatccaaagtgctccctccggaaaaagtaggtctctgtaggtaaaatgtgccttcctgactaaacagctcctccaccctgcctattgagctggggcagtgacaggagcctgactcctctccctgcccaattttcccctccagcctggctcagcctccctgtagcatatgtcacacttcctgccangtttatttctgcagcaccctgcaggagacagcagtctctgattcacagacctcatgttatccttagatgcctcttggatttgcttcacttttnctggccctgctgngagtctnatcttcccttca

SEQ ID NO: 948 - DNA, 766 bp, Homo sapiens
  misc_feature (728)..(728): "n" may be a, t, c, g, other or unknown
  misc_feature (739)..(739): "n" may be a, t, c, g, other or unknown
  misc_feature (761)..(761): "n" may be a, t, c, g, other or unknown
tttttcccaagcctggaagaactcgtcatgctctttgtagcgtggtgcttctgttgctcacaggatgtttgccacacgagtcactcgagagaatctctgagtcctggcaagggctttctgaggcttcgtgtattagcagctgttgtcttccaactcagcggcaggtttgcctttccccacggacactctggaccttgtagctcctcaagcttccctgtctattgagcagataggaagccgtgtcaaatatgtggcaccttgaggaaatgcctagtgaatgacagacaacttgcctttgatgattttcaagagagttgtgctatgacgtggcaaaagtatgcaggaagcaggcggtcaatgcctctgggagcaaggatccttttccacggtgtgttctatgccgggggctttgccattgtgtattacctcattcaaaagtttcattccagggctttatattacaagttggcagtggagcagctgcagagccatcccgaggcacaggaagctctgggccctcctctcaacatccattatctcaagctcatcgacagggaaaacttcgtggacattgttgatgccaagttgaagattcctgtctctggatccaaatcagagggccttctctacgtccactcatccagaggtggcccctttcagaggtggcgccttgacgaggtctttttagagctcaaggatggtcagcagattcctgtgttcaagctcantggggaaaacngtgatgaagtgaaaaaggagtngagac

SEQ ID NO: 949 - DNA, 838 bp, Homo sapiens
  misc_feature (809)..(809): "n" may be a, t, c, g, other or unknown
  misc_feature (832)..(832): "n" may be a, t, c, g, other or unknown
  misc_feature (836)..(836): "n" may be a, t, c, g, other or unknown
gtttgtaaaatgaatgggagtggttgcctttagaatattcaggtaggatgtttagtggatgttgtaaaagagcatctagagcttagaaaacaggaggaaaggttgagatttagaagtcatgagttttctaaaagctaaagccctgagtgtcaggagatgtgggttttaatgtagagtctgtcattatattgtcctggggtagtagtcacttctctggcattggcagtccttgtttgtaaaataaaactctagacttgatctcacaggcctctcccaactctgaaactttgttctaaagaagaaaatatattctcttaaaatttcgtgggctagtctataagggaaaaaagatgctttagcaatggtttggggtatatgatgtcatgaaagtaatattctttttactgtccaagtcagtaatttactgtgtagagaattggaaatggaccagaggcagtttcccagaataggtcattatttggtgttagtaattggtcattcacgcatctgcataccctttgtttccttaagtaactctcctttctggtaaccaccttaggtttgtcaaggtggaagtcatgtggtcaaatcaaatggaaacacaagtgtgttaggtattagattcattttcctgtccccaaagtacccgtttggtaatgctggcagaagacatacatgcggccaacaatcataggaaaaaaagctccacatcactgatcattagagaaatgcaaatcaaaaccacaatgagatcgtatcccatactagcagaatggctattaaaaagtcaaaaaataaccgatgctgcnagtttgtggagaaaaaaggaccncttntc

SEQ ID NO: 950 - DNA, 804 bp, Homo sapiens
  misc_feature (669)..(669): "n" may be a, t, c, g, other or unknown
  misc_feature (758)..(758): "n" may be a, t, c, g, other or unknown
  misc_feature (769)..(769): "n" may be a, t, c, g, other or unknown
  misc_feature (794)..(794): "n" may be a, t, c, g, other or unknown
gatgagggtctgcggggccgccaaaggagcccacggatctcacccacctgcggctgcagcagactggtctcctccacttccttcagcgccagcagcgcgtagccgaccgcgtgctcaaacagcacgtgcaacagcacctggaacgggagccggggcgcgagcgtcaacgcaacctcagcgtctgccggaacccgttcccagggcaggcgcaggcgcaggcgcaggcccaggcccaggcccaggccctgtctgcggcccgaacgcaggccgaaacccccaccgtcgcgtcgcccgcgccccgcaaccactcctcaccatggcgccagctcccgggttcggctcgcaatgcggctagcgcgctccggcgcgcggaaccaggctccagaggccacgcccccgcccccccgaccaatcggaggccggggacgacaccatctccggcctttggaggggccgcccagggtggtatcgcccggagcgcgggctgggtggtgccgagcgcgggcgagcgggccttttccggcctctgcagctgcgcgggcgggcgtggttgccggggacgcgcggcccccggtcgggcactgcaggcggcgaaacgacttgggaaggccctttcggggtaatagtccggttctgatgttcttgtcatatgagttacgggcagcaganctgggtgaaagtcggggcgggaggtccgcgtggggcgcggcgtccattccagacagagaccgcttgctaccgggttcccgctttgtccntgggcttgggncccaaaaccttgggcccacttcccnggaccaagcg

SEQ ID NO: 951 - DNA, 850 bp, Homo sapiens
  misc_feature (775)..(775): "n" may be a, t, c, g, other or unknown
  misc_feature (802)..(802): "n" may be a, t, c, g, other or unknown
  misc_feature (832)..(832): "n" may be a, t, c, g, other or unknown
cacgaagcagggaaagggatctggtaaaacctaaatatgacctggatagaacagatccattagaaaataattatactccagtctcttcggtacctagtatttcatctggccactaccctgtacctactttgagcagcactattacagtaattgctcctactcatcatggaaacaacactaccgaaagttggtctgaatttcatgaagaccaagtggaccataactcttacgtaagaccacccatgccaaagaaacggtgtagagactatgatgaaaagggtttttgtatgagaggagacatgtgtccttttgatcatggaagtgatccagtagttgtagaagatgtgaatcttcctggtatgctgcctttcccagcacagcctcctgttgttgaaggaccacctcctcctggactccccccacctccaccaattcttacacccccacctgtgaatctcaggcccccagtaccaccgccaggtccattgccacccagtctcccacctgttacagatgatatttcttattctttggttttgacaggaccaccacctccacttccagacctatgtatagacacagagtgcatgcacaaaggcccaacttgataggactaacatcaggggatatggatttgccacccagagaaaagccttccaataaaagcagtatgaggatagtagtggactcagaatcaaggaaaagaaccattggttctggagagcctggagttcctacaaaggaagaacttggtttgataaaccaaattttaatnggaacaaaccagcccaagcttttcaanaagaagggtcaattttgggaaatgaaaatnccaagcttgaactttaaa

SEQ ID NO: 952 - DNA, 833 bp, Homo sapiens
  misc_feature (813)..(813): "n" may be a, t, c, g, other or unknown
  misc_feature (827)..(827): "n" may be a, t, c, g, other or unknown
  misc_feature (833)..(833): "n" may be a, t, c, g, other or unknown
cctgcacatgatcaaacagatcctcctaaaacacaccttttgaaatgttgaacataatagtgtatgttaattaacagctctatgaagaaaatccatttccatgactgaagcattggatataaatatggtgtcctgctttttttgtagaaaatgtaatttgaggatgaattttctgctttaaaggcatgtgtgtttttaaaattatgaatgtagatgtgtgattgtctgagtgagtgaaactacaagaggtaaaaaataatgggtggttgaaaaggggttaaaatgtatgtgccaagttctactagaattccatttgaaatagcaccttccttaggtttcatggacaaataatgggaacttctaattttgatcaatcccattaaaaaaaggctctttcctttagagaaactctattttgatgtcaatatagattactgtatgaagtagctttgtgtctgttacctgtccatgagcatacaacattgaatacaattgggtgtattctttcagttttacacaattaaagtatacacacagatgtagcttatctgtttttttcttaaattgttgccctgaaaaaatttcttgcatatgaattgtaaaatgtaaatacatttttataaccaatgttttgatcttattgaatgttactttgaaaatgtataactattgcctgcaatgtagatgagccttttagtagagctgatttattccagtaacttcttccatattttctcactaatctccgttagccaaaatatgccagaaatgggaaagagaggagaaaaggcattacattaacacctatctggnctatctactcctanccgggn

SEQ ID NO: 953 - DNA, 757 bp, Homo sapiens
  misc_feature (683)..(683): "n" may be a, t, c, g, other or unknown
  misc_feature (703)..(703): "n" may be a, t, c, g, other or unknown
  misc_feature (754)..(754): "n" may be a, t, c, g, other or unknown
gtatttaatctttacaacaatcctatcaggtatataagcccattttacagatgagaaactgagacacactgaagttaagtaacttgtaagaagtggaactggccttgatcagaggtagtctggcttagagcccaccttcttcacctgtacaacaaagcactcactagagattggccattatcattatcaacattattattaattattattattattattattcagccaggagttaagttatgaagggactcatatttgaattatgaaggaactcaaaatcccacagtcacataaaccagtttcaggatgaaatcggcatgccttccttttgttcaaagggttgtacagctaattagtatgtaaatctcacttctttgaattgaacacattttagagtcatctattacaaaagtgctgcatgcttgaaacagaaagcttgcaaaatctgtaatctcagcactttgtggggctgaggcaggaggatcacttgaggccaggaattcaataccagcctgggcaacataaggagaccctgtctctacaaaaaaaaaaaaaaaaaaaaaaacaaacaaacaaacaaaaaactaattaattaattaattggctgggtatggtggtgcaagcctataatcctagctactcaggaggctgaggtgtgaggatcaagaagatcaaggctgcantgagctatggcatgccctgnactccagcctgggtgacataggtagtagacctgctcaaaaaagaaaagaangaa

SEQ ID NO: 954 - DNA, 818 bp, Homo sapiens
  misc_feature (748)..(748): "n" may be a, t, c, g, other or unknown
  misc_feature (809)..(809): "n" may be a, t, c, g, other or unknown
  misc_feature (815)..(815): "n" may be a, t, c, g, other or unknown
gtattctgttagtaagcatcattgcctagatttgaacccaaattttcttactataaattctgaactgttacattcccaggtgtattagttatctactgctgtgtaacaaactaccctagacgtagtggtttaaaacaaacatttatcacctcacagtttctgtggttcaggaatccaggagaaacttaactggatagttttggcatagggcctctcaaaaggatgctttttaaggaataaaggtaatatgcatgcttgaggatcacattaacgtggcacagcttttcttaaagagtgttaaagagaagaatgcagaagtggcaaagaattaaaaaaaaccttaaggcttaaactttattaaaataagatgatgaccaggttagttggggcagcaagtatctgagattctactggggctcaaaaatctgttttcaggctcacctaatggttgttggtaagcctcagttcttcaccacgtgggtctctccgtagggttggtaggcatggcagctgtctttccccaaagcagttaatctaagagagaaaaggggagcgagagcccaggatggaagccatagtatcatgtataacctaatctcaagtaacatatcatttctaatggtcacacagaccaaccctgttgcaatgtggaaagggactatatgagtgtgtgaataccagattggggtccatcttgcaggctggtcccagttgcacagctagtaagctgcataactaagggtaaaantcatgtctgacccccggagctggtctctttaatcatgctgggataagtgatggagggaaanatttgnata

SEQ ID NO: 955 - DNA, 719 bp, Homo sapiens
  misc_feature (600)..(600): "n" may be a, t, c, g, other or unknown
  misc_feature (654)..(654): "n" may be a, t, c, g, other or unknown
  misc_feature (688)..(688): "n" may be a, t, c, g, other or unknown
  misc_feature (710)..(710): "n" may be a, t, c, g, other or unknown
gcggaagaggtgggctggtggaggcggggtcgagatggcggcgcctttgaggattcagagcgactgggcgcaagccctcaggaaggatgaaggggaggcctggctgagctgtcatcccccagggaaaccatctttgtatggcagcctgacttgtcaaggaattggcctagatggcatcccagaggttacagcttcagaaggatttactgtgaatgaaataaacaagaaaagcattcatatttcatgtccaaaggaaaatgcatcttctaagtttttggcaccatatactactttttccagaattcatacaaagagtataacatgcctggacatttccagcagaggaggtcttggtgtgtcttctagtactgacgggaccatgaaaatctggcaggcttccaatggagaactcaggagagtattggaaggacatgtgtttgatgtgaattgttgcaggtttttcccatcaggccttgtggtcctgagtgggggaatggatgcccagctgaagatatggtcagctgaagatgctagctgcgtggtgaccttcaaaggtcacaaaggaggtatcctggatacagccatcgttgatcgggggangaatgtggtgtctgcttctcgagatgggacagcacgactttgggattgtgggcncttaacctgcttgggagtccttgcagaatggggntcttctatcaatggaattggcngtgggtgct

SEQ ID NO: 956 - DNA, 777 bp, Homo sapiens
  misc_feature (666)..(666): "n" may be a, t, c, g, other or unknown
  misc_feature (699)..(699): "n" may be a, t, c, g, other or unknown
  misc_feature (735)..(735): "n" may be a, t, c, g, other or unknown
  misc_feature (770)..(770): "n" may be a, t, c, g, other or unknown
ccagagcaggggacagtcctgggggctgcaggtcagtgcaatgaaacctagcccactggctcttacccttaaaagaaatactctgtgtcaaatggaaaactatgttcctcattctaatcaccaggataaccacagtcctctttggaatagcattttaaaagttgcaacatggttatgacacacttgcttgtcagtgtcttaaaactacccttcacaaggaagcagagtatcctcgtttccactgaaaatgaaacggagacttctgcctgggaagtgtagtccctggaataggccaggtcctctggcccctcggtcccacatgagctggaaggctcagctcctgccccattcccactcccacccctcccccacggtgccaagcccagcaggacggcttcctgggcaactccaccatgggcacacccctggccctcagggctgttgcctggagaactcattggcctcctgggaggtccccagttgccaggacaaggctatgtgggatggcttctccaacaacaactcgacatctcctctgcaggggtgcccctgacacaacagctggccactgggccttccggcacccaccctgtctatgcacggggcttgcattctgatctcagcagtcttctcaaggagcaataatcttggctcagctcttatcgngctggactgatgaatgggggtgcctggtgaggncccaaccttttcacagagttcacacatacttcaggngaatgtggggaatcagttggagacccacctggcangctttct

SEQ ID NO: 957 - DNA, 832 bp, Homo sapiens
  misc_feature (445)..(445): "n" may be a, t, c, g, other or unknown
  misc_feature (631)..(631): "n" may be a, t, c, g, other or unknown
  misc_feature (804)..(804): "n" may be a, t, c, g, other or unknown
  misc_feature (820)..(820): "n" may be a, t, c, g, other or unknown
  misc_feature (832)..(832): "n" may be a, t, c, g, other or unknown
tcagagcttgtctccaggttgagaattacctgttttccactctgaggggattagaaagatactgttttaatgggttataaaacttgtgtgaagaagattggccttctccacctctcctgtgaaataaattgtttgaaaactctttgaagagaaatggcttcagtatattgttctatctctgctaccccaaagcccagagaacaaatattaagtataaattgctaggctaggtatgtcatatgtggcagctttgacatgtaaaccaaaagactgagccaagtctcaatcaatgtacaggttattttgccgaggttgaagacacactagggaaaagagacacaagctacagtatgatctatggcccctactttctccaaagaggattttgagggcttcagtatttaaaggggaaaagtaggcaggaggagaaaggaggaaagaacanaaaaaagagggagagcatggtcacattcttaggaggctttgattcacactcactgaatccatgtgttgcacgtggcaaggaatgggtagaggaacagtcgattatgtatgtcccctgctcagtaaaactgcactttacaaaagataaacagaataggggaagaagtcaaatatgcatttatctcangctgggcagtggggatggtttgtactctcctcttgtcccatacttggggaggccacctggggagacatggcctcttgtagctatctgtttaggaacaaaaggaaagacagtgttctgtgacccactttcaagcttaacttttccctttggtatagtgagtttggggtcccaanatgtcttttcctttcncagatgtatgan

SEQ ID NO: 958 - DNA, 798 bp, Homo sapiens
  misc_feature (5)..(5): "n" may be a, t, c, g, other or unknown
  misc_feature (744)..(744): "n" may be a, t, c, g, other or unknown
  misc_feature (770)..(770): "n" may be a, t, c, g, other or unknown
  misc_feature (793)..(793): "n" may be a, t, c, g, other or unknown
tatancacagaaggtctttccatggcactggcgtctttacgaaatctctacactccaaatataaaggtcagccgactgctgattttgggaggtgccaatattaattaccggacagaggttttaaataatgctccaattctatgtgttcagtcccatcttggttacacagaaatggtagccctgctgctggagttcggggccaacgtggatgcctcttctgaaagtggcctgactcccctgggatatgctgcagcagcagggtacctgagcattgtggtgctgctgtgcaagaaacgggccaaggtggatcatttggataagaacgggcagtgtgctttggttcatgctgcactccgaggtcatctggaggttgtcaagtttttgattcagtgtgactggacgatggccggccagcagcaaggagtatttaagaagagccatgccatccaacaggccctcattgctgcagccagcatgggttatactgaggtaagaagtaggcaataggattgttttttcaagctctgtattgaaggacccaggaaaccaggagaaaagattgcacgaagacaaaattgccaaccaaattaatgtgaattcgtgatcgctgctctgaataataaggagattaaactccatgaagcactttactcaaatgccaaagtccctcaaattataggtatagaaaggtgccaagttggaaaggaccgtggaaatgatataattattctccatgttttcctncctgtttaacagacagtggcaccaangctcaaagagatgaattattgangtgta

SEQ ID NO: 959 - DNA, 812 bp, Homo sapiens
  misc_feature (681)..(681): "n" may be a, t, c, g, other or unknown
  misc_feature (752)..(752): "n" may be a, t, c, g, other or unknown
  misc_feature (754)..(754): "n" may be a, t, c, g, other or unknown
  misc_feature (797)..(797): "n" may be a, t, c, g, other or unknown
ctaagaatagacgtccaaagccacacaaaggaaggtgttatagaaaaacagaggctgggcacagtggctcaagcctctaatcccagcactttgggaggccgaggtgggtggatcacgaggtcaggagatcgagaccatcctggctaacacggtgaaaccccgtttctactaaaaatacaaaaaattagccaggcgcagtggtgggcacctgtagtcccagctactggggaggctgaggcaggagaatggcgtgaacctgggaggcggagcttgcagtgagccgagatggagccaccgcactctagcctgggcgacagagagaaactctgtctcaacaaaaaaagaaaagaaaaacagagcaactgggtgattgtattgaaaggaagggtctttggaaccttgattgacaagttctaccagttgcagcgaaggaggctttccattgagttatgtgctcatgacattcttagtcatggactgacttaactttcttgatcttaaataagtaaatcctttctttcttttctccctgttgtgttttcttccccactcatttgcccttcctctctctttcttataggtttgatgggatggaaattttatattaccagagtacaaaagtgggcttatatcttttcacaaatagaaggcctatctcaatggtaaagctactggttggangtagtgatacatggcgtactctattctgttaaggtctagaagtcttcataggaaggataagtccacatgangntcgcatacttcagatcaatattgagcttgggtccatgcagtanaagaaggctgatgta

SEQ ID NO: 960 - DNA, 825 bp, Homo sapiens
  misc_feature (703)..(703): "n" may be a, t, c, g, other or unknown
  misc_feature (825)..(825): "n" may be a, t, c, g, other or unknown
actactttaaatttcacatgagtcaaagaagaacccatgtagccaagacaatcctaagcaaaaagaacaaagctggagacattacaatacctgacttcaaactatgctacttccaagcctacagcaaccaaaacagcatggtactgataccaaaacagacatatagaccaatggaacagaacagagacttcagaaataacaccacacatctacaaccatctgatctttgacaaaactgacaaaaaaaggaatggggaaagaatcttctctgcagtaaatggtgctggctagccatatgcagaaaagtgaaactggaccccttccttacaccttatacaaaaattaaatcaagatggaaacaagacttaaatgtaaaacccaaaaccataaaaactctagaagaaaacctagacagtaccattcaggatataggcatgggcaaaggcttcatgacgaagatgccaaaagcaattgcaacaaaagccaaaattgacaaatggtatctaattaaactaaagagcttctgcacagcaaaagaaactatcattagaatgaacaggcaacctacagaatgggagaaaatgtttgtaatctacccatctgacaaaagtataatatccagaatttacaaggaagttaaacatatttacaagaaaaaaacaaccctgtcaaaaaatgggcaaaggatatgaacagacacttntcaaaagacattcatgcagccacaaacatatgaaaaacagcccacatactgtcatcagagaaatgcaaatcaaaaccccatgagatccatctatgccagtcagaatggcaatatttaaaagn

SEQ ID NO: 961 - DNA, 765 bp, Homo sapiens
  misc_feature (717)..(717): "n" may be a, t, c, g, other or unknown
  misc_feature (733)..(733): "n" may be a, t, c, g, other or unknown
  misc_feature (747)..(747): "n" may be a, t, c, g, other or unknown
aaaaaagcagcagaacctggaagtccacggggagcttggatgccaaagggaggacggctgggtcctctggagaggactactcactggcatatttctgaggtatctgtagaataaccacagcctcagatactggggactttacagtcccacagaaccgtcctcccaggaagctgaatccagcaagaacaatggaggccagcgggaagctcatttgcagacaaaggcaagtccttttttcctttctccttttgggcttatctctggcgggcgcggcggaacctagaagctattctgtggtggaggaaactgagggcagctcctttgtcaccaatttagcaaaggacctgggtctggagcagagggaattctccaggcggggggttagggttgtttccagagggaacaaactacatttgcagctcaatcaggagaccgcggatttgttgctaaatgagaaattggaccgtgaggatctgtgcggtcacacagagccctgtgtgctacgtttccaagtgttgctagagagtcccttcgagttttttcaagctgagctgcaagtaatagacataaacgaccactctccagtatttctggacaaacaaatgttggtgaaagtatcagagagcagtcctcctgggactacgtttctctgaagaatgccgaagacttagatgtaggccaaaacaatattgagactatataatcaagccccaactnctattttcgggtcctnacccgcaaacgcantgatggcaggaaatccca

SEQ ID NO: 962 - DNA, 608 bp, Homo sapiens
  misc_feature (596)..(596): "n" may be a, t, c, g, other or unknown
  misc_feature (598)..(598): "n" may be a, t, c, g, other or unknown
  misc_feature (604)..(604): "n" may be a, t, c, g, other or unknown
ttaggaaatgcagttttagtaggattgtatggactgaagtagagaattaagtgaagaaatttttaactgaggagaatcccttaatgtggttttggtttggaatttttttcttaaatttttgtagatacatactaggtatatatatttatgaggtacacaagatattttgataacggcatgcaataaataatcacatcagggcaaatgtggtatccattacctcaagcattaatcctttaattgtattacataactaaaaaagtataaatggattgatttggggtttttttaccttatatttaaaaataacctttaaaaatcccacatactgaatgccacatgaactaaaagcatgaatttattaccaaaagttgtttgtaaatctaatatttcatatggaatcttactgaacagcattcaggagatttcttgttggctaattcctcttgagtctttttgcaaagtaattgtattctttattccatctatctattgtttacatttatgtattgagggagaacgtagagtttagttttgagcatttttgtttgagtcgttcattaaacatcaagtggagatcttgagtgacaattaantngattcnggga

SEQ ID NO: 963 - DNA, 714 bp, Homo sapiens
  misc_feature (588)..(588): "n" may be a, t, c, g, other or unknown
  misc_feature (658)..(658): "n" may be a, t, c, g, other or unknown
  misc_feature (689)..(689): "n" may be a, t, c, g, other or unknown
  misc_feature (691)..(691): "n" may be a, t, c, g, other or unknown
ttaactccttacttgaaacatttagactatctagatgtttagaagtgcccgatgtatattaaatgtagaggtagtaaaataccaatttgtaaatatctttttgctaaaattcataggaaatacttttggaagttgaattgtgaagccacctttgtgagcagtatattactgtctatacttgctcaatggtttagaggaggtgggagggaagaaattgcaaaagataatatgctagtgtgttcatacttggacattttcagacaccatttttctgtatgttttgtgcattttgttttgctctgtatatagtgtatataatggacaaatagtcttaattttttaacatctagaggttgccagtgtatgacaaagtagtaaaattaacatattttgtatgctttgtgttgaaattcataggaaaacttgtcttctgtaattgacttttgcataggaatttgttcagccatctctaagcattacacatgcgtgtacttgtccactgaattgaaggcagagaaggaagagaagagggaatgattcaaggccaaaatggtcacatttagaagatccttagatgataaccattgntatgtgtgtgcagtttatttaacagtgcccgtgtacatggtggacaagctatgaaatatctagtctttanatgtttggaagtgcttgatgtattttaaagnantagtagtagaataacactttttg

SEQ ID NO: 964 - DNA, 776 bp, Homo sapiens
  misc_feature (536)..(536): "n" may be a, t, c, g, other or unknown
  misc_feature (686)..(686): "n" may be a, t, c, g, other or unknown
  misc_feature (754)..(754): "n" may be a, t, c, g, other or unknown
  misc_feature (768)..(768): "n" may be a, t, c, g, other or unknown
ttctcttatgtgtttttaaattagcccttcatataaacttcaaattttaggtaggggagcttttatggttccctttatgccagtgaggaaacagccagagaggttgagtaacttgtccagggttatatggttaataagtggttaggattagtaactaggccagacccttctatggcctgtttttatctctaagatgatccccagtatgttagacttgaaactatggatggagtgaaaaatattctctgcaaatacatcaacactctgaaagccattgttttctctgtttagaaagtagttgaaaaagtagtgagaaactagagctttttcttttctggtgttagtttcagcttcctaccttgaagggaaccttaaggcccaaaccttcttttttacatttgaggattctaagtccatgcatctcggaaactatggagacgggaacttcttgtgtgagttggagagcagttgtagaccgttatcatttccatcggtgcggatgctctttgggtggtggtggcatagaagatctgttntggttacctttattgacaagctctactgtgtgactggcagttcagttcagcagataggtttccagcactaatcttaggcactgggatagattcccgagatgcaaaactgaagaaaataccttgagacaagtcagtgccatctcaaatatnatttcctcagaaatcaagattttagagcatttgatggttttaaattagagtcctttcaactaataccngtatgaagtttttnaaaccctt

SEQ ID NO: 965 - DNA, 736 bp, Homo sapiens
  misc_feature (588)..(588): "n" may be a, t, c, g, other or unknown
  misc_feature (648)..(648): "n" may be a, t, c, g, other or unknown
  misc_feature (676)..(676): "n" may be a, t, c, g, other or unknown
  misc_feature (690)..(690): "n" may be a, t, c, g, other or unknown
atcttccggtcgtgggccatgccgggggcgggcccggaaccgccacgggtgagtcgggtcgtggctgctgccgggtcctgcgcgctccggactgaggtggcgtccctgggccggacggcggtgtcccggcgtggcgggaagccggcactggagcgggagcgcactgggcgcgggaccgggaggcgcagggaccggacggctcccgagtcgcccacctgacggtaccgagagggcggcgcccctccgagcagagccgtcccggccactcccctgggatctgacttggctcttgcggtcgcgggcaccgtgaagccctggggtgtgcgtggctcctcctgctagaagaagtcttcacttcccaggagagccaaagcgtgtctggccctaggtgggaaaagaactggctgtgacctttgccctgacctggaagggcccagccttgggctgaatggcagcacccacgcccgcccgtccggtgctgacccacctgctggtggctctcttcggcatgggctcctgggctgcggtcaatgggatctgggtggagctacctgtggtggtcaaagagcttcagagggttggagcctnccctcttacgtctctgtgcttgtggctctggggaacctgggtctgctggtggtgaccctntggaggaagctggccccaggaaaggacnagcaggtccccatncggtggtgcaagtgctgggcatggtggcacaacccttgttggcttt

SEQ ID NO: 966 - DNA, 854 bp, Homo sapiens
  misc_feature (681)..(681): "n" may be a, t, c, g, other or unknown
  misc_feature (840)..(841): "n" may be a, t, c, g, other or unknown
aaggatatggaaaaactgaacaatgccatcagacttgctaattgacatttataaagtgttcctccctcaaatagcagaatatacattcctttaaaatcctcagggagcattcagaaaaatagatgacagccagagacataaaacaaacctaaaaatgattaaaagaattgaaataatcaaaagtagttatcttaccataatgagatttaactagaaatcaacaaaagaaagataattgataaatctctaaatactaggaaattaaacaacctacttctaagtgatctgtgaatcaaagtctcagagaaagcagaaaatattttgaagtgaacaaaattgaaaatgcaatatatcataattcatatgaagtagctaaatcagggcttagagggaaatatggaggattaaaccctcatattagaaaagaaaaaaagaactgcaatgagcaatctaagcttctacctaaagaaactagaaaaagaagagcaaaacaagtctaaagcaagcagaaagaaggaattttataaagataagagtagatatcaatgaatttgaaaacaatagtggagaaaaccaataaaattaaaaatctggttttttaagtatatcaagagctgataaacctctagccagattgacaaggaaatatgacataaattaccattgtaaggcatgaaaganggcatatcactatagtccccacaaaaatataataagcaaacaccatcaagagctctgtgcacataaattcacaatatagatgaaatggaccaaatcctagaaggaagaagctggccaaacttaccccaaatatccctttatatctcaataaattaatgnntaattggatctta

SEQ ID NO: 967 - DNA, 461 bp, Homo sapiens
  misc_feature (455)..(455): "n" may be a, t, c, g, other or unknown
  misc_feature (458)..(458): "n" may be a, t, c, g, other or unknown
  misc_feature (460)..(460): "n" may be a, t, c, g, other or unknown
gagtgaggtttggctgccaccaaagttacttctagtccttgctgtccactcctgccctcagtctggacctgcccaaggacccctgcaattaggcctcccatgcagaggtcagtgagagcccaagccaattgctctaggccccgtggctggctacttatggggcactgtcctgaccagctctgctaagatgctcctggcccctccctccaccccgtccagaggacggacccccagcgccgtggagaggctggaagccgacaaagccaagtatgtcaagacgcaccaggtgatagctaggcgacaggagccagccctgcgtgggagtcctgggccgctcacgccgcacccctgcaacgagctggggccccctgcatcgcccaggacgcccaggccggtccgccggggaagcggcaggcggctgccgaggcctgattccctcatcttctaccgccagnaangnt

SEQ ID NO: 968 - DNA, 805 bp, Homo sapiens
  misc_feature (726)..(726): "n" may be a, t, c, g, other or unknown
  misc_feature (748)..(748): "n" may be a, t, c, g, other or unknown
  misc_feature (786)..(786): "n" may be a, t, c, g, other or unknown
agatagggaaggagggcgggtcggggaggagggatgcggttcggcggaggcggccgccacagggacttgccgccatcacccctgctgccaccaccgcagcctcgggctcccagggcggacacggccaccgcctcagcgggagaggagtctccaccaggactgaccgctgccgcccagcacgtccaggtaaggtactcaactgtgtggggtactacataaatcctgaaagactacaataaagtggtgatgtctcgggaacccaccccacctctacctggagatatgtctactggtcccatagcagaaagctggtgttacacacaggttaaagtggtaaaattttcctatatgtggaccattaataacttcagtttttgtcgagaggaaatgggtgaagtgttaaaaagttcaacattttcatctggcccaagtgacaaaatgaaatggtgcctgagggtaaacccaaagggattagatgatgaaagtaaagactacttgtccttatatttgcttttagtcagctgccccaaaagtgaagttcgagcaaaattcaaattttcccttctgaatgctaaaagggaagaaacaaaagcaatggaaagccaaagagcatatcgatttgtgcaagggaaggactggggttttaaaaaattcattagaagggactttttgcttgatgaagctaatggtcttttaccagatgacaagcttacattattttgtgangtgagtgtggtccaagattcantaaacatatcaggacatactaattcaaatactttgaangtgccctgatgtcgtctac

SEQ ID NO: 969 - DNA, 543 bp, Homo sapiens
  misc_feature (533)..(534): "n" may be a, t, c, g, other or unknown
  misc_feature (543)..(543): "n" may be a, t, c, g, other or unknown
aattcaccgcttttgattcaccaattgtgacttgatctccaacacgctgggtaaataaaagaagactgagtcatggagcccatatcctccggtaactgccagtgccctggcttgggtatgaattgtttgcagcacttcaggccaaagggagtgtggtgcactgctgcactctaggggtcaaacttggattctgtaatgatccattactgaaagcgttcttgatctttatatataggttttgtgggttttttttttttttaacttaagtctgtttaagttacagaaaacatttaataaatactttttgtgtgtgactttcctcacgattcttcatcatactacttttaaatttgtgtttaagttttgtggattctgctaaatgaactttattcacattcataaagaacactgtactttgttcttatgtatagctcctaataatcctgatgacttggtaacaagtaaaaactaaaacccagaccgggcgcagtggctcacacctgtaatcctagcactttgggaggccaaggcanntggatcgan

SEQ ID NO: 970 - DNA, 445 bp, Homo sapiens
  misc_feature (422)..(422): "n" may be a, t, c, g, other or unknown
  misc_feature (434)..(434): "n" may be a, t, c, g, other or unknown
  misc_feature (439)..(439): "n" may be a, t, c, g, other or unknown
tgtattaatttgcaaataaatgtctatcttattattttgagagatttaaaaaattttagttcttcaaaattgcattttcacattttgaattacgttatctttgacaaatacagaagatgtcaaattttggtttattttctttggttctaatttatatttttgtttaaaactatatttttcactatagactctttctgtctctcgaggtccctgtataatgaaaaagaaggctggaaaaagtattaacattgtcaaaatccaggaaaagtagttggtcatgatattgatcgttaactttagaaactttttgtatcttgtgggttaaattaggattactatgtggtagtgataaatgatgttaattagggccgagtgcagtggctaacacctgtaattccagcatgtagggaggcttgaggtgngaggatgcttgnatccnggagtt

SEQ ID NO: 971 - DNA, 841 bp, Homo sapiens
  misc_feature (712)..(712): "n" may be a, t, c, g, other or unknown
  misc_feature (809)..(809): "n" may be a, t, c, g, other or unknown
ttttggattacccggatgggccctaaactcgatgacaggtgtccttataaaaaatacacatagagggacacagacacaggggagaaggccatgcggagatggaggcagaatgatgcagccacagcatggaatgcctggggccaccgggagctggagaagacatggcaggattcttctcttgagccttcagaaggagcacagcccaacggacatcttgactttggacttctggcctccagaactgtgcaaggattaattgtctattgttttaagccgcccaatttatggtagtttgttacaacagctctagaaaatgagtatcatttctgagggcttcagccttaaaatgggcctagataggagaagtgcccactttactgagctttggggaggactagaagggatgcctgtaagatttgcccacacccagcacctggagagcacttgatgaaggttagccctcatacagagcatcatttattacccggcctttggctgctctgccctgaacccttgcagagcccacggaagccagcccttcacattgccatcttcttgtgtctgactcgttgccactgggacccctgagcccagcccagcgtgttcctggctcaggaatctcagaggaatcaaatctgactcccagacccaggctgcagaggcctctctgagccattattaccagggctgccagagcgagactatgaacatncacatgtggcgttttaatattttacccaagaagtcattttctttcacgattcagacacagaagactcgaagaattaaagtgagaaaggtcctcaggnctgcatgatttccgccatggcctggaggattt

SEQ ID NO: 972 - DNA, 821 bp, Homo sapiens
  misc_feature (739)..(739): "n" may be a, t, c, g, other or unknown
  misc_feature (797)..(797): "n" may be a, t, c, g, other or unknown
  misc_feature (806)..(806): "n" may be a, t, c, g, other or unknown
caccacaaaccattctgttttggacttcagtaagctcaaagagaaaagaaaacactagaattccgttttctcggtatacccaaatgtcaattaggatttccctgtaagatcaagatgttattgtttatctatctgcttaacctggggaaagacaatttcctctaaatttctgtaaattctggggttcgaggacaaggtgttggggtccctctggctctaagctcctactccttaactttccaccaaacagtcttagaatacgtctatacatgtagaaaccctgactgaaggtttttgaaaaggcagtgactgagattgtgccaatgaagatagtttgaaattgaatgctggcaatccctgttcctgaaaaccctccagccacgtctgcaatttgaattctagtctcctgccatgttcttagctctctcttcctatcctcttctttttatgctctagcccccgaaatttctgttcatttacactcagagctatttagttacctcatttgttgctcagcttctgccttcagggtctcaccttcttgctgcttttaattaaggtgttttcctacaaggagctaatttcagcccaagagaaatttttgtgctagctgttcagatcatttttttcaccttgctttaatggtttcatcttcagtaggatagacatagactaaactcctatggcaacataaaggccactttggattgacccatcaccaggagtgggggcaatccanttggtcccactggcaccttaggaattgggtacttcactggctagcacaggtttctttnctacctganaatggggggtcatat

SEQ ID NO: 973 - DNA, 868 bp, Homo sapiens
  misc_feature (766)..(766): "n" may be a, t, c, g, other or unknown
ttagttatcttcaaaaatgctgtgactgttcagttcaattgacctaaacttcaggtgcttttgtgttatacgggttctttttttggaactgatgagaatgaattggaatctcctattttttaggcagagcaaccatcgaaccctgtatgctaacaataagacatgaccaggcttcattctcccacggcagaatatttatttctgtctcttagaggaagggttaactcccaggtggtgtttgtgttgagttttagaacaatataaaattctaacagagcatttttataatggatgtgccatgtgttcacttaattgaaactcattctgcaaggctggtaaaatggagcaaaacggggaaaaaaaatcaatagttaagaaaggttaatagcacttgattctcctaaatagcgtttttttcatatgtgttcatttacaagaaacgtaagtcattggaatggatttcaacctgttgagtgatacttctttaaaaaactttgcatacattttaagagtgcgagtaatcattttaatatttgctccttttcccctatggaaacaacctgaaaacatccacctcctcacctaattgagtaattggttatgccagatttttaaacagagattacttcacttattttatagcttctgtaattgcattaaggggaagccacataacaaatgcatggggcacagctacatttttgtaactcatctacaggattccttgaattgtgcacagtgtgctcctgggatggctgtctgcganaggtgacaatgtgtgttcttatgctgcttttgcactttcttataggcgtcagagtcctctctctacgcaatgctgtgcaaagttcatctggtttctctctgg

SEQ ID NO: 974 - DNA, 807 bp, Homo sapiens
  misc_feature (690)..(690): "n" may be a, t, c, g, other or unknown
  misc_feature (764)..(764): "n" may be a, t, c, g, other or unknown
  misc_feature (768)..(768): "n" may be a, t, c, g, other or unknown
  misc_feature (793)..(793): "n" may be a, t, c, g, other or unknown
gcgggtctgcggccgagccatcggctcgcctcggctcgactggaggggaggaggaggagcaggccgagcgcattcgcgctggagcttgcgaggagcgcagggtggagcgcgccagccggggtcctcggatctggcccaggtgaggaattttaaattggaacaagagcaagaaaaaaacaaaatcttgtcagaagcactggagacgctggccactgaacatcatgaattagagcagtctctggtgaaaggctctccacccgccagcatccttagcgaggacgagttctatgatgcgctgtcagattccgagtccgaaaggtccctgagtagattggaagcagtgacagcacgctcctttgaagaggaaggagagcatttgggcagtagaaaacacagaatgtccgaagaaaaagactgtggtggcggagatgctctctccaatggcatcaagaaacacagaacaagtttgccttctcctatgttttccagaaatgacttcagtatctggagcatcctcagaaaatgtattggaatggaactatccaagatcacgatgccagttatatttaatgagcctctgagcttcctacagcgcctaactgaatacatggagcatacttacctcatccacaaggccagttcactctctgatcctgtggaaaggatgcagtgtgtagctgcgtttgctgnatctgctggtgcttctcaatgggaacggactggaaaacctttcaacccactgctgggagagacttatgaattantgcnagatgaccttggatttagactcatnttccgacaggtcaa

SEQ ID NO: 975 - DNA, 834 bp, Homo sapiens
  misc_feature (745)..(745): "n" may be a, t, c, g, other or unknown
  misc_feature (781)..(781): "n" may be a, t, c, g, other or unknown
  misc_feature (828)..(828): "n" may be a, t, c, g, other or unknown
gaaccggaagatggtgtgagccacgggctgccgggggcctggggctcggcgtcggtccccgggggatgtggagagctggcagcatgtcggccgagctgggagtcgggtgcgcattgcgggcggtgaacgagcgcacttttggcgagaactacgttcaggaactgctagaaaaagcatcaaatcccaaaattctgtctttgtgtcctgagatcaaatggcacttcattggccacctacagaaacaaaatgtcaacaaattgatggctgtccccaatctcttcatgctggaaacagtggattctgtgaagttggcagacaaagtgaacagttcctggcagagaaaaggttctcctgaaaggttaaaggttatggtccagattaacaccagcggagaagagagtaaacatggccttccaccttcagagaccatagccatcgtggagcacataaacgccaagtgtcctaacctggagtttgtggggctgatgaccataggaagctttgggcatgatcttagtcaaggaccaaatccagacttccagctgttattgtccctccgggaggagctgtgtaaaaagctgaacatccctgctgaccaggttgagctgagcatgggcatgtccgcggatttccagcatgccggttgaagtaggatctacaaatgtccgaataggaagcacgatttttggagaagcgggattactcaaagaaacccaccccggacaagtgcgcagcagacgtgaangccccgcttgaagtggcaccaggagcacttgagccnagggaatacttgagagccctaacttttgccctaacctaaattttcantttcga

SEQ ID NO: 976 - DNA, 745 bp, Homo sapiens
  misc_feature (613)..(613): "n" may be a, t, c, g, other or unknown
  misc_feature (708)..(708): "n" may be a, t, c, g, other or unknown
  misc_feature (720)..(720): "n" may be a, t, c, g, other or unknown
  misc_feature (725)..(725): "n" may be a, t, c, g, other or unknown
gtaatttcaggagcacagtaagtgtagccccacccaaccccattagttcatttatttcttccacaactggggaggcagtgaaatgctgcagttaaacacttgggctccagaattggactgcacgactttactctccagcttaccacttgccagccgtgtgacacgggtgagttactcgacccctctaagcctctattttctcatttgtaaaatggagctgataatattgtcttccttacagagaatcaaatgagataatatgcttggcatatgattgcccttgaagaggtttcactttattgaaggagaaagacaaatatttttttgtaattactgtatagtgagtatggtaggtgctatgaaagaagttgttgaaattttaaacttagagtttcatgtctttttcagggtataacataagtggttaaaatagcaaggactttgaagtcagacctgagtttaaatccaaattccaccagctaaatgaccttgggcaagctgcttcactttcgctaagtctcagtttcttatgggaatagagtaggatgatgattttatatagctactaggacacagtgagccttcaataaattgtgaccgttactattattgntattcctattattagtcaagtttgatacctgggtgatgcatgtggtttgtaaatatttatattttggtttgacacagtgaaggaagacaagggangaattggtgaangaggntaggaaagaatttcgagggc

SEQ ID NO: 977 - DNA, 814 bp, Homo sapiens
  misc_feature (739)..(739): "n" may be a, t, c, g, other or unknown
taaactttttaccaagctttttaaagatgacatcaggtatctgttgacaatggacaaactatggcggaaaaggaaacctccagttccgttggactgggctgaagtacaaagtcaaggagaagaaacgaatgcatcagatcaacagaatgaaccccagttaggcctgaaagaccagcaggttctagatgtaaagagctatgcacgtcttttttcaaagagcatcgagactttgagagttcatttagcagaaaagggggatggagctgagctcatatgggataaggatgacccatctgcaatggattttgtcacctctgctgcaaacctcaggatgcatattttcagtatgaatatgaagagtagatttgatatcaaatcaatggcagggaacattattcctgctattgctactactaatgcagtaattgctgggttgatagtattggaaggattgaagattttatcaggaaaaatagaccagtgcagaacaatttttttgaataaacaaccaaacccaagaaagaagcttcttgtgccttgtgcactggatcctcccaaccccaattgttatgtatgtgccagcaagccagaggtgactgtgcggctgaatgtccataaagtgactgttctcaccttacaagacaagatagtgaaagaaaaatttgctatggtagcaccagatgtccaaattgaagatgggaaaggaacaatcctaatatcttccgaagagggagagacngaagctaataatcacaagaagttgtcagaatttgggattagaaatggcagccggcttcaagcagatgactttctc

SEQ ID NO: 978 - DNA, 812 bp, Homo sapiens
  misc_feature (788)..(788): "n" may be a, t, c, g, other or unknown
  misc_feature (792)..(792): "n" may be a, t, c, g, other or unknown
ttaattgctttcttccaaatggattgaatcacttcttttaaagtgttttaattaatttttatctatagaacaaaataacaaataagtattttttttttataccataatggtcacccacagcctgtgtatactaagaccatgcatactgataatcagctttattttacaaaagagtttcgctttacccctctggtaattaatggattctgggtatttattaaaaactttaacacaaagactgttaaataccaccagtccagctttggcaaggcactgttggctttgtttatctccatcatcatccaaacagactaccaatcctgatcccagcccaatcttgggcccttgaaaaaataacttaacatcctaactacaagggagaaactcctttcaaattaatgaacctggctgacttatatagccttaaaattatggaaatgacaagggttacaatgtcagaatgagcagtaaaccttccccagtcctatcagagcaaactttctggggttgcatcccctcagaaacccatttggggcccaatctcaatgcacatatcagtgcgcaaagcactaaaattccaggcaacactttgtattgagagaagccaaaattttggtcaggccctgggacatctaaagtcaccaatgtaactacaccatacagattaaaccctcacatgatcatgtaagctatgcagttacccaagctgcatcatttagaaaacctgtcagtttttatggaaaccattcctagtcaaggacactttaaatatatagtctaaataccgntaangtaggcccactagctgtgtt

SEQ ID NO: 979 - DNA, 811 bp, Homo sapiens
  misc_feature (775)..(775): "n" may be a, t, c, g, other or unknown
  misc_feature (784)..(784): "n" may be a, t, c, g, other or unknown
  misc_feature (801)..(801): "n" may be a, t, c, g, other or unknown
ctcttttccgccgccgcctgggaggggacccgggctgccaggcgcccagctgtgcccagatggatgggacagagacccggcagcggaggctggacagctgtggcaagccaggggagctggggcttcctcaccccctcagcacaggaggactccctgtagcctcagaagatggagctctcagggcccctgagagccaaagcgtgacccccaagccactggagactgagcctagcagggagaccgcctggtccataggccttcaggtgaccatgcccttcatgtttgcaggcctgggactgtcctgggccggcatgcttctggactatttccagcactggcctgtgtttgtggaggtgaaagaccttttgacattggtgccgcccctggtgggcctgaaggggaacctggagatgacactggcatccagactctccacagctgccaacactggacaaattgatgacccccaggagcagcacagagtcatcagcagcaacctggccctcatccaggtgcaggccactgtcgtggggctcttggctgctgtggctgcgctgctgttgggcgtggtgtctcgagaggaagtggatgtcgccaaggtggagttgctgtgtgccagcagtgtcctcactgccttccttgcagcctttgccctgggggtgctgatggtctgtatagtgattggtgctcgaaagctcggggtcaacccagtgtgggtcctcattgccaagcagagcccacccatcgtgaagatcctgaagttttggctgggttnccaatcatnctggccatggtcatcancagtttcgga

SEQ ID NO: 980 - DNA, 810 bp, Homo sapiens
  misc_feature (612)..(612): "n" may be a, t, c, g, other or unknown
  misc_feature (756)..(756): "n" may be a, t, c, g, other or unknown
  misc_feature (759)..(759): "n" may be a, t, c, g, other or unknown
tctttttctgttcacagaagtggggatttttttggtgtttgttttgtttcagaaagttctttcttccctttccctacttataataaatattattgtatagatgttactgctcaagttagtgttatgatatcaatgacttacagtgagccatgatatataaaatgacagatttaaagattaaagttccttgtacttttaaaaacaaagaatcacagtctttctttaaagacacactttaaaaagagtgtcacactcctttatttctgtaaggatgagtattggtggggtatggagaggtgagtggatatctatttcagatagttttcagcatgagtcattgatttcacagcacatccagatgatcaagagtggtgccaatcattgttaaagaaaagttgttttgtttttttaaatgaatagagttgactatgtggcaaacgaatatttctgtattgtttgcttcagcagtgctgaagagttggaattataaatataacacagtatgttattaattcacaggaaatcttagcaaatgcagctgtgaattaaaatgtagtttaaggaatagaaagcaaggaaatattaattgaatccattcatttgcttagtatnttatgtagaaaatttaagagtattgtataccctttgagaattaattctgtatatcagcagaactctgtttaggtggtattaaatgcatttgctgctgctttcaaaaaaaatttgttttccttttggatttataaattggtcatncangatgcagaaatagtcttattccctgctgattggtcacttaatgattaaatg

SEQ ID NO: 981 - DNA, 746 bp, Homo sapiens
  misc_feature (640)..(640): "n" may be a, t, c, g, other or unknown
cttcttagccgtggctgcctcagcacctcgaggatcgacatggacgctctcgaggactacgtttggccgcgggcaacctcggagcttatactcctcccagtgacgggtctggagtgcgtgggggaccggctgttggcgggtgagggtcccgatgtcctggtgtacagcttggactttggtgggcatctgcggatgataaagcgagtgcagaacctgcttggccactatcttatccatggcttccgggtacggccagagcctaatggagaccttgacttggaggccatggtggctgtgtttggaagcaagggactccgagttgtgaaaattagctggggacagggccacttctgggagctttggcgctctggcctgtggaacatgtctgactggatttgggatgcacgctggcttgagggaaatatagccttggccctgggccacaactcagtggtgctatatgaccctgtagtagggtgcatcctgcaagaggtgccctgcacagacaggtgcaccctctcttcagcctgcctgattggagacgcctggaaggagctgaccatagtggcaggtgctgtttccaaccagctcttggtctggtacccagcaactgcctttaccctatacctctctgcacgtnccaccccgttttgctgtgtgctcacccccaggatgtgtacccggttgtagtaggagctgaaatccatgctgagctgtaccagaataaagaatagagtgtagagtgt

SEQ ID NO: 982 - DNA, 808 bp, Homo sapiens
tttagtaagaaacatattaatcacgtggaaggattcatagttttcctggtatttcacttgaaatagttttaaaagtaagaccttgcaaggaacatggatgtttttgtctaaattctgaaatgatcacctttacactaatttcctattttctcttcgctcttgtttgagataattattagactgaaataggttctttgtagtacatttctaatcttgcaagtacacttgaaagtctacatacccagagaaaataagtgtagaatcatgattttagcatgaggattttaaaactttttccattattctatcttgctggcttaaaattagtacagctttctttcttgttttgtttatatttttacctttgaatgtttcttcatgtaaaagtgtgttgagaggattgagggagagggtttatgctgctgtggaaatatttttccttctttttggttaaatctgctcccccttgtggtataatctaggtcattatagtgctcatatttaatatctcagaaagataataagttcttgagtgtttactccttaccagatgttaggctaaatgcttcgtatacattttctcattcaatcatcacagccacctttggaaagagatataattatcattcagccctattggatagatgaggaaacacaggattagaaactataactagtgagttgtagaactatgagttgaacttaaatttgctcattcaaaatcccataaccttaatttctctgtcataccatcttcaagagcactccagaaggaaaactttctcattgagggctacagaaatcttgc

SEQ ID NO: 983 - DNA, 812 bp, Homo sapiens
  misc_feature (809)..(809): "n" may be a, t, c, g, other or unknown
atacacaatacaatactatttggctattttaaaaaaggaaatggtcttattcacaacaacatggatgaacctggagaacatgatattaagtgaaataagccaagctcataaaaacaaatactgaatgattttacttgtatgtgggatctaaaaatgtccaattcacagaagcaaagactagactagtggttgccagaagctagagggttaagggattggggagatgttactgaaataacacaaaatttcatttagacaggaggaataactttaagagatctattgaacatcacagtgagaacaatatattgtatatactaaaattaccaaaagaataaattttaagtgctctcaacacaactgtctggcggcggcagcatggcggcgggggcggctgaggcagctgtagcggccgtggaggaggtcggctcagccgggcactttgaggagctgctgcgcctcaaagccaagtccctccttgtggtccatttctgggcaccatgggctccacagtgtgcacagatgaacgaagttatggcagagttagctaaagaactccctcaagtttcatttgtgaagttggaagctgaaggtgttcctgaagtatctgaaaaatatgaaattagctctgttcccacttttctgtttttcaagaattctcagaaaatcgaccgattggatggtgcacatgccccagagttgaccaaaaaagttcagcgacatgcatctagtggcttcttcctatccagcgctaatgaacatcttaaagaagatctcaaccttcgcttgaagaaattgactcatgctgnccc

SEQ ID NO: 984 - DNA, 808 bp, Homo sapiens
  misc_feature (268)..(268): "n" may be a, t, c, g, other or unknown
  misc_feature (582)..(582): "n" may be a, t, c, g, other or unknown
  misc_feature (639)..(639): "n" may be a, t, c, g, other or unknown
  misc_feature (648)..(648): "n" may be a, t, c, g, other or unknown
  misc_feature (743)..(743): "n" may be a, t, c, g, other or unknown
  misc_feature (791)..(791): "n" may be a, t, c, g, other or unknown
  misc_feature (806)..(806): "n" may be a, t, c, g, other or unknown
ttagtacgagtactgaaacattccaaaatgtattctttaagatagaattgtatttggaatacaccagttgtatacttgtattagtttgttttcatgctgttgataaagacatacctgagactgggtaatttataaaggaaagaggcttcattgactcatagttccacatggctgaagaggcctcacagtcatggtggaagatgaaggaagagcaacgggacatcttacatggtggccagcaaagagagagcttgtgtagggaaacttncctttataaaaccatcagatctcgtgagacttattcactatcacaagaatagcacaagaaagacccaccctcatgattcagttacctcccaccaggtccctcccatgacatgtgggaatcatgggagctttgattcaagatttgggaggggacatagccaaaccgtatgaatactttcatctggttcatggaaactgtaattatagctgcatgctctggagacaaaatgcctgggttcaaattttcatgtgtctagttcttagctgtgtgaccttacccatcagatttcccctaatctctaatcagcacctgtnaactagaaataataccagtaataacctcatagggattttagaaataccaaatggganaatccatanaaagtgtttagctcaatacctggcccataataagcattcataatgtattctagtaattgtagaatagcagcaggaggagtaaaagaataaagcangatgtcaggcagaaataaactactctcgaatcctttctttaaaataanagtgttcatgttgtnga

SEQ ID NO: 985 - DNA, 808 bp, Homo sapiens
  misc_feature (806)..(806): "n" may be a, t, c, g, other or unknown
agagctattggggctcggtggcggccgcagtggggtggagggggcagggcgtggtgaggtaaggtgagtgccgtagtggggttccctggagccatggcctgctccattgtccagttctgctacttccaggacctccaggccgcccgggacttcctctttcctcacctgcgggaggagatcctcagcggcgccttgcggagggaccccagtaaatcaacagactgggaagatgatggttggggagcatgggaagaaaatgaaccacaagaacctgaagaagaaggaaatacttgcaaaacacaaaaaacttcctggctccaagattgtgttttatccttatctccaaccaatgatcttatggtgatagctcgagagcaaaaagctgtatttctagtgccaaaatggaaatatagtgataaaggaaaggaagaaatgcaatttgctgttggctggagtggttccttaaatgtcgaagaaggggaatgtgtaaccagtgctctatgtatcccactagcaagccaaaagaggagttccactgggcgtcctgactggacctgcattgtggtgggttttacttcaggttatgtacgcttctacactgagaatggtgtgctcttgcttgcacagcttttgaatgaggacccagtacttcaacttaaatgcagaacctatgaaataccacgacatcccggcgtgactgagcaggtagtgtaaaaaattgtgttccaacagtaacagtggcattattttgaagcagtttctctcctcttttttaggtagaaacttaaaagagatctttgtcttgngg

SEQ ID NO: 986 - DNA, 787 bp, Homo sapiens
  misc_feature (669)..(669): "n" may be a, t, c, g, other or unknown
  misc_feature (728)..(728): "n" may be a, t, c, g, other or unknown
  misc_feature (746)..(746): "n" may be a, t, c, g, other or unknown
  misc_feature (777)..(777): "n" may be a, t, c, g, other or unknown
tcctggtcgtcatggtgtggtattccatctcccgggaagacaggtacatcgagcttttttattttcccatcccagagaagaaggagccgtgcccccagggtgaggcagagagcaaggcctctaagctctttggcaactactcccgggatcagcccatcttcctgcggcttgaggattatttctgggtcaagacgccatctgcttatgagctgccctatgggaccaaggggagtgaggatctgctcctccgggtgctagccatcaccagctcctccatccccaagaacatccagagattgaacaatgccccagtggctggctatgagggtgacgtgggctccaagaccaccatgcgtctcttctaccctgaatctgcccacttcgaccccaaagtagaaaacaacccagacacactcctcgtcctggtagctttcaaggcaatggacttccactggattgagaccatcctgagtgataagaagcgggtgcgaaagggtttctggaaacagcctcccctcatctgggatgtcaatcctaaacagattcggattctcaacctcttcttcatggagattgcagctgacaaactgctgagcctgccaatgcaacagccacggaagattaagcaggatgcggaatttggtcagagccgttcatgtcagagctcancagaatggcagctgaccctgggagatcacttgcctgttctgagaaaggcctgcaattgngtcttcacgatgcttttncaagacagccaaggcaggtataattttcctnacaagaaaga

SEQ ID NO: 987 - DNA, 840 bp, Homo sapiens
  misc_feature (643)..(643): "n" may be a, t, c, g, other or unknown
  misc_feature (666)..(666): "n" may be a, t, c, g, other or unknown
  misc_feature (803)..(803): "n" may be a, t, c, g, other or unknown
  misc_feature (829)..(829): "n" may be a, t, c, g, other or unknown
gaaaatatgtactaattaaaagagggaaaagagtaactttacagtggatgaagcctggcaatcatcactttaagcaagtggtcagagttaatattatcagtaatggtcaaatcaaaaccatatgcaagaagactctaaaatgcaagaagactcctgaagtacttcttaccaaagatgtagaacttaaattcagtcataacaatacatgagacaaacccaagttagagcacagtctgcaaaataactggcctgtaatcttcaaatgcatcaagatcatgaaagacaaggaaagagtgaagagctgctccagttggaagagacttaaaactaaatgcaatgtatgatcctagattggatctttttgctctaaggacattaatgggccagttagtgatatttgaaggggatccgagggttccattgtagtaatatatcagtgttaatttttaaatttttattaggttgggattattttggaaaataccattattcatagcgaatacaaagtagaatatttggggatgataatgcatgattacaacaaatgtttcaggagaaatatgatctttgtagtggtcttgcaacttttctgtaagtctgaaattgtttatgcataaaaggttaaaaaaaggttaaattttgnttttataactaataatggattanggtcatgtgaaagtactttagaggaaatgagacttttgagaacatcatccctgaagacgttgaaacactgagttacctcatggataatttaatagggtatgcagctgatttttctaccttaatttcttggttgcagnatctacccatacttagaatggctggnggtaaaaaatg

SEQ ID NO: 988 - DNA, 412 bp, Homo sapiens
  misc_feature (43)..(43): "n" may be a, t, c, g, other or unknown
  misc_feature (354)..(354): "n" may be a, t, c, g, other or unknown
cataaaatgtagttatgtacctgtccacaaggatttttaagtnaatctttttgaaatccaaataatcataatcatttatacaaatattctctgaccacaatgccaaaaaaagaaagaaatcaaggattagaagacaagtcgaatgacatgtgtttgggaatagaaaactactcttagaagctagaaggaagaaaattcaatgcttagagccttacctattgaaacggatctagggagcagttaaaagccatgaatatattgatataaaatcaagaaggccaaaaattagttacactgagtgttcaactcaaaaagctagtaagagagccaggtattaaaattttaaaacaacancagtaaaacgtatggaagtaaataataaaagtaaaggcagaggtcaatgaatatatat

SEQ ID NO: 989 - DNA, 840 bp, Homo sapiens
  misc_feature (722)..(722): "n" may be a, t, c, g, other or unknown
  misc_feature (838)..(838): "n" may be a, t, c, g, other or unknown
  misc_feature (840)..(840): "n" may be a, t, c, g, other or unknown
attgccttatgttggttttctcgaacacattggccgaatattggatcttcagttggaggacaacaaatgggcctgcaattgtgacttattgcagttaaaaacttggttggagaacatgcctccacagtctataattggtgatgttgtctgcaacagccctccattttttaaaggaagtatactcagtagactaaagaaggaatctatttgccctactccaccagtgtatgaagaacatgaggatccttcaggatcattacatctggcagcaacatcttcaataaatgatagtcgcatgtcaactaagaccacgtccattctaaaactacccaccaaagcaccaggtttgataccttatattacaaagccatccactcaacttccaggaccttactgccctattccttgtaactgcaaagtcctatccccatcaggacttctaatacattgtcaggagcgcaacattgaaagcttatcagatctgagacctcctccgcaaaatcctagaaagctcattctagcgggaaatattattcacagtttaatgaagtccatcctttggtccaaagcatctggaagaggaagaagagaggaatgagaaagaaggaagtgatgcaaaacatctccaaagaagtcttttggaacaggaaaatcattcaccactcacagggtcaaatatgaaatacaaaaccacgaaccaatcaacagaatttttatccttncaagatgccagctcattgtcaagaaacattttagaaaaagaaagggaacttcagcaactgggaatccagaatacctaaggaaaaacattgcttaacttcagcctgatttggaggcncn

SEQ ID NO: 990 - DNA, 780 bp, Homo sapiens
  misc_feature (617)..(617): "n" may be a, t, c, g, other or unknown
  misc_feature (667)..(667): "n" may be a, t, c, g, other or unknown
  misc_feature (697)..(697): "n" may be a, t, c, g, other or unknown
  misc_feature (730)..(730): "n" may be a, t, c, g, other or unknown
  misc_feature (779)..(779): "n" may be a, t, c, g, other or unknown
atgtgtgtctacactcaagcatcttcctcttaatactctactgaggataaaggacacaaagtaatttttgaaatatcatgctggctacttttagagtatattagtgtgagtagtgacttaagaggtcaggtttaagagaagtagcaacatacttctattatttacatggtgattttttttttataagtccttccttgaaggcagacttagatatttcaagacctccttagaaaaatttttcagcaccttctgtgctccaaattgagtcagtttgcatcatgtttcagtgtaactgagtaacaggctagcaaattctctgctttcttattcaccaaaatccaaaatagaactcacaaaaactccttccttcttccccccatcctgaaaaaacaccctactgtggccccccccagtagaggaacagaccagaaaaaaaaagagtaaacagagccagctgtaactatagcactttgctcagtactgtgagcttgctagagctggcacattttttataatacagatgcataaatgtactgtctgaggcagaggaattgcagcatcccctttagtatttcttgactgccttggtctaaagtatgttgcacaggagaagcctncctaaacccagaataaaatacttaatttggtatctattttttaaaattgngccttctatgacttaatttttcataaaggnttgtagaaaaccaccttttttagactttcacangggtttttccaattcagactttcggggctatggcttactcttacacatnc

SEQ ID NO: 991 - DNA, 838 bp, Homo sapiens
  misc_feature (780)..(780): "n" may be a, t, c, g, other or unknown
  misc_feature (810)..(810): "n" may be a, t, c, g, other or unknown
tttcactggatgccgtatctctgaaggatactctagttatgctggttgttgacatgtcaaagccttggactgctttggattctttacagaaatgggcaagtgttgttagagaacatgttgacaaactgaaaatccctcctgaagaaatgaaacaaatggaacaaaagttgattagagacttccaagaatatgtagagccaggagaagacttcccggcttctccccagagaagaaatactgcgtcacaagaagacaaagatgacagtgtagttttacctctgggtgcggatacacttacacataacttgggcattccagtactagtagtttgcacaaagtgtgatgccattagtgtattggagaaagaacatgactacagagatgaacattttgattttattcagtcacatatccggaagttttgtttacagtatggtgcagcacttatttacacttcagtaaaagaaaacaaaaatatagacttagtatataaatacatcgttcagaaactatatggatttccctataagattcctgctgttgttgtggaaaaggatgcagtatttattccagcagggtgggataatgataagaaaataggaatattacatgaaaattttcaaacattaaaagcagaagataattttgaagacatcataactaaaccacctgttcgaaagtttgtcatgagaaggaaattatggcagaagatgatcaggtggttcttatgaagctacagtcccttttagcaaagcaaccaccaactgcagcttggaaggnctgtggatgccttaccaagagtcccaggangcttcccacgaacaccaaatagatctgt

SEQ ID NO: 992 - DNA, 714 bp, Homo sapiens
  misc_feature (650)..(650): "n" may be a, t, c, g, other or unknown
  misc_feature (686)..(686): "n" may be a, t, c, g, other or unknown
  misc_feature (698)..(698): "n" may be a, t, c, g, other or unknown
tcaattctaatgtatttcctacttccagtcaaatatgacccacatcttgtcttctctaagtcagaatgttttacatgacagacagagcctcagttctccttttttaaaagaagtctcagctttgggaaggtggaggttggaggacaggcaccaggttgacttttcttcctccatttgttttgttttattatttgccaccaggaggggtttcgggaaatgaccaagcgtctccacaatttaggggcaggtcagggtaccttccactgtgcttcatgaggtcagggtaccttccactgtgcttcatgaggtcagggtaccttccactgtgcttcatgaggtcagggtaccttccactgtgcttcatgaggtcagggtaccttccactgtgcttcatgaggtcagggtaccttccactgtgcttcatgaggtcagggtaccttccactgtgcttcatgaggtcagggtaccttccactgtgcttcatgaggtcagggtaccttccactgtgcttcatgaggtcagggtaccttccactgtgcttcatgaggtcagggtaccttccactgtgcttcatgaggtcagggtaccttccactgtgcttcatgaggtcagggtaccttccactgtgcttcatgaggtcagggtacttncactgtgcttcatgaggtcagggtaccttccactgngcttcatgaggncagggtaccttcactg

SEQ ID NO: 993 - DNA, 793 bp, Homo sapiens
  misc_feature (600)..(600): "n" may be a, t, c, g, other or unknown
  misc_feature (714)..(714): "n" may be a, t, c, g, other or unknown
  misc_feature (742)..(742): "n" may be a, t, c, g, other or unknown
  misc_feature (757)..(757): "n" may be a, t, c, g, other or unknown
atagaaattggccgctacaatgaagtctggaagtggcatcataagaacacaaagcaacattaatggagacagggtcattgtaggtagagttctcactgctttcaactaactgctgtatgtgctctccataaatcatgtcctccatatcattgataacctctaaattacatcagtcccgcttcctggatctcctctcccgatctggaattaaactgccctgcttaggcctcattttttctttattaggtgttaactgcctccagtgtcctctccttaaaaccattcaccaacttggctgggggtggctcacgcctgtaattatccggggggcccttttcagctctaaaattctatctaaaccatctttgtagatgttttttaagtaatgagttggtttaaaagtgaacaagggaagactgataaatttttctttttcacttttctgctgtcatatccgattggctaaaagtttttcttgacctgactttttgatctttaaaatgcagcagggtattgatgccaaggttttcactggactttgtaatttgagaagcagaaaatatggttatgcctttcaaaaacatctgcaaaggtttttgnttttgtattttttaaaatcttactcaagcttttcaaaacaataactttctggttcttagtggctatctcagacagttttacggaaaatatttcttacagagacagaaaggattnccacccagttaaatggttcatcttctgngatttgccctgcaanggagctcatctggtgttgaaaagggcatctaacttt

SEQ ID NO: 994 - DNA, 839 bp, Homo sapiens
  misc_feature (774)..(774): "n" may be a, t, c, g, other or unknown
  misc_feature (783)..(783): "n" may be a, t, c, g, other or unknown
  misc_feature (798)..(798): "n" may be a, t, c, g, other or unknown
tactggtttggtcacagggctgcaggactacaatgccagcatgcagcgggttcatggacagtgtgtatcactggaggaagacgtggagctgtgcgtgcctcgctgggcttgcagggagatgcagtctcataactaccccagtcgtttggtcgcagggctgcagcagtacaatttcagcatatctctggctcagggagagtgcactagtcactgaaggaagaggtaggtctgtgcgcacctctctgggcttgctgggagaggtagtctcataaacactaccagccctttcatcacatcgctgtaggactacaattccagcatgcacggggcgccggggccgtccgcctcactggaggaagagaaaggcgtgtgagcgccttgctgggctttctgggagatgttgtctctttatttctcccagccctttggtcacagggcttcaagactacaatcccagcatgcatcctgctcagggacaacgcgcgtcactgtaggaagaggtggacctgtgctgttctcgctatgctttttgggatacgtattctcgtaaacactcccagccctttggtcactgggctgcatcactacaatcccagcatacatcgggatcagggagagtgcgctaatcagtggagaaaggggccaggctctgcacacctcgctggtcttgctgggagatgcagtctcataaacacttccagccctttggtcactgggcttgcaacgctacaatcctacatggacccggcccaagggaatgtgcccgtactggangaaaagcanggttgtgcaagcctntttggcttggtgggaattgcagcttataaacacttccagac

SEQ ID NO: 995 - DNA, 760 bp, Homo sapiens
  misc_feature (697)..(697): "n" may be a, t, c, g, other or unknown
  misc_feature (731)..(731): "n" may be a, t, c, g, other or unknown
  misc_feature (736)..(736): "n" may be a, t, c, g, other or unknown
caaatggagaaggagcagtagagtaaaaagagaggtaagggaaggcattgagatggtttacagggttagatgttttgagtcaatcccattataattaccaatgctatctacctatttagttaacgttttattgccctgctgttttctccaggataattggaacagcatgtattggttgggtggaaaagatagaacttgagcagggagattgccaaagagtgaagatgtggctgagtgattgatgatggtctgaactgggtattcagggaagagaactagaagccaaccatgtagaatctatgcaggtgctcttaagacattggtttgactggaattatcttcttgttaggtcttaggaatctccttccaggtaactttttctatgattagacaattgatttgttcagggtcacagagcaaagtccacatttaattccacatggccaataaaagtgaggggctacaaggtgagatccaggggccagagttatcaaagtgatacagcacttttaggaataggacagggaatggaggaattggaattccagtattactttcaaaagcagaactggccagaggaattggaattccagtattattttcaaaagcagaactggccagaggtgcttgtgattcctgggtggaaaccatggcagtggacagaagcagcatggaggaaaagagcactggaattcangctgaggaactgtgaagcccaaggtgttggatangttgnccatttcaaattagggttgcttgg

SEQ ID NO: 996 - DNA, 842 bp, Homo sapiens
  misc_feature (668)..(668): "n" may be a, t, c, g, other or unknown
  misc_feature (718)..(718): "n" may be a, t, c, g, other or unknown
  misc_feature (783)..(783): "n" may be a, t, c, g, other or unknown
  misc_feature (788)..(788): "n" may be a, t, c, g, other or unknown
  misc_feature (826)..(826): "n" may be a, t, c, g, other or unknown
atgatcaaagtacagtaggtaagaagtaaattttcaaaaacgtgttgtggtccccctttaattaatgcttcacgcgcagagcaaagccataaaccatgtagcgggggcgctgtctgtgcgccctgcagtcacctccctcctgaaggtgccggagcgccctgatggcactcgcaggagaggctggtgcttctgggcaattctgaaacaggcctttctaaccatgcagtcctctgctccctttgtctcggaatgtcaggttgagacttgtggctgctccagtccctggagatcccttttggtgaatggaatgcaagtccattcttgaattattgtagtgtttgagctgtacctgcagaggccaggtctcagcacgtctgactcacctcagttggaacaccccgattcagagagggaacagattcaaagtgagagattgaccacgccgcctctaactctgtcgccgttgtttctttattaaaagtcagattgatggtaaattaggatactacccgactgaatactatccttgctgttaaaaatgattatggagatcatgcggctccatggaaaaatgctaatgattctgtgccaagtgtaaaaagccaaattcagcatggtactcttgctgtgcttacagttatataaaagtcatgcatctggactggaanggaatttggaaaaatcagatttatgggataaagttgatttatggcattgngggctaattttcagatttccttttttaaaaaaccataatgttcctgcagtaagttttaaaattgngggtnaaagaatagtaaccccacaaggagtgcaattgaccttnatttttacctcccctg

SEQ ID NO: 997 - DNA, 747 bp, Homo sapiens
  misc_feature (672)..(672): "n" may be a, t, c, g, other or unknown
  misc_feature (713)..(713): "n" may be a, t, c, g, other or unknown
  misc_feature (739)..(739): "n" may be a, t, c, g, other or unknown
gctcatgaaagtgtaggggccccccatgggatccccagaatattttctctctcaagctagtctacactcaagtcttcagtagttagctagttgtcttttaagttgctggcttcagtggcattttctgctcccagtaggttgtgattctctgttttcaacttgtctccaatttccaaggtaggtgtttgttctccttaaatagaggaagaactgttttatgagttaatgtgagattattttattgtgcatatattcactttgagatggctgttagactagagctatctagtagtcaattattcacatgagtatgtgaacctgagaatttgagacaggtctcagttaatttagaaagtttattgtgccaaggttcaggatgtgtacccgtgatacagccccaggaagtactggcaacatgtgcctaaggtggtcagggcatgtctttgttttatacattttagggaggcatgagacatcaatcaatatatgtaagaagtacattggttccatccagaaaggcagggacaacttgaagccccatccatccgcctgcagccgggagactcagagcctgggaggggcctgaggcccgggccgccgcctccttcttccaggtcacaggtaggtgagagacaaatggttgcattcttttgagtttctgataagcctttncaaaggaagccatcagaatatgcatctatatcagtgagcanagggatgacatttaatagaatgggangcaggttg

SEQ ID NO: 998 - DNA, 708 bp, Homo sapiens
  misc_feature (598)..(598): "n" may be a, t, c, g, other or unknown
  misc_feature (630)..(630): "n" may be a, t, c, g, other or unknown
  misc_feature (666)..(666): "n" may be a, t, c, g, other or unknown
  misc_feature (708)..(708): "n" may be a, t, c, g, other or unknown
tccatgatccagactcagcagttgtcgcaccatgtctgacaaacgctgtattccttgacagagctttgataacgtaccatatgcagaaggagttattcctgataaggctaaggcttgtctctgttggcaccagctaatgcaatggcaggtcttctgcttggtgttgggctcctgcctactcctaacccacttactcagactggcgctgttccaccggctgctttgggggctcctactcttgttcctgcccttgctgcgcttgggcttcctggagcaaacttgaactcaatctgttgccacagatagttgctgaagcttatgagcactgttggtcccaagttgaagcatgtagctgctggtcttgtttcaccaagtctgaaatcggatacctctagtaaagaaatagagaaaggggccccacatggtggctcaggccagtaatcccagagctttgggaggctgaggagggtggatcacttgaggtcaggagttcgagaccaacctgaccaacatggtgaaaccttgtctctactaaaaattcaaaattagccgggcatggtggcgcatgcctgtaatcccaaatacttaggaggctgangcaggagaatcgcctgaaccctggaggcggangttgcagtgagccgaaattgtgccattgcactccancctgggcaacgagcacaaaactcttggctcaaaaaaaaaatn

SEQ ID NO: 999 - DNA, 823 bp, Homo sapiens
  misc_feature (695)..(695): "n" may be a, t, c, g, other or unknown
  misc_feature (773)..(773): "n" may be a, t, c, g, other or unknown
  misc_feature (805)..(805): "n" may be a, t, c, g, other or unknown
  misc_feature (808)..(808): "n" may be a, t, c, g, other or unknown
ccctaaactggacctgggcttcaaggagggccagaccatcaagctcaacatcgcaaacatgaagaagaaggaaggagcagctgggaatccccgagtccggcctgccagcacaggagggctgagcctgcttccccctcccccaggggggaaaacctccaccctgatccctccccctggggagcagttggctgtggggggatccctcgtccagccagcagttgctcccagttcaggaggtgctcctgtaccctggccacagcccaatcctgccactgctgacatctggggagactttaccaaatctacaggatcaacttccagccagacccagccaggcacaggctgggtccagttctgacctgagcacggtttttcctcatgtgacttctgggaaggcgctccctcatctgggccaaaggaaggaggacgaagccctcctcagctggcctgtgtttggggcatgaatctctcctctcctccttgtctggctctgttgacaaaccgggcatgtttggcagtaaattggcaccgtgtcacactgtttcctgggattcaagtatgcaaccagaacacaggagaagaaaagctccaggatccctgtccccatctgtcctcttgatgtgagagagactctgagacttcttccatcgcaatgacctgtattaaacacaagccccccaagcaaaagaagaggntgagtttgctgccaggattcagatcagccctttccagggtctgcagtgtacatgatcacagtttaacgggaggctttncgtaccacactggctgtagcacttagtccatntgncttcaaaagagggtt

SEQ ID NO: 1000 - DNA, 765 bp, Homo sapiens
  misc_feature (625)..(625): "n" may be a, t, c, g, other or unknown
  misc_feature (673)..(673): "n" may be a, t, c, g, other or unknown
  misc_feature (717)..(717): "n" may be a, t, c, g, other or unknown
  misc_feature (746)..(746): "n" may be a, t, c, g, other or unknown
gaaggaagcccccagccccttccaggccctgttctcagatatcccgcccaggtacccgttccaagccctgccaccgcactacgggaggccctaccctttcctgctgcagcccacggccgccgccgacgcggacggcttggcccctgatgtgccgctcccggctgatgggcccgagcgcctggcactctcacccgaagacaagcccatccgcttgtccccctccaagatcacagagccgctgcgggagggcccggaggaagaaccgctggctgagcgggaggtgaaggcagaggtggaggacatggacgagggccccacagagctgccgcctctggagtcgccgctgccactgcccgccgcggaagccatggctacccccagccctgcagggggttgtggaggtggcctgttggaggcccaggcgctgagtgccaccgggcagagctgcgcagagccctctgagtgtccagactttgtggaggggcctgaaccacgggtggattccccgggccggacagaaccctgcaccgccgccctggacctgggggtgcagctgacacccgagacactggcggaggccaaggaggagccggtggaggtgcctgtggcggtgcccgtggtggangcagtgcccgaggaaggcctggcgcaagtggcaccgaacgagttccancccacccttagaaatgtcagacttgtgacgtgcccgccgggganggacagtggcccgagcctggaaccccaanaaggccgtgccttgtactt

SEQ ID NO: 1001 - DNA, 739 bp, Homo sapiens
  misc_feature (657)..(657): "n" may be a, t, c, g, other or unknown
  misc_feature (702)..(702): "n" may be a, t, c, g, other or unknown
  misc_feature (732)..(732): "n" may be a, t, c, g, other or unknown
atcaccgcaggcgggcctcgcgggtccgggagcgcggcggagacgatgcctgagatcagagtcacgcccttgggggccggccaggacgtgggccgaagctgcatcctggtctccattgcgggcaagaatgtcatgctggactgtggaatgcacatgggcttcaatgacgacgtagatgatgagctggagatcaaggcctactatgcaggccacgtgctgggggcagccatgttccagattaaagtgggctcagagtctgtggtctacacgggtgattataacatgaccccagaccgacacttaggagctgcctggattgacaagtgccgccccaacctgctcatcacagagtccacgtacgccacgaccatccgtgactccaagcgctgccgggagcgagacttcctgaagaaagtccacgagaccgtggagcgtggtgggaaggtgctgatacctgtgttcgcgctgggccgcgcccaggagctctgcatcctcctgaagaccttctgggagcgcatgaacctgaaggtgcccatctacttctccacggggctgaccgagaaggccaaccactactacaagctgttcatcccctggaccaaccagaagatccgcaagactttcgtgcagaggaacatgtttgagttcaagcacatnaaggccttcgaccgggcttttgctgacaacccaaggaccgatggntgtgtttgccacgccagggaatgctgcacncttggca

SEQ ID NO: 1002 - DNA, 843 bp, Homo sapiens
  misc_feature (436)..(436): "n" may be a, t, c, g, other or unknown
  misc_feature (666)..(666): "n" may be a, t, c, g, other or unknown
  misc_feature (711)..(711): "n" may be a, t, c, g, other or unknown
gtaccaaaaatattttgagatcaccgtaatgcctttggtttaccgggatgagtaaccaaccacaggcctctgttcacaagagcacgacgtggtccccgcctgctgctagtctgtctgccactgggggcctcccaacatccatagcacacttcagcggaaggaccccagaaactgttgtgtttgtgtgtgctgatgacctagtgtgtcatttcacctcgtcacccagccctgcgtccggatgaggggacttctgcacaaatgacagaatctcggctggtggacagatactacagctttctcctcctccttgtgttcgtgttcagtctctgtggagactttcttttccattcaaatgacagtgcgcacttatctggtttacacaatgataccattttgaaagttggaagcctcaaactgagacgacagtgcagaacanaacaaaagtgagttagggtcgttaaaattgaagtgttcttcttagggcaaacatgttgactccgagtattgtgtatgaatgtgctacgagaaacttccaaagagcaccattcacaatttggcattttcaaagaatgttccagccctcaaaggggcaactctttaaagtccttgttggcttttatccaaaccttgtagaaattgggaaagctgatagaggtaaggaaggcnagtgaaaaggacaagaaggccaaacaccatccaaaaagaaactangaaaaaaaagattttctttgctaatatagatgtaaaaataacatcagacatctttgaaaattagcctctaaactcttaatacatacgttctgtgtgtctctacctggcgtctttaagaatatcctctctggg

SEQ ID NO: 1003 - DNA, 839 bp, Homo sapiens
  misc_feature (3)..(3): "n" may be a, t, c, g, other or unknown
  misc_feature (18)..(18): "n" may be a, t, c, g, other or unknown
  misc_feature (257)..(257): "n" may be a, t, c, g, other or unknown
  misc_feature (708)..(708): "n" may be a, t, c, g, other or unknown
  misc_feature (735)..(735): "n" may be a, t, c, g, other or unknown
  misc_feature (741)..(741): "n" may be a, t, c, g, other or unknown
ttntttacttaaaaattntgaattaatatctcaacttataagagcagctttgtcagtatattttaaatgattcccacaatgctgatttaggcattttacattttgatatgcatttttagctggttttcaaagtcacaaggctctaaggaaaagaactaatccttagttggcaggaaagtccctccccaaatccttggattaaaatagaatctgccgccagggctttccttgtcttctgtgattgagatctgtctcangtgggaaggcatccagtacctgtgcatggcaagttcattctttagagatagaatgtgcaactttaatatttattgataggcacactaattctcttgctgatggtaattaatgaggtgcttatatcttattttgcggtagtttaacgagcttcgggctataggagagatccggtgcttgctgtaaatgctgagaatcaaagatgctggaggaaaatgcagaaaatggagcagaaaaaataaggttttagcagataaaatatctcagattaaaaacactctcaaaacaaaccttggtaaggcagaagcatttaaaaatcagggagagcttgccagggaggaaagtcgcaggttccctattccttgttccctaagcatgctgttaattttgaccacccatttgtctttctacccctttggcttcgtctgtgttagcagtgtgaagtgaaaaatngataggaaaatgtatttttttcttaangcttanatagttacagccaaaacattttgtcatattgggttttgaataattgtgtcaaatctacacttaattttgccttagacagctagccttatgaccctagt

SEQ ID NO: 1004 - DNA, 550 bp, Homo sapiens
  misc_feature (525)..(525): "n" may be a, t, c, g, other or unknown
  misc_feature (540)..(540): "n" may be a, t, c, g, other or unknown
  misc_feature (545)..(545): "n" may be a, t, c, g, other or unknown
ggaaaagccatagcaggagttattaaccagccatattacaactatgaggcaggaccagatgctgtgttggggaggacaatctggggagttttaggtttaggcgcctttgggtttcagctgaaagaagtccctgctgggaaacacattatcacaactactcgatcccatagcaacaagttggttaccgactgtgttgctgctatgaaccccgatgctgtgctgcgagtaggaggagcaggaaataagattattcagctgattgaaggcaaagcctctgcttatgtatttgcaagtcctggttgtaagaagtgggatacttgtgctccagaagttattttacatgctgtgggaggcaagttaaccgatatccatgggaatgttcttcagtaccacaaggatgtgaagcatatgaactctgcaggagtcctggccacactgaggaattatgactactatgcaagccgagttccagaatctattaaaaatgcacttgttccttaaaggaaagtttcatttggccgggcncggtggctcatgccngtaancactg

SEQ ID NO: 1005 - DNA, 776 bp, Homo sapiens
  misc_feature (730)..(730): "n" may be a, t, c, g, other or unknown
  misc_feature (754)..(754): "n" may be a, t, c, g, other or unknown
  misc_feature (776)..(776): "n" may be a, t, c, g, other or unknown
taatactgtgtgcttagccaacatgtgctccccacggggtttccaccgctgctctggaagttccttcctcagaaaagagagtcagaccctccttgtctccattccacggctctagagactaagcctggactggaaatcgcagccaagtggagttgtggggctagtcagagacgatgcttaggatcctgggactcgaccattgcccaggaacatctcagacagggagacatgtagccaggtttgcacaactctgcctgcgtgcgcaaccccagctgaaccccttccattgctacgtaaagaactcaagtggcttgaaggcttctaggacaggtttttaaatcccaactgtacgactccctagttgagtgaccttagccaagggaagtgggaaataaattattggatggctaaatgtgccaggcactgtgcttgcattggagcctgtctgaccccgaagcacaaatcctctctctgtgagcactcgtcctacactcagagccagaggccttaggctggaggcacagttatttgactctgggaagtcacttccatcctctctggacctcaatctctcttcaggcaaataggacagtcctgctgaccccatggggtgatggtgacattaaaatggaacagcgtggtgaaagctctctcatactcagcgtgtacgatctttgggaccaatcacaaggaagtttttagaaatatagattgctagatgatgggtganggtcttggacccaatggccctganaatctatgtctaaaaaaaaaan

SEQ ID NO: 1006 - DNA, 837 bp, Homo sapiens
  misc_feature (808)..(808): "n" may be a, t, c, g, other or unknown
cactaaggattggagaactcatagaacaaggtgaaagacatgagtgccctcccaaagtctgagtgcacgaaaatttctctcttgccttgaggagcagaaaagcttctgatggacatgggcttctgtgagacttatcacacatagtgtatcgtggcatgaagcccggcacatagcaggccctgcatattgatggacaaatggatggcctgcctgccttccctgtccgttcacctgtgcaaaggcttcctcagacatgccactctgtggctcccaatatagggtgcagacaagagcaatccctgacatgacattatagcctgggaaagggctggctcactgatgagaatgtggaggcatcagcaaggatctcggtgggttgctcagagaggtgatgcactaagccttaatcctggacaccagtacccctgcagcatggcttgctcaacaacagtctttgagtggcatagaattccaaagaaaatggtgctgggtggagaatggagagagcatgatggagcagagtcccagtcactgaccaactaactggtcgtttgattaggaaacagtttggccaaagtaccacctttgagacctaagttcttttgatacctttgagaagagccactgagcctgagttgaaatatttttagcttagtcatctgtgtttgctataggagaaattgtaacacaagaaataactcctttttacatgatcatttatatctatatacatatatatacttgcatacactatcactgcattaaaaaaatgagtttgggctgggcatggtggcttacacctataatnccaacactttcggaggccaaggaggacca

SEQ ID NO: 1007 - DNA, 783 bp, Homo sapiens
  misc_feature (716)..(716): "n" may be a, t, c, g, other or unknown
  misc_feature (765)..(765): "n" may be a, t, c, g, other or unknown
  misc_feature (776)..(776): "n" may be a, t, c, g, other or unknown
ctcccctcgacatgccctcaccagccccagccttggaggccagggccgacagaacctgtggtttgccaaccctggaggcagcaacagcatgcccagtcagagccgcagctctgtgcagcgcacccactcgctcccggtccactcgtcaccccaggccattctcatgttccctccagactgcccggttcctgggcctgacctggagatcaatcccactctggagtctctgtgtctgagcatgacagaacacgccttgggtgatgggacagacaaaacctccaccatctgacgggacccacagcccagcgcacccataggctccctgggcggcgggcgggggccaacccccaacgggcttctccgcgacagcgagagggtgggctggctcagctatatattctaatatttttctactctcttaccctcttaacttttgtttaacattggcacatgccttgctcactcccaggcccgtcgagggatctctgctgaggcccggggagttgggggcagccaggataaagggggcagggactggccagactgcctgcctctctcctttccttcctcatccccacctggtcccatcccacccctgccgcctccagaccgctgaccacctgcctctccccaagggagcagactccccagagacaaactgaccactaccttgtggagcctgctcagaaacatttgacatttggggtgacgcgcanggcagagaacctgccttcagaatgttattgagaggagctggggaaaaanggaaggagcanggaagag

SEQ ID NO: 1008 - DNA, 792 bp, Homo sapiens
  misc_feature (758)..(758): "n" may be a, t, c, g, other or unknown
  misc_feature (764)..(764): "n" may be a, t, c, g, other or unknown
  misc_feature (773)..(773): "n" may be a, t, c, g, other or unknown
gaccaaatccagttactagagcccaagcaaatgagaacaggtaagattccagtctccccctcttacaggcatctctgactatgagtgattctcttggagcccaaccatgacaagagacagaactccccaccacaaagactgcactgcatatctcataaaggagagcacactatggacagcctcctcctctccttcccagccccctccttatgtgggctgcagatgagcattgatagtagtaggactggctctgctacatcatcatagactctgaagggaggtgtgtgatattgattgctgaaaggtccctagaggctctcttcatactattcaacattctgttacagtcattaaaaaataatgtgtacagagatgtcctgatacacatgtccttcattttctgacagaccttggttgaatatggagcaaatgtcaccatgcagaaccacgctggggaaaagccctcccagagcgccgagcggcaggggcacaccctgtgctccaggtacctggtggtggtggagacctgcatgtcgctggcctctcaagtggtgaagttaaccaagcagctaaaggaacaaacagtagaacgtgtcacgctgcagaaccaactccaacaatttctagaagcccagaaatcagagggcaagtcactcccttcttcacccagttcaccatcctcacctgccttcagaaagtcccagtggaaatcttcagatgcagatgatgattctgtagccaaaagcaagccaggagtncaagangggattcangttcttggaagcctgtcaa

SEQ ID NO: 1009 - DNA, 746 bp, Homo sapiens
  misc_feature (656)..(656): "n" may be a, t, c, g, other or unknown
  misc_feature (710)..(710): "n" may be a, t, c, g, other or unknown
  misc_feature (718)..(718): "n" may be a, t, c, g, other or unknown
ttgttggctggtgtgtgggtgtcaaactgagccagacgcggcggtggcggcggctccgcgggctacggtcgctcccgcctctcgagcgctgccggtggccgcagcggcgcacccacgccggcccggaggagcagagtgttcatttctgtgtcgggcacagtgctaagtgctgggtgctcactggtgatgaggcagatgaaggttaccaaacttgtggacaggagcctcatatcagagacgtggacctcactgtagcctggtcatggcttccagcttttcgaatctgaggctccaaaggaggaaatgaccattcagggatcttactccagcttgattacggggactggaccttcatagggtgcgcacttaccaaggacaggaaggtttctctgtttgaagggctttaaacttataacaaagaaaataaaaatgacgacttcgtctatcagacggcagatgaaaaaatcgtgaacaattactcagaggcagaaatcaaagtccgggaagccacctccaatgacccgtggggcccgtccagttctctgatgaccgagattgccgacctgacctacaacgtggtggccttctcggagatcatgagcatggtgtggaagcggctgaatgaccatggcaagaactggcggcatgtgtacaangcgctgaccctgctggactacctcatcaagacaggcttccaacgtgtggcccancagtgccnggagaacatctttgccattcagaccctg

SEQ ID NO: 1010 - DNA, 871 bp, Homo sapiens
  misc_feature (685)..(685): "n" may be a, t, c, g, other or unknown
  misc_feature (768)..(768): "n" may be a, t, c, g, other or unknown
  misc_feature (795)..(795): "n" may be a, t, c, g, other or unknown
  misc_feature (870)..(870): "n" may be a, t, c, g, other or unknown
attccgggctcgaaggctgtgcggtctgccaggagctgcggccccgtccggcccgggctggtatcacctgattttgatacagcagcaggaagcttgttcccagcctaccagaaacaccaaaaccgggcgagacactcaagtcgaaaacctaccacctccaagtttccacatctaacttttgagagtccgcaatcttccagttcagagacattggggatccccttaatccgagagtgccccagtgaatcagaaaaggatgtttccagaagacccttagttccagtgctcagtccccaaagctgtgggaacatgtcagtgcaggcacttcagagcttaccttatgtgttcattccacctgatatccagaccccagagtcatcgtctgtgaaggaagaactcattccccaagatcagaaggaaaacagccttctaagctgcactcttcacactggcactcctaatagcccagagcctggacctgttctggttaaagacacccccgaggacaagtatggaataaaggtcacatggaggagacgacagcacctgcttgcttacctcagggagagagggaagctgagcagaagccaattccttgtgaaaagctgactgccatcagtaatctcaatagaaaagagatatgttttctggagtcataaaggaattcaattcctagggtttttgnttttggttttgagatgtaatattgctctgttgcccaggctggagtgcagtggtatgatctcaccttactgcaaccaccacttnctgggttcaagcgattcttctggcttnagccttcccagtagctgggattacaggcaccagccaccatgcctggctaattttttggatttttagtagaaatgng

SEQ ID NO: 1011 - DNA, 867 bp, Homo sapiens
  misc_feature (791)..(791): "n" may be a, t, c, g, other or unknown
  misc_feature (809)..(809): "n" may be a, t, c, g, other or unknown
  misc_feature (832)..(832): "n" may be a, t, c, g, other or unknown
gttcgctttagtgccggcgccatggggtcggagctgatcgggcgcctagccccgcgcctgggcctcgccgagcccgacatgctgaggaaagcagaggagtacttgcgcctgtcccgggtgaagtgtgtcggcctctccgcacgcaccacggagaccagcagtgcagtcatgtgcctggaccttgcagcttcctggatgaagtgccccttggacagggcttatttaattaaactttctggtttgaacaaggagacatatcagagctgtcttaaatcttctgagtgtttactgggcctgaattcaaatattggaataagagacctagctgtacagtttagctgtatagaagcagtgaacatggcttcaaagatactaaaaagctatgagtccagtcttccccagacacagcaagtggatcttgacttatccaggccacttttcacttctgctgcactgctttcagcatgcaagattctaaagctgaaagtggataaaaacaaaatggtagccacatccggtgtaaaaaaagctatatttgatcgactgtgtaaacaactagagaagattggacagcaggtcgacagagaacctggagatgtagctactccaccacggaagagaaagaagatagtggttgaagccccagcaaaggaaatggagaaggtagaggagatgccacataaaccacagaaagatgaagatctgacacaggattatgaagaatggaaaagaaaaattttggaaaatgcttgccagtgctcaaaaggctacagcagagtgatttcagcttncaaactgggtatacattncaaactgatagtacattggcatnttcaggaagaacttgacggctttgggaatttggtt

SEQ ID NO: 1012 - DNA, 744 bp, Homo sapiens
  misc_feature (648)..(648): "n" may be a, t, c, g, other or unknown
  misc_feature (668)..(668): "n" may be a, t, c, g, other or unknown
  misc_feature (733)..(733): "n" may be a, t, c, g, other or unknown
gtaggcggggcgagccggctgggctcagggtccaccagctcacccgggtcgaggggcaatctgaggcgactggtgacgcgcttatccacttccctcctcccgcctccccccggggtggcgctcgctggtgacgtagtgagtgtgatggccgccgcgaggccgggaaggtgaagtcaggactggtggagtcaacacagtcaatcaatagccaacctcaacctgagacaggacagaagagaactcagaatctttttgtcttttggacttcagccatgtccatgatgcctaccctgtgaagatctctcaccatccaaaaaacgcaatgtccctgctcttctctcgatgcaactctatcgtcacagtcaagaaaaataagagacacatggctgaggtgaatgcatccccacttaagcactttgtcactgccaagaagaagatcaatggcatttttgagcagctgggcgctctcgcagaaggctttcaagtgaggatgtttgagtttcagaattttgagaggagatttgaggagtgcatctcccagtctgcagtgaagaccaagtttgagcagcacacggtccgggccaagcagattgcagagcggttcgactcatcatggactccctgcacatggcggctcgggagcaacangtttactgcgaggaaatgcntgaagagcggcaagacccgactgaaatttattgacaaacaagctggagctcttggcttaagactnttaactgggaa

SEQ ID NO: 1013 - DNA, 657 bp, Homo sapiens
  misc_feature (462)..(462): "n" may be a, t, c, g, other or unknown
  misc_feature (541)..(541): "n" may be a, t, c, g, other or unknown
  misc_feature (574)..(574): "n" may be a, t, c, g, other or unknown
  misc_feature (605)..(605): "n" may be a, t, c, g, other or unknown
  misc_feature (646)..(646): "n" may be a, t, c, g, other or unknown
ttattagctctaatggactaagagactaatgggccttgtgtgcccggcgaaggtgctttgacctaccctgtgggtgatggggagcctctgaaggatttgaagcagggcagagacgtggacaaatctgccaaaagaaaacaaacaaacaaacaaaaacatcaacagcatgttatgttaatgtgcgattccatttaggcttttggaattttgaaaatagctcaaagacgccgttatgaccttgacagaggccaggttggaaatttctgaatccaatgattctttagctcccctctaagtctgacagtctaagattccataataaggaaggtacagctattgccaaaacgtataatgcatcacagtgtcagactttgggattatctgctgctgggggttttccacaccactgctccccttcattagtggggataattgagagttgactgcagtcgttactgctgntgtgatgggtatttgaagctaaattcgggcaagtaggagatgtgtgaatatttatctcagctgcagaaacttaatgcantgtggcattaattaccctgtctgagcctgctgncttcttctgtttttaggtgtcattttcagtnggataaattagtttccaaaattagaatagagcaaattgtanggtgagatcaa

SEQ ID NO: 1014 - DNA, 855 bp, Homo sapiens
  misc_feature (519)..(519): "n" may be a, t, c, g, other or unknown
  misc_feature (754)..(754): "n" may be a, t, c, g, other or unknown
  misc_feature (802)..(802): "n" may be a, t, c, g, other or unknown
gacttttatttgaaatacttggtgcttgaaaaactgaagaaggaagacgctgaccgaattcatatattcagttcttttttctataaacgccttaatcagagagagaggagaaatcatgaaacaactaatctgtcaatacagcaaaaacggcatgggagagtaaaaacatggacccggcacgtagatatttttgagaaggattttatttttgtaccccttaatgaagctgcacactggtttttggctgttgtttgtttccccggtttggaaaaaccaaagtatgaacctaatcctcattaccatgaaaatgctgtcatacagaaatgttcaactgtagaggacagttgtatttcttcttcagccagtgaaatggagagttgttcacaaaactcttctgccaagcctgtaattaagaagatgctaaacaaaaaacattgcatagctgtaattgattccaatcctgggcaggaagaaagtgaccctcgttataagagaaacatatgcagtgtaaaatacagngtgaaaaaaataaatcatactgcgagtgaaaatgaagaattcaataaaggagaatctacatcccagaaagttgctgataggactaaaagtgagaatggcctacagaatgaaagtttaagttccacacatcatacagatggcttaagcaaaatcagactaaactatggcgatgaatcacctgaagctggtaaaatgcttgaagatgaactcgtcgacttctcagaagatcaggatnccaggatgatgcagtgacgatggattctcgctgtgacactgcagttanaaataggcagtgcatttaaggctctactgtaacaaccttgttctcttatggcc

SEQ ID NO: 1015 - DNA, 783 bp, Homo sapiens
  misc_feature (759)..(759): "n" may be a, t, c, g, other or unknown
  misc_feature (781)..(782): "n" may be a, t, c, g, other or unknown
cttcccttcccgcgttccccgggagaaacatggccgggagcagcgaggaggcgccagactacgggcgaggcgtcgtgattatggatgattggccagggtatgacttgaatttattcacgtacccacagcactattatggagacttggagtatgtcctcatccctcatggtatcattgtggacagaattgagcggctggccaaggatattatgaaagacataggatatagtgacatcatggtcctgtgtgtgcttaaaggaggttacaaattctgtgctgatctcgtagaacaccttaagaacatcagccgaaattcagatcgatttgtctcaatgaaggttgatttcatcagactaaaaagttacaggaatgaccagtccatgggtgagatgcagataatcggaggcgatgatctttcaacgctggctggaaagaatgttctcattgttgaggatgttgtcggaactgggaggaccatgaaagcactactcagcaatatagagaaatacaagcccaacatgattaaggtagccagtttgttggtgaagagaacatccagaagtgacggctttagacctgactatgctggatttgagattccaaacttatttgtggtgggatatgccttagattacaatgaatacttcagagatctgaatcacatatgccgtcatcaatgagccccggtaaagaaaaatatcgagtctaaaagacatgaattcttacccctaaagtcccagatagcattcatatttaccncctggacctttgggaaaggccnng

SEQ ID NO: 1016 - DNA, 867 bp, Homo sapiens
  misc_feature (726)..(726): "n" may be a, t, c, g, other or unknown
  misc_feature (805)..(805): "n" may be a, t, c, g, other or unknown
  misc_feature (809)..(809): "n" may be a, t, c, g, other or unknown
  misc_feature (851)..(851): "n" may be a, t, c, g, other or unknown
ggcagcggcttccggccgcggcggacacttccctgggcgggactgtctcgtggcacccggtggaaccgaggagaacgtggagcgccgggagcggcgaatatggacgactacagcctggatgagttccgtcggcgctggcaggaggagctggcgcaggcccaggcgccgaagaagcggcgacggcccgaggctgccgagaggcgggctcggcggccggagaatgaaatgaatgatgtgcctttctttgatatccaactgccttacgaattggcaatcaatatatttcagtatctggacaggaaagaactaggaagatgggcacagatgaacaaacagactttggattgggtgatgctcatcagagtgatggattaaacttggaaagagagatagtcagccagaccacagcaacacaggaaaagtcacaggaagaacttccaacaacaaataatagtgtttctaaagaaatatggttagattttgaagatttctgtgtatgctttcaaaatatatatattttccacaagccaagttcatattgccttaactttcaaaaatcagaatttaagttctcagaagaacgagtgtcctactatctatttgtggatagtctaaaacctattgaactactggtttgcttttctgcattggtacgctggggggagtatggagccttaacaaaagacagtccttccatagagcctggacttctcacagctgaaacgntttcttggaaatccctgaaaccaggcagtcttggttctgaagattcacacatatgctaccaaggctacagtgggttcgnctgnctgttgggagaccatgcttctttttaacgcatacttccccantgggaaacttcattcc

SEQ ID NO: 1017 - DNA, 766 bp, Homo sapiens
  misc_feature (661)..(661): "n" may be a, t, c, g, other or unknown
  misc_feature (687)..(687): "n" may be a, t, c, g, other or unknown
  misc_feature (739)..(739): "n" may be a, t, c, g, other or unknown
  misc_feature (763)..(763): "n" may be a, t, c, g, other or unknown
atggaaaactgcacaagagcttgtgtgtcttgacattcccacatgtcaggatgccttcatttgctaatgacagaatacccaactcagactggattaaataaaaggggattttcttgcttatttaactctagattcagtggtaaatgggtttctgggttgattggtttggggcctaacaatgtcttcgagaacttggtttcttttcaacagtcagcttttgccttcctgtgagctagcattgtttcccatgggattgcaaggcagctgcatacaactcctgcagttcttccttttccatatccagagaggggacgtcctttcagacgctgattattttaggtgtaaattccatgtcccatcccaaaacaaacaaacaaacaaaaaaacatctagggcatgtcttatttgaggcgcttaacaaatgactggatcatctcccttgtatataacccagaaaacactgtgaagtagagcaaaattggaaagcccaagtcaaagaccatttgcaaatttcaagtagattccagtctgttgctcaaatcacaaaacataaaacggaggggtctcccttggagaccataaagtctgtgacatggtggccagttgggtcactggaaaacatggcaaaatattgaaaatgagggattaggtgagagtgtancaactgacactaaatgcttgatccangtgccattccctggatactgacagggagacacattggccaggtaatactggnaaaatacttctataggggaaaccncaa

SEQ ID NO: 1018 - DNA, 871 bp, Homo sapiens
  misc_feature (620)..(620): "n" may be a, t, c, g, other or unknown
  misc_feature (663)..(663): "n" may be a, t, c, g, other or unknown
  misc_feature (816)..(816): "n" may be a, t, c, g, other or unknown
  misc_feature (828)..(828): "n" may be a, t, c, g, other or unknown
  misc_feature (853)..(853): "n" may be a, t, c, g, other or unknown
ctttatgagtacaagtattgtactgatgtagacttaatatttcaagaaacttgttttcctgttcatcgtgccattttggcagcaaggtgtccattttttaaaacactgctttcttcctcaccagagtatggggcagagataataatggacatcaatacagctggtattgatatgcccatgttttctgctttgttacactacctttatacaggagagtttggaatggaggactcaaggtttcaaaatgtcgatatccttgttcagcttagtgaagaatttggaacaccaaattcccttgatgtagatatgcgtggactctttgattacatgtgttattatgatgtcgtccttagtttttcttcagactctgaactggttgaagcttttggtggaaatcagaactgtttagatgaagagctcaaagcccacaaggctgttatttctgcacggtccccattttttcgaaatttattacaaaggaggatacgaactggtgaagaaatcacagaccgaactttgaggactcccacaagagttatattagatgagtccattataccaaaaaaatatgcaacagtgatattacactgtatgtataccgacgtggtggacctctctgntttgcactgtagcccctctgtggggagtctcagtgaagttcangctctcgtcgcagggaagccaaacatgaccagggcagaagaagccatgggaactttacccatagcactggtcttggaatttaacatgcttgcacaaggctgtgaggatatcattgctgagagcatctcattagataccttaattgccatcctnagcggagttctnatccatatggctctaaatgggtgcnccgacagcttacatttct

SEQ ID NO: 1019 - DNA, 691 bp, Homo sapiens
  misc_feature (601)..(601): "n" may be a, t, c, g, other or unknown
  misc_feature (631)..(631): "n" may be a, t, c, g, other or unknown
  misc_feature (671)..(671): "n" may be a, t, c, g, other or unknown
gaagttagaaaatggaagtatgacattcaaagtattttttatggtaatattaatatagttttcagatgcttcacataatttagaactttgtaagtttttttcctgccttacgttagttatttcttcagtgagttgtaaagtcggccctctgtatcaacaggttccacatctttagattcaaccaaccgtggatcaaaagtattctggggaaaaaacaataaaatataacagtggaaaggaaaatacagtataacaactatttacaatgaatttatattgtattaggtattataagtaatctagagataatttaaagtattttggaggatgtgtgtaggctttatgcaaatactatgccgttttatataagggacttaggcatctgagggttttggtatccagaggactggatgccaagggataactgtaaaagctgatttgaaaagtctgttaataccatttttaaaaaattgtcaccgtgtagtcttcaccttttgcaaagatttttttttttaagtactacctctcctttttgatcaaggcagtatgcaatctttgtattagtgtattttcagaaacatcaattagatgtttaacttgnttccttttttaaatgcttcacagataattnactagattatttttaacaaacaattcaaagcttgaattantgaaacttcaaaaccgattg

SEQ ID NO: 1020 - DNA, 776 bp, Homo sapiens
  misc_feature (700)..(700): "n" may be a, t, c, g, other or unknown
  misc_feature (740)..(740): "n" may be a, t, c, g, other or unknown
  misc_feature (764)..(764): "n" may be a, t, c, g, other or unknown
aatgtttatttttaatggaggcagggttttgctctgttgcctaagctggagtgcagtaacgtgatcatagctcactgcagccttgaactcctggacctaggtgatgctcccacctcagcttcctgagtagctaggactacaggcatttactaccacgcccagctaatttttaaattttgtatttttgtttttttagaagcagggtctcactgtgttgcctagactggtctcaaactcctagaatcaagcgatccgcctgccttggcctcccaaagtgctgggattataggcgagagccaccacatccggccttatttaattaattcaccaaataaagtctagaaagagaatattggaaaatataaaaatctgcagcagtattattcaataatactgctgtttaacgaaaaaacagactttggaacccagtctgaagaatactgcatttaaggagatttagtgtgaatgtaatcttcagcacagaagcaaatgtggtcactgaaatcatattcctacacaattatgaagtggatgttcaagtaactcagattatgcttatgaaaataaaactgctatcttaaaatctcagagaatctcaaacctctgaaaagaagtcattagatcccagtttcagaaatgcagatttaaaacaagtagttcaaaaatctctttcactttgtgttgatgagaactacaaaangaacttaagtaatactttttgctttagattttacaaaatngaagccaaagtagtaagatgtggnaaagggaaaagg

SEQ ID NO: 1021 - DNA, 834 bp, Homo sapiens
  misc_feature (4)..(4): "n" may be a, t, c, g, other or unknown
  misc_feature (719)..(719): "n" may be a, t, c, g, other or unknown
  misc_feature (816)..(816): "n" may be a, t, c, g, other or unknown
  misc_feature (819)..(819): "n" may be a, t, c, g, other or unknown
  misc_feature (823)..(823): "n" may be a, t, c, g, other or unknown
gtcnttttttttgtactttggtcactatttagaaagggtgatcagttagacacaggccacatgtttaaggtgatatttctgtgaaacattttcatcttaataattatttcatatttattatgatgaaaggcatttaaccctagagcatgtacaaagctgagtcgcaagtctcagaaatagtgtcctaaagtgatgtattggcctcagagggaattcgtatgtacttatacacaaattcaccataatgaatgcaccaaatcatacttttaaatgcccaaataattcatattcataaatttttcattttgagcccctagatattttttaatcaaaacccataccactatccattcatcttccattcaatcaaatggaaaagagccatatttttttcaaaaatagcaaaattatctaatttcccttctacttctcatgtccataggataagcaaaagaaaaaaaatctgaaacacctgagttggcactttaaaaatttttcccagaaacatgagatgggatggtcagaggtcatgcagttggtgtcatgggggcaccctgcctgttttcttctgtagctcataccggtcacgccttgttggtgctaatgacttcccaggtgcctggtaccaattcttcattagttgctgttgtcctagaaatctgtgtaggtcatggaacctattttctggaaaaccacttaatacttattttaatttctgnaaatgttggctgtggaaaaagaacatttccacattttgcttggccattggttctggaaatctgacctgggcagaataaccccactttgggcattctnggnaatngaaaatttccc

SEQ ID NO: 1022 - DNA, 726 bp, Homo sapiens
  misc_feature (663)..(663): "n" may be a, t, c, g, other or unknown
  misc_feature (685)..(685): "n" may be a, t, c, g, other or unknown
  misc_feature (712)..(712): "n" may be a, t, c, g, other or unknown
aaaatacaattcctaaggcaatatctgctggtaagtcaagctgataaacactcagacatctagtaccagggattattaattggaggaagatttatggttatgggtctggctgggaagaagacaactataaatacatattcttgggtgtcataatcaagaaagaggtgacttctgttgtaaaataatccagaacacttcaaaattattcctaaatcattaagattttcaggtattcaccaatttccccatgtaaggtactgtgttgtacctttatttctgtatttctaaaagaagaaagttctttcctagcagggtttgaagtctgtggcttatcagcctgtgacacagagtacccagtgaaagtggctggtacgtagattgtcaagagacataagaccgaccagccaccctggctgttcttgtggtgtttgtttccatccccaaggcaaacaaggaaaggaaaggaaagaagaaaaggtgccttagtcctttgttgcacttccatttccatgccccacaattgtctgaacataaggtatagcatttggtttttaagaaaacaaaacattaagacgcactcattttatatcaacacgcttggaggaaagggactcagggaagggagcagggagtgtggggtggggatggattatgatgaaatcnttttcaatcttaaaatttaatncaccaatcttgcaaaattatgggggcngttcccaagctcta

SEQ ID NO: 1023 - DNA, 782 bp, Homo sapiens
  misc_feature (658)..(658): "n" may be a, t, c, g, other or unknown
  misc_feature (748)..(748): "n" may be a, t, c, g, other or unknown
  misc_feature (765)..(765): "n" may be a, t, c, g, other or unknown
  misc_feature (777)..(777): "n" may be a, t, c, g, other or unknown
tgacctggaccacaggggcttcagtaacagctacctgcagaagttcgaccaccctctggccgctctctactccacttccaccatggagcagcaccacttctcccagactgtgtccatcctccagttggaagggcacaatatcttctccactctgagctccagtgaatatgagcaggtgcttgagatcatccgcaaagccatcattgccacagaccttgctttatactttggaaacaggaagcagttggaagagatgtaccagaccggatcactaaaccttaataatcaatcacatagagaccgtgtaattggtttgatgatgactgcctgtgacctttgttctgtgacaaaactgtggcccgttacaaaattgacggcaaatgatatatatgcagaattctgggctgagggtgatgaaatgaagaaattgggaatacagcctattcctatgatggacagagacaagaaggatgaagtcccccaaggccagcttgggttctacaatgccgtggccattccctgctatacaacccttacccagatcctccctcccacggagcctcttctgaaagcatgcagggataatctcagtcagtgggagaaggtgatttgaggggaggagactgcaacctggatttcatccccatccgtggctcanaaggcagctgcatctgaagattgagcactggtcaccctgacacgctgtcccacctacagatcctcatcttgcttctttgacattcttttnctttttttggggggggntggggaacctgncctgg

SEQ ID NO: 1024 - DNA, 736 bp, Homo sapiens
  misc_feature (690)..(690): "n" may be a, t, c, g, other or unknown
  misc_feature (704)..(704): "n" may be a, t, c, g, other or unknown
  misc_feature (728)..(728): "n" may be a, t, c, g, other or unknown
aaaatggatacatcccagtagcaacataggcaagtacttagccatgtgacccctcctctgggggctctgccagttgtgagctctgcccagaaggtttccttccatctcggttggaggaatcccttttctgctcacccaccctgacttcatgctcacctggggctcggcaggtcacaagatgcagggtccatctacagaaccaaggaatgggctcatcccccagatacatacatcacctccatcccacgctgcctgcaggtacctactgggtggatccaaaccttggctgctcctctgacaccatcgaggtctcctgcaacttcactcatggtggacagacgtgtctcaagcccatcacggcctccaaggtcgagtttgccatcagccgggtccagatgaatttcctgcacctgctaagctccgaggtgacccagcacatcaccatccactgccttaacatgaccgtgtggcaggagggcactgggcagaccccagccaagcaggccgtacgcttccgggcctggaatggacagatttttgaagctgggggtcagttccggcccgaggtgtccatggatggctgcaaggtccaagatggccgctggcatcagacactcttcaccttccggacccaagacccccaacagctgcccatcatcagtgtggacaaccttccttctgcctcatcanggaagcagtaccgnctggaagttggacctgcgtgcttnctctgact

SEQ ID NO: 1025 - DNA, 859 bp, Homo sapiens
  misc_feature (815)..(815): "n" may be a, t, c, g, other or unknown
  misc_feature (839)..(839): "n" may be a, t, c, g, other or unknown
ataatagtgatggaaagacagctgttgtgggttctaacttaagttccagaccagctagtccaaattcttcctcaggacaggcttctgtaggaaaccagactaatactgcttgtagtcctgaagagtcatgtgttttaaaaaaacctatcaaacgagtatataaaaaatttgatccagttggagagattttaaaaatgcaggatgagctcttaaagccaatttccagaaaagtaccagaattgcccttaatgaatttagaaaattctaaacagccttctgtttctgagcaattgtctggtccttcagactcctctagttggccgaaatctggatggccttctgcatttcagaagccaaaaggacgattgccatatgaacttcaggattatgttgaagatacatcggaatacctagctcctcaggaaggaaattttgtttataagttatttagcctgcaagacctgttgttactcgtacgctgcagtgtccagaggatagagacaagaccacgttctaaaaaacggaagaaaatcagaagacaatttccagtttatgtactaccaaaagtagagtatcaagcttgttacggagttgaagctctgactgaaagtgaactttgtcgcttatggactgaaagtttattgcattccaacagctcattttatgttgggcatatcgatgcatttacttcaaaactttttctactggaagaaattacctcagaagaattaaaagaaaagctttcagcactcaagaattccaatttatttaacatccttcaacacattctaaagaaactaagtagcttgcagganggttcctacttggtatctcatgcngcagaagatcttcacttctg

SEQ ID NO: 1026 - DNA, 819 bp, Homo sapiens
  misc_feature (744)..(744): "n" may be a, t, c, g, other or unknown
  misc_feature (779)..(779): "n" may be a, t, c, g, other or unknown
  misc_feature (801)..(801): "n" may be a, t, c, g, other or unknown
aaaaatacatgattaggaagtgcatttggtgcattcgagccactgggctgcttctaaagtggttgctctggggaccagagagacttgttatgcctcatttgggtatcacatgaatcagcacacctcaaaaattattccacagtttggatgttagtattaggtattatataagaatttcccataatcaaataatattgagaaatgctgatttttgggaaggcacaacttttcccaaacttctactgtgctcctgtgcactgtgaatctgcagaattggcccttcccaaaccctttcaaccacagcatcctcctctggaggccagcatcttgcaagactacttattccttgaaatacactgtggaaaaaacactgatgtcaggggatattgaaataaactcactgcatgcggcatacccttcaaagacatttttcctccctttggaacagttgaaattcaaatgacatatcctagcatgatttgccacatgggttgtgttttgaaacccaaatctaacacaacaaatttcagatagagctttgtttagcccccaggccagtttttggtcccgtggataagggttggtatccagacctcttagagcttttctgcatcagctttccagggcttattcaaacccttcatgtgctggaagtccctcaccctttatgaggcacaggaggcgatacgcttgcatctcgatctctcagcctcggctcatgctggtctctccttctcatcctgngttccagccataggaattctggtcattggggtggnaaggttacgcaccccccacatncccaaccttttggacatg

SEQ ID NO: 1027 - DNA, 857 bp, Homo sapiens
  misc_feature (807)..(807): "n" may be a, t, c, g, other or unknown
  misc_feature (843)..(843): "n" may be a, t, c, g, other or unknown
  misc_feature (852)..(852): "n" may be a, t, c, g, other or unknown
cttttgcaggaattagtactgaaattaatattaatcaatggcaaggaagaccagagcagaggatagtcctgtgacaaatggtcacaagcttctcccagctgtgaaatgtctttccttcataagtgactatttccattccctttcatgtatttgccttgtctggaagactttgattatgtgcttcttaggacacatataaagtccttactttgtatttggggcccagagaagtttagcaatttgcttaagctcacatagctagttagcagcagagctgggcctaaaatcttggaccatttccaaatccagtgtttgctttactgtatcacactgtgcaacgcttgtgttgatcactgtgagtacttaatatactagatttctaacagcagcctatttgcttctgattgccgactagttcacttcaattcatatttatcttaactgaaaaccactccttctgacggctcgtctgttgtctatagaaaatgagttggtgggctcattctagccctgttggacagccgaacccatcacaacaaatcaatgccaaaaatggcatttcaagaggaaaacatagcatttatttagtacccccaacagagtagctcaaagtgatttgaaaatgtctcattaatcctcataacacccctgtgggataataataatattattataacgtttaggcgtagaactgtggcaaagccaacagcttctctgacatgtgcaggatttcctcatatttcagtctgcaatactagagcctgactaaaaccggcaggtttgcaaacagcaagggtaaataaatcntgggggtttggccttctggggtgctctaggcatagnttggggttncctac

SEQ ID NO: 1028 - DNA, 836 bp, Homo sapiens
  misc_feature (8)..(8): "n" may be a, t, c, g, other or unknown
  misc_feature (673)..(673): "n" may be a, t, c, g, other or unknown
  misc_feature (675)..(675): "n" may be a, t, c, g, other or unknown
  misc_feature (797)..(797): "n" may be a, t, c, g, other or unknown
  misc_feature (819)..(819): "n" may be a, t, c, g, other or unknown
  misc_feature (821)..(821): "n" may be a, t, c, g, other or unknown
gaagttanataaacataattactaggtccttaaggaatgaattttatttttgtgtttccagttcctgtaactatgtgcctagtacatagcatgtgctcagtgtttgttgaaaggaaaaggtctgaagttgattctatcgtcaaagaaaatatttcagtataaagcatgtagtttataccaagaagcctttttaaacttaaggtctcttttttcataacatgtacatataaattttaaaagaaaacttaaaaatacagtagctgcttctaaatgcagatattgtaacttagctattatttcagaattccacaaggcatatgcccagttggtcgatcttggcactcactaacaccagtttcttcagatcatctttttctctttggaggatttaccactgataaacagccactaagtaagtccttgaaaaatatgataatgaaatcatcatatatcatccatatctaatagctgaaaatgagtctattagagactgatgagacggcttatagggttggttggaaggtttgaaattaattttgatcctgtaacatagctgtaattgtactatatggcatacttctgttcaataaagaacctggagcacttaagagccctgctgaagggctacaacatgcaaagggcttacttggctaattgcaggtgggggaaaaanangaaaatatactctctgtatctgctcatgatctattacctttcttgccaaagctgtgccctttaaatggcaatgtcatatttgccaggactaacatacttcatttctttgctttgaatcaggngatgcctggacttactggattnantaaaaatgaatggat

SEQ ID NO: 1029 - DNA, 854 bp, Homo sapiens
  misc_feature (680)..(680): "n" may be a, t, c, g, other or unknown
  misc_feature (690)..(690): "n" may be a, t, c, g, other or unknown
  misc_feature (765)..(765): "n" may be a, t, c, g, other or unknown
  misc_feature (852)..(852): "n" may be a, t, c, g, other or unknown
  misc_feature (854)..(854): "n" may be a, t, c, g, other or unknown
ggttagattatgttgaaacacatctgtgtttcagatgtgttcagagctgaggtctcagctgaggctccactgaagcaggattcacttccaaaataacagagttgttgccaatattcagttcgtagcaaactactggaacaagaatctgttttcttgctgagtgaatttcttgccatgtggccctctccaaatgctggacataaaaaagtaggctgagcacagtggcgcacacctgtagtcccagcggtttgggaagccaaagtaggaggatcgcttgaggccaggagttcaaaactagcctgggcaatatagggagacccccatctctacaataaataaaaataaaagctttcatttacaatgatggtagaccaagaaatttgtcctagatcttcactgagaacatctagaaaagctggcagctgaacaaaattttaaaaacatctgggctgggcacggtggctcacacctttagtcccagcactttgggaggcaaggctaggggatcacttgagctcaggagtttgagaacagcctcagcaacatagggagaccccatctcttaaaaaaaaaaagataaactaaaaataaattaattaaaaacacctggttgaagacatcagcgagctggcaacaatgaagaattcctaaggaaacagaaactttgttaggggagctgntttcccttgngttggccaattctgcgagtggtaagtgattgctgactgttgaatggccattttgacaccttatgggacaaggaanaaagggcctgcactggtaaccctttcccttacttggaatgaggatcccaaaggctactcattaggagtacagtggtccaaaagtaancn

SEQ ID NO: 1030 - DNA, 853 bp, Homo sapiens
  misc_feature (732)..(732): "n" may be a, t, c, g, other or unknown
  misc_feature (762)..(762): "n" may be a, t, c, g, other or unknown
  misc_feature (788)..(788): "n" may be a, t, c, g, other or unknown
  misc_feature (837)..(837): "n" may be a, t, c, g, other or unknown
caaaatcatgtggatatattttaaaagatccagcttacttctgtttctgtccatgaaagattaactaccacaagaattgccctctaacagcaggtgattagagaactggacaaaaatctaggaaacagctgttttcagacttcaggtaacagtagaagactgtaattcttaactgaaaggaaacagatgaagtgagccctgggattgcactgtttgcagtatgaggagaaggacccaaacatagtctagtggtgtgcatgagttgatgagacagaagagaaaagttcattggcggagaagtggctaggatatataggaaataccagagagaagggagctacagagatagaagagagcaagagcaggcaagtgccagtctagagatttctagtagggtctcctcaaatctttgactgaatactgattgagtagccatggtacacaataccatgaggctggagaaagaaagtgatagggcagttctcagagctcacatagggctgggaatagtttgtgtttccatcagccagcatagagacatagaaccttgaacagaaacatcagaagggtaatgccatagtagtgggaccaaattagtctgaggctagtgctgcattggacttcttctaacaaaaattgaaagcaaacattgaaaggatcaaattgatttaaaataatttatttgtgtgctagaacaaagtccaggatcctttaagataatacagtaaaatncagcaccaagaatgtaaaattcacaatggncagtatctagtcagaatttttcatgngtattggggatgaaagtatgtggaagggcaaaagaaggctttcccaganggcttagggaaccttt

SEQ ID NO: 1031 - DNA, 851 bp, Homo sapiens
  misc_feature (643)..(643): "n" may be a, t, c, g, other or unknown
  misc_feature (706)..(706): "n" may be a, t, c, g, other or unknown
  misc_feature (763)..(763): "n" may be a, t, c, g, other or unknown
  misc_feature (805)..(805): "n" may be a, t, c, g, other or unknown
  misc_feature (820)..(820): "n" may be a, t, c, g, other or unknown
ttttttactgggcccatgaagcaactttgacataattattcaggacatatcctaaacgccgtcatatcctggattttccaggtaaccaattgctaaactcacaggcatctttgccaatgtatttttaagaatgatatttgctaccctagagttcagagtgtttattgtgtattatttcatacaatacttgtagaagcccagtagaaggattatatccccatgcttacagatgaggacattgaggagacgggtgttggcgtccctgctttccttcagggagcacaggtcaggttgctccctgaagtcagtgatgggtccagcacgttccacacggcaaggggacaggccctctcccagggcggcccttctgccgcctttgctccttctttgagacttaggggcggggcatgggcaggagggagagtgctggattgtagctgaccctctcgggacttgtaaatactgtcaagtgattgggagtcctagacaaacacgagtggccgcctcggggccggcggcgtggccctgtgacagcaagaacttcaggaacaaatgctctctacacccactggccctccagggtcagacccttctagttcctgcctgccccttcagtagcgaagagagaagccgttgctcttanggcagggctgggtttggaaatgacagcatgtgttcaacaacctgaaaaccaagctgaatgtcncctgagatggttctttcttccctgaaaaggaagcggtgtccatcacaaaagagcctnttctggtgagttctgagccatgctggatcttgcttgaacagntcttattttcacagntcacgtttttgggccttcaaaaagagacttg

SEQ ID NO: 1032 - DNA, 706 bp, Homo sapiens
  misc_feature (655)..(655): "n" may be a, t, c, g, other or unknown
  misc_feature (705)..(706): "n" may be a, t, c, g, other or unknown
aaaaaatagaagataaagagaacaaaacaacaaaaaattatagaaactaaatccttatataattccactacttggggatacaattgtcaatactttatggatgtccttccagatatattctttgtatatacacacaaatataaataaacacacttgtaagatatataaagacatcaaattttaaatgttcttctatagtttttatttcactcaacatgttactaaacttttgagttcagtagacatacatcataccgccatattaatgccttcgattttctcattatatgaatgcatcaaaattttttgactaatctgaaggctatttttaaaatttatttatttttaattttttttctgaagaaaaaatgatttttttctatacaatgatgctagaagaaactgatttaaaagttacagctttgaatgttaaatgatgaagggttttggagtcattccttttgacctactaattttacaattctcttgaacatcaagtgttttttagtggtcatcatgtgatatttatgtgcatattttgggcatcactgttctaattcccattgactgacgtgttggggacctcattcatttctttcagttcttaaacctatagattgatactaatctattaatgtacttaaaaaaaaaattngggggtttaaaaaaaaaaaaggggggggggaaaaaaaaaacccccccccnn

SEQ ID NO: 1033 - DNA, 656 bp, Homo sapiens
  misc_feature (543)..(543): "n" may be a, t, c, g, other or unknown
  misc_feature (619)..(619): "n" may be a, t, c, g, other or unknown
  misc_feature (652)..(652): "n" may be a, t, c, g, other or unknown
  misc_feature (655)..(655): "n" may be a, t, c, g, other or unknown
gatgataggagttaagagaggactatagaaaactgggtctctaagctgatgtgtcaagtcacactgtcctctgcttatcctaagcttaccttgctcaaatttcttttttttttctttttctttgtttttggtttttattttttcttaaatttcaaggatattccttcttttgtaaatgtcacagagtatcatggctctgtcgccgaggctggagtgcaatggtgcagtctcaggtcactgcaacccctgccttccaggttcaagcgattctcctccctcagcctcccaagtagctgggattacaggcacatgccatcatgcccggctaatttttgtatttttggtagagatggggtttcaccatgttggccaggctggtctggaactcctgacctcaggtgatttgcccacctcagcctcccaaagtgctgggattacaggtgtgagccaccgtgcccgtcccaaccaggcttcttaaatgaattctaagatagaaacaacaggagctgccaggactctcttaagggctgaacctaggactgncacagtgacatttctgccatattctgctggtcacaaggcaagcccaaattcaaaaggagagaaatagacctcttanagtttcctaataaaaggtaatttccaatttttnaana

SEQ ID NO: 1034 - DNA, 717 bp, Homo sapiens
  misc_feature (656)..(656): "n" may be a, t, c, g, other or unknown
  misc_feature (694)..(694): "n" may be a, t, c, g, other or unknown
  misc_feature (701)..(701): "n" may be a, t, c, g, other or unknown
tagtgcgtgtgctggggcgagcgggagcgggcgaggatgggcacaggatagaggcagagccacccacgccgccgcggccccacgctgggcgacagagcctccagttccccttcaatggtggcgggtcgccggagctctgatcgccgggaacccttgccgctgctgtcctgcgaccccaagcaggtatagacacgtgtggccgtttacgctgtaggatcctcattcccactggctttgaacattttggggacttacaatgccgccacccgcggacatcgtcaaggtggccatagaatggccgggcgcctaccccaaactcatggaaattgatcagaaaaaaccactgtctgcaataataaaggaagtctgtgatgggtggtctcttgccaaccatgaatattttgcactccagcatgccgatagttcaaacttctatatcacagaaaagaaccgcaatgagataaaaaatggcactatccttcgattaaccacatctccagtaagttgatcttagcttctgacttccagcaaactctttgctctgcgtttctgctatatgtgattgtgggatattaatttttgaggttgactttagtgcaaagcaaaaggcttccagaatgtcctgacatgcagattctggatttaaggcccaaaanggggggaaaaaaaatttggggccccccccccccccccnttttttncccccccggggttttt

SEQ ID NO: 1035 - DNA, 520 bp, Homo sapiens
  misc_feature (512)..(512): "n" may be a, t, c, g, other or unknown
  misc_feature (517)..(518): "n" may be a, t, c, g, other or unknown
gctttaatgatttatggcaaactcatactagccttgatcagagaggtgaccctggcagttattgagcattaactctggaggactgacgccactgagtctttctacacactgtaatttagtgttcctatccaagatggccactaaattgcacttcttctattttcaccctctggagaatggtaaaaagcatgatttgcaaatattgtcaagtccaaagtgtgtttctaaactactaagctagccaaatgcatctctatatgttacaatgttctgcagatgtgaaaaaatccttcccgggtttatgaaagtgagaatgatatgcatctttagctgcctctggcatccggcacgtcacacagtgtggtcagtccagtcaggctgcccgagccacagattcccagcggcttcatttgtcagacaagctgacaggtgttggtcaggaaaatactgatcaagttgtttttgttgttgttgttttgagacagggtctcactctgtcacccaggctggantgcanngg

SEQ ID NO: 1036 - DNA, 675 bp, Homo sapiens
  misc_feature (649)..(649): "n" may be a, t, c, g, other or unknown
  misc_feature (663)..(663): "n" may be a, t, c, g, other or unknown
  misc_feature (672)..(672): "n" may be a, t, c, g, other or unknown
agatagcatgtgtaattaatttttaatgcagtgctggatgcagcgctttcaagcagttagtggatgtgaagaagcagcactggccaaggacatcagagacctcagagcaaggcagccccgttctcctttaaagggactcggaaagtggcagaggaggcttgcattgccctctgtgtggagcggactggcccagaaatgggttcttctcgggtgacctgaggtcaagtcagtctataacaatctaagaccagggatcccaagagatcatctcctccaacctcttcattatataaatggggaaaccaaggcagagagtggggatgaagccatgacacatgggtggcagagctgactcatacctgggtctgcccactaggccatactacctctcttgagtttttattgaaaaccagaaaaggaagttcgtcgcccagtggaagccacttaaagattgatttctgcctgaccatgaggcttggtgtgaaccctgcaatgagattggtagcaggtagagctctgatgttgaggagccccacgttgggtgccttggacttcagctctgctatctgcagtgggagcccaccagacacatcctgggtttgagactctggggttgtgctttgacagctggctgccctgtcccttggtngggggggggggggnccccttttnccc

SEQ ID NO: 1037 - DNA, 660 bp, Homo sapiens
  misc_feature (647)..(647): "n" may be a, t, c, g, other or unknown
  misc_feature (659)..(660): "n" may be a, t, c, g, other or unknown
aaacacagagagaaattgttaagtggaagtgagagctcatccaaaaaaagacagagaaagaaaaaagaaaagaagaaatctggtaggtattcatcttcttcttcatcaagctctgattcttccagcagttcttctgattctgaagatgaggataagaaacaaggaaaacagagaaagaaaaagaagaaccgttactgaatcagacagtaaggatagtttaaaaaagaaaaagaagtcaaaagatggaactgagaaagaaaaggatattaaaggactcagcaaaaagagaaagatgtattctgaagataaacctttatcatctgagtccttgtcagaatcagagtatattgaggaggtgcaagcaaaaaaaaaaaaaaaaaaaaaaaccccacaaagtcaaaagacaagtttgaaaaatgtttacagctccacaaagatagacaaatttccttgatgtatgaaaaatgtcaacaaaccaataaaaagactaacaattcagtagaaaaatggacaaagaacaaatatggagattcatagaaatgagagataaatgtcatgatgagaaggtgaggtgctcacttgatttataagagaaatgaaaattaaaactacaccagatgccattttttaaaaacctattacattgngaaaaaattttnn

SEQ ID NO: 1038 - DNA, 642 bp, Homo sapiens
  misc_feature (640)..(642): "n" may be a, t, c, g, other or unknown
agtgttccgcgtccgggggtttgtgggagttgccttgacctgcagctccgccaccgcggacccgccttctgccctcagcagcagacgctctgtcccgcccgggcagctctgcgaggcagcggctggagagggaaccatggggactgtgcacgcccggagtttggagcctcttccatcaagtggacctgattttggaggattaggagaagaagctgaatttgttgaagttgagcctgaagctaaacaggaaattcttgaaaacaaagatgtggttgttcaacatgttcattttgatggacttggaaggactaaagatgatatcatcatttgtgaaattggagatgttttcaaggccaaaaacctaattgaggtaatgcggaaatctcatgaagcccgtgaaaaattgctccgtcttggaatttttagacaagtggatgttttgattgacacatgtcaaggtgatggcgcacttccaaatgggttagacgttacctttgaagtaactgaattgaggagattaacgggcagttataacaccatggttgggaacaatgaaggcagtatggtacttggcctcaagcttcctaatcttcttggtcgtgcagaaaaggtgacctttcagttttcctatggaacaaannn

SEQ ID NO: 1039 - DNA, 681 bp, Homo sapiens
  misc_feature (655)..(655): "n" may be a, t, c, g, other or unknown
  misc_feature (657)..(657): "n" may be a, t, c, g, other or unknown
  misc_feature (666)..(666): "n" may be a, t, c, g, other or unknown
gctaatgttttggccgcttcaagatggcggtgcaggagtcggcggctcagttgtccatgaccctgaaggtccaggagtacccgaccctcaaggtgccctacgagacgctgaacaaacgctttcgcgccgctcagaagaacattgaccgggagaccagccacgtcaccatggtggtggccgagctggagaagacgttgagcggctgccccgccgtggactccgtggtcagcctgctggacggcgtggtggagaagctcagcgtcctcaagaggaaggcggtggaatccatccaggccgaggacgagagcgccaagctgtgcaagcgccggatcgagcacctcaaagagcatagcagcgaccagcccgcggcggccagcgtgtggaagaggaggcgcatggatcgcatgatggtggagcacctgctgcgttgcggctactacaacacggctgtcaagctggcgcgccagagcggcatcgaggacctagtgaatattgagatgttcctgacggccaaagaggtggaggagtccctggagaggcgtgagacggccacctgcctggcctggtgccatgacaacaagtcccggctccggaagatgaagagctgcctggagttcacctcagaatccaggagttcattggaaaaacccttttncnaaatttttncccccccgggggggg

SEQ ID NO: 1040 - DNA, 655 bp, Homo sapiens
  misc_feature (633)..(633): "n" may be a, t, c, g, other or unknown
  misc_feature (647)..(647): "n" may be a, t, c, g, other or unknown
  misc_feature (649)..(649): "n" may be a, t, c, g, other or unknown
cattccttaatgggtttacatattaattaatctgttgatgtattcatgcatgcatttgcaaatataatttgaagccctaccattttctaggaattctgcgagaacctagggaatagataggactacattgattttgtcatcatgggattctggaaacattcaggaggagcatctcatctctagcctagggtgtcagaaagaacttgagtaatcaaggattgggtcttaaaggacaagtgaacatgtgcaggtgagaacattctaaaatgaagggacttgaacaaaagcaaagccatgttaaacagcttgtacttcatctgtaggtagatcagtaaccactcaggggttttaatcagggaaatgatcttctcagatttggcttcatatgaatctctctatttgccttatgtcacagcatatattaggagatcatcagagtagtccagacaagcaggaatgaagataagcatttggaatctagaaatgattacattaaaacaggcctagacacaaaccaccacattttttgccagaaaggcatagaaacaaattgtattagtgcttgccaggttctgggaggagttggagatggagaatgactgctaatgggtataagatttctgtatagtctgntctcatgccttggncntttaaa

SEQ ID NO: 1041 - DNA, 665 bp, Homo sapiens
  misc_feature (478)..(478): "n" may be a, t, c, g, other or unknown
  misc_feature (634)..(634): "n" may be a, t, c, g, other or unknown
  misc_feature (645)..(646): "n" may be a, t, c, g, other or unknown
aaataaaaataaatcactatgccaatgtgggagttatgatcatctctgtttttaaaaattatctatgcaagcatggggcataacctttgttatagctctttcactgcattttttggctctatttcccaaataaaatagagaaacaatattttaaggaatgtattgtccccttagctttcttattttgccttttcaggaactatttgcgtttgcggtattgcttaactatgaaatgctagaattcataacccactatcttcatttcctccaggctagtagcttaataacatgaagaaaaattgattcttgtagtacctaaaatgacattttctgcctacataacctgttaatccagttttgagttcccattacattttcatcgtcagtggcaagccagattaatttatagtataatcattcaaaaagtttagtttacagattttaaagttgcttttcatatcaattttatttatgctgnttttatatttaaattgctttctatgtgagtcatccatgtaattttcatccaaactgaaattaacctttgcgtaatttctgctttcttgaaactactttttcttttgatgattaaatattgtatgattactggagttggtgattgctaactactganagtcagtgggnnccccttttaaaaaaaaaaa

SEQ ID NO: 1042 - DNA, 711 bp, Homo sapiens
  misc_feature (677)..(677): "n" may be a, t, c, g, other or unknown
  misc_feature (681)..(681): "n" may be a, t, c, g, other or unknown
  misc_feature (685)..(685): "n" may be a, t, c, g, other or unknown
cagagatcatgtgacttgcatgtggcctagagataaaattcaaatctggttctgtagactccagggacatattcaccatgccatgggtggtggctattaaaccttgataaatttgtgtttatggttaacaaatgtgaaagctattaaacattgctggtttgaattttttacagtgcagaaatgtaaaatgaaaaaggatatttcctttcacagtgttaccgagaagtcatgataatttcgtttgttcttccagatttaggcatatacttatttaatcaataatgtgttaacagctgacacctgtggttgctgtgacaggcactatttgaagtgctttatcatggattaactcttaatcctcagctaccgtataaagtaggacataaccccatttcacatgcactacactgagacttgcctcctctccccccacattgaagatgttctttttttcataactatatactattccattgcatgaatattctgtaatttatttaatcccctatggattgataattaggttcattatagatagaagtgtaattaacattcctgtacatgtattttgctacttgtgtgggtatttctgtaggatgaataactagaaatttattggatcaggtttcacatttgcagtttttttttggggaaaaaaaaaaaaaaaaccccttttnaaancccntttttaaaacccccccccaaaaaaaa

SEQ ID NO: 1043 - DNA, 690 bp, Homo sapiens
  misc_feature (662)..(662): "n" may be a, t, c, g, other or unknown
  misc_feature (675)..(675): "n" may be a, t, c, g, other or unknown
  misc_feature (679)..(679): "n" may be a, t, c, g, other or unknown
attcaaaactgtggattccattccagcagatgtagctaaaatgggggggcaggagaaaactgtggaatagggaaggttttttctaaggcttcattattgtgccagtctcaagttgaaaagaggctacatgattgtacattcaagtcttatgttttcctatatttgaaaaataaaaacatttataaaatatatgcaatgtttactgggtgcttttcctcgtattagtgttttaaagcaattgaagaaaataaatatttcagtataaaaaggagcaaatgtatatgaataagtacttaagagaaaaaaattttagtgacagctttaatggttgataattcggtacccttcagttcacccatttaaagtatacaattcattgatttttattatagtcacaaatgtgtacaactgttaccaaagtgaatttgataattttttttttatcacctcataaagaaccctgtacccttggccaggcacatttgctcatgcctgtaatcccagcactttgggaggcccaggtgggcggatcacttgaggtcaggagttcgagaccagcctggccaacatggtgaaccttgtctctactaaaaataaaaaaatgagccgagtgtggtggtgggcgcctgtaatcccagcttacccttttttggggggggggnaaaaagggggggncccntttttaaaaaa

SEQ ID NO: 1044 - DNA, 710 bp, Homo sapiens
  misc_feature (672)..(672): "n" may be a, t, c, g, other or unknown
  misc_feature (705)..(706): "n" may be a, t, c, g, other or unknown
attttgcccgttagttgatgcagattcttcataatgtcaatggcctttacaatttggtatgtttttgcagtggctggtactgctttttcctttttgtatttagtgcttccttcagaagatcttgtaaggcaggactggtggtgacaaaatctttcagcatttgcttttctgtgaaggattttatttctccttcacttatgaagcttagtttggctggctctgaaattctgggttgaaaattcttttctttaagaatgttgtgccaggcaccgtggctcatgtgtgtaatcccagcactttgggaggctgaggctggcagatcacctgaggtcaggagttcaagaccagcctgaccaacatgggaaaactccatctctactaaaaatacaaaattagccagctgtggtggcacatgcctgtaatcccaactacttgggaggctgaggcaggagaatcgcttgaacccaggaggtcaggttgcggtgagccgagatcttgccatcatactccagcctgggcaacaagagtgaaactccatctcacacaaaaaaaagaatgttgaatattggcccgcactctcttctggcttgtagtgtttccgcagagaaatccactgttagtctgatgggcttccctttgtgggggaaattttaaaaaaaccccccccccccnggggaaaaacccccccccctttttttttttttnncccc

SEQ ID NO: 1045 - DNA, 645 bp, Homo sapiens
  misc_feature (643)..(645): "n" may be a, t, c, g, other or unknown
ccatgcacacaatttaagggggaatcaaaaagctaagtaatccagataaatgttatttattgtaatgcaataaaaatattcaaaataaggctaaaatctatgctgaagaaaataccacaattttaaaagaagattaatagggaacgtggaggtattttttctcttgacatgagtggtgcattgtatgcacatttgtttttcactgggctgcgtatttacatttagtgaatttttctatacatatattctatttcaaaaaattgcaaaaggaagtaaaaatggacacaggcaggctcttaatttcttgtgatctttgcttaagtcttatgtttctgtcctgtactgaaaatttcttctagtttcttttaaattctaacatttgttttatagaacaacaattatattgccaaataaaatctccagtgattttgatagtaggtttagattgttcatcagaaagttggctctgtgtttctctatatcttggcacccaaatgttcaatttaactccaggtacccacttgtcttatggctctggttcatacgcaggcaattaaccttcattataatggttggttcacaatagaacaattatctagttgattgctctagtgtaaatgtagtcataaatatgccatggttnnn

SEQ ID NO: 1046 - DNA, 664 bp, Homo sapiens
  misc_feature (369)..(369): "n" may be a, t, c, g, other or unknown
  misc_feature (653)..(655): "n" may be a, t, c, g, other or unknown
ggggggcccgggcacaagcagttgagggaaggagactgtgcccctcctggctcccaagtcttcaaggagaagattctcccaggaaatctgacctcagaagacacctccttggggcctctctgctgtcacagccatgccaccttagagctttgtaaagcctgcaaagggctctttaaaaacttcaagccaggcgcagtggctcacacctgtaatcccagcactttgggaggctgaggcaggcggacacttgagcccaggggttcacagctgcagtgagctgcggtcatgccactgcactccagcctgggtgacagagtaagaccctgtctcacagaaataagtctaactttaattgaaatgctgtagcangctgagcgcagtggctcttgcctgtaatcccagcactttggggaggacaaagtgggcggatcacctgaggtcaggagttcgagaccagcctggccaacatggtgaaacccgtctctactaaaaatacaaaaattagccaggtgtggtggtgtgcacctatagccccagctattcaggagactgaggcaggagaatcgcttgaacctgggaggcggaggttgcggtgagctgagatcatgccactgcactccagcctgggcaacagagcgagactttccccgggnnnccccttttt

SEQ ID NO: 1047 - DNA, 855 bp, Homo sapiens
  misc_feature (770)..(770): "n" may be a, t, c, g, other or unknown
  misc_feature (778)..(778): "n" may be a, t, c, g, other or unknown
  misc_feature (837)..(837): "n" may be a, t, c, g, other or unknown
aaaatgctctggctccggtggtgacaggttgtccagcttcttacagccatcttcactgaaactaaggttaactcctcactctctatggacggctactctctatttccaagggcgtgaagaatttccctcttctcctgtgctttcatctaaaagttctccctggataattatcattgcagtggagtgcctggattggacatcctcatctgggtcaactaaaaaaagaaagcatgcaagacgacagcatagaagcttctacttccatatctcagcttctaagagagagctatttagctgaaaccagacatcggggaaacaatgagaggagtcgagcggagccctcctccaacccttgccatttcggcagtccttctggggccgctgaaggaggcggaggccaagatgaccttccagatctttcagcctttctgagccaagaagaattagacgaaagtgtcaatttggcaagactggccatcaattacgaccctttggagaaggcagatgaaactcaagctagaaaacgactttctcctgatcagatgaaacactcacctaatttaagttttgagcctaacttctgccaggataaccctcgaagtcccaccagctctaaagaaagcccccaggaggcaaaaaggccacagtattggtctgaaacccagtccaaaaaagtatttttaaataaggctgccgacttcattgaagagctatcctccttttcaaatccacagcttccaaaggattagacctcgtgcctgcaaaaaccncaagagtnaactggaatctcaaaacaaagtatgcaggaaacagctcagttctaaactgtagaagacnagaagactttgtccatcc

SEQ ID NO: 1048 - DNA, 817 bp, Homo sapiens
  misc_feature (639)..(639): "n" may be a, t, c, g, other or unknown
  misc_feature (729)..(729): "n" may be a, t, c, g, other or unknown
  misc_feature (776)..(776): "n" may be a, t, c, g, other or unknown
  misc_feature (810)..(810): "n" may be a, t, c, g, other or unknown
cactgagaatatggggtaaatacttggagacaagagagagacaaatgtcctagtttccaaaaaggaataaagtatattgcaaaaacccaagaccaattccctactttaaactgtggtaaaatttgaagagattgtaaaaaaatgaaatattgtgtttagaagagaatgggatgatcaccatgaatcaatatgaatttataagaataagacatgccaaaatgacctcattttttttttgctttatttttagttgtataattgctattggattagagaatagtaaagacatgttgtatcttgactttcgccaagtggttgacagtgtttccttaactatccttgtggaaacatgatgaaattagattgtaattagattgatttacagctgcttgcctggccattgccatgcccgcatgcccagcgtttagttaaataatagttactttatatactggttcctcacagagaactggtggtgaacattaatttgcatatattcagaaagtatggatttgtagttaacgagtttttttaaggatttgtatgttgaaacttgagttcctggatttattcatgattgaggtttctgttagggacttttttgcaaccaagctgtatttgtaagatatataaatctgnttttaatttacatatgtaaccttgacttataaattacttagaagccaaggcgtaatattagcatttagagcaaagtctggctatgttaanaatgctaacgttatgaagaatcttttctttggtcagtaaccactatngtaagctccttggatgttttcatcccttgaaagncattctg

SEQ ID NO: 1049 - DNA, 667 bp, Homo sapiens
  misc_feature (591)..(591): "n" may be a, t, c, g, other or unknown
  misc_feature (627)..(627): "n" may be a, t, c, g, other or unknown
  misc_feature (666)..(666): "n" may be a, t, c, g, other or unknown
aattgatggcatcttaatcttggtgtcagccaagcagtagttgtaacacagtcttcattgcttgtgctgtgcatcatatgtcttgcagttaacccatagggattaagtggtagtgtttagggggtgtggcaggaggtgagtttaacataaacctccaagcaggagtcaaaagtagacaagctctatataattacacccctgacttaagaatctagcatcaagtagcttttgtttcttttatggatagttttaagaaacgctgcatcaccaactcccttgatggcactgaaccttttgtgggaaaaccagacaatgacactgaaattaaaagtgattcaccagagtcagactctgaaagtgaagaactatcagaactaactactttatttcacttatattttccttttttgaatgctcaagtgttgtatgatctcatttaaagtgcttctaataaatatataaaatttataagtgaccaagcgttatgttagttaaacagaagtatttttcttagtatggggaaaaaatggctatacaatctggccagacgtggtggctcagtctataatcccagcactttgggaggccgangcgggcggatcacgaggtcaggagatcgagaccatnctggctaacaccgggaaaccctgtctctactaaaaaatnc

SEQ ID NO: 1050 - DNA, 698 bp, Homo sapiens
  misc_feature (620)..(620): "n" may be a, t, c, g, other or unknown
  misc_feature (672)..(672): "n" may be a, t, c, g, other or unknown
  misc_feature (696)..(696): "n" may be a, t, c, g, other or unknown
tcaagatgagatttgtatggtgacaaagagccagaccatatcaagtacctaactcattactatcctataactatgagtattactggtattcttattggccacttgacaccaacacaagtggggggccttatatcacttaagaagaggaaatatatagaaaaaagtggcctggagagaaacttgctccctgaatttccaatatatgtccaaactgatgactggggtgagaaagatctattctggcttttgcatactgactcagataaaaaacaaagctcatattattacaaagtcaaaaacaaaagatactggtagggctgcagagaaaagggaatgcttatacactgttggtgggaatataaattagttcagccactatgaaaagcagtttggagatttctcaaaggacttaaaacggaatcgctgttcaacccagtaatctaattagtgggtatatatgcaaaagaaaacaaatcgttctaccaaatagacacatgcactcacatgtttactgcaacactattcacaacagcaaagagatggaatctacctaggtgcccatccatggtggattggataagtaaaatgtggtacatatatactatggaatattacacagncacaaaaaggaatgaagtcatgtcctttgtagcaacatgcatggtgctggangtcactatcctaagtgaattaacnca

SEQ ID NO: 1051 - DNA, 667 bp, Homo sapiens
  misc_feature (600)..(600): "n" may be a, t, c, g, other or unknown
  misc_feature (610)..(610): "n" may be a, t, c, g, other or unknown
  misc_feature (640)..(640): "n" may be a, t, c, g, other or unknown
gtaaatttaaacagaaaattatttagcagtttccattttcaaatgtcctgcttagaaaaaaaagataattgagtccaggattattaaacatacaggacatcatttttgcaaaccagatgggatggtcatgataaataaatgcttactgctgtatttcactgcttgtctgtgcttctttggctataggctaaaaacatggaatgctctctcttgcctaaggacacaaaattgtgcagtaaacaagggttcaaataaacctttggtctgaacaatttgagcagatgcttatgtttggatttccaaacacctgccaattactttgaagtcaaatagacctcataacttccagtagggttaaatgtagtcaaggtagcattaaaaattaatgagtaagcctggataatatggtgaaactctgtatctacaaagagtacaaaacttagttgggcatggtggcatgcacccacagtaccagctacctgggatgctgaggtgggagggtcgcttgggcctgggaggtcgaggctgcagtaaaccacggtcacgctactgcactccagcctggcatgacagagtgggaccacgtctcaagcaaaacanaacaaaacanaacaaactaatgagttaataaatgaggtanagagaaacagattttggaaatgccgat

SEQ ID NO: 1052 - DNA, 654 bp, Homo sapiens
  misc_feature (582)..(582): "n" may be a, t, c, g, other or unknown
  misc_feature (630)..(630): "n" may be a, t, c, g, other or unknown
  misc_feature (649)..(649): "n" may be a, t, c, g, other or unknown
aagtgcggacgcccggctcccggcgtggacgccatggtgctgtgcccggtgattgggaagctgctgcacaagcgcgtggtgctggccagcgcctccccacgccgtcaggagatcctcagcaacgcgggtctcaggtttgaggtggtcccctccaagtttaaagagaagctggacaaagcctccttcgctactccgtatgggtacgccatggagaccgccaagcagaaggccctggaggtggccaaccggctgtaccagaaagacctgcgggcccccgacgtggtcattggagcggacacgatcgtgacagtcggggggctgattctggagaagccggtggacaagcaggacgcctacaggatgctgtcccggttgagtgggagagaacacagcgtgttcacaggtgtcgcgatcgtccactgctccagcaaagaccatcagctggacaccagggtctcggaattctacggggaaacgaaggtgaagttctcggagctgtccgaggagctgctctgggaatacgtccacagcggggagcccatggacaaagctggcggctacgggatccaggccctgggcggnatgctggtggagtccgtacacggggactttctgaacgtggtgggattnccgctgaaccactttttgnaagca

SEQ ID NO: 1053 - DNA, 903 bp, Homo sapiens
  misc_feature (692)..(692): "n" may be a, t, c, g, other or unknown
  misc_feature (759)..(759): "n" may be a, t, c, g, other or unknown
  misc_feature (778)..(778): "n" may be a, t, c, g, other or unknown
  misc_feature (872)..(872): "n" may be a, t, c, g, other or unknown
  misc_feature (896)..(896): "n" may be a, t, c, g, other or unknown
  misc_feature (902)..(902): "n" may be a, t, c, g, other or unknown
gggaaggcggaaggcttcggcagagctgcgccgccgaggctgagcggtcccttctcgctgcggccgcccaggtgcccgcgcccgtggcgctatggaggcggcgctgctggggctgtgtaactggagcacgctgggcgtgtgcgccgcgctgaagctgccgcagatctccgctgtgctagcggcgcgcagcgcgcggggcctcagccttccgagtttacttctggagctggcaggattcctggtgtttctgcggtaccagtgttactatgggtatccgccgctgacctacctggagtaccccatcctcatcgcgcaagatgtcatcctcctgctctgtatctttcattttaacgggaacgtgaagcaggccactccttacatcgctgtattggtgtcttcttggttcatccttgccctgcagaagtggatcatagacctggccatgaatctatgtactttcatcagcgcggccagtaagtttgcacagctccagtgtctgtggaagacgagagactcaggaactgtgagtgcgctgacttggagcctctcttcctatacctgtgcaacaagaataatcacaaccttaatgaccaccaatgattttacaattcttctacgttttgtgatcatgctggctttaaatatatgggtaacaagtgacagtacttcgctaccggaagaccgctataaangctgaatgatggatacattattccttccacagtggattttgagtaactgaaccaaaggaaaaagaanctctttgctaaattaaggncttttataaattaagtaaaatcaagtttataatctttaaagccaaaggtttttttaaaactttgaaagaaagaacccctttaaattcttggttnaaaaataccaatttggcttcttcnttcttna

SEQ ID NO: 1054 - DNA, 686 bp, Homo sapiens
  misc_feature (680)..(680): "n" may be a, t, c, g, other or unknown
  misc_feature (682)..(683): "n" may be a, t, c, g, other or unknown
gtgtgtgtgtgtgtgtgtgtaaatgggatcttgctgtgctgcccaggttggctggtcttgagttcaggtgatccacccacctcggcctctcaaagtgctgggattacaggtgtgagccaccattccgggccctaaaacagtttttttagctcgtcagctatcgttaatgttaatgtattttatgtgtggcccaagacaagacaattcttcttccaatgtggcccagggaagcccaaaggttggacacccctgaaaattacatatcttctccaacagagtgttttgttacaacagccagaagcctgatgaaagatttatactgcttgggacaagttttaatgattgttaatttttactttgaacaaatagtgaatgaaataatagatttgacattttttaagataacaagtgctaggaaatatgaagtgtgagtaaataaaaaggttcatatgttattagaactaatcattttgatgttatgcatagtgattactagaataattcccagagtttctttgacagagacgtcacattagtttaacttaccaaaacagacagaagaaatagaaaacttgagtagtcctattaaggaaataaaataattgaatcttttctacaaagaatattccagacctagatggcttcaatggtaaattctgtgaaacatttaagaaaaacanannaca

SEQ ID NO: 1055 - DNA, 680 bp, Homo sapiens
  misc_feature (611)..(611): "n" may be a, t, c, g, other or unknown
  misc_feature (674)..(674): "n" may be a, t, c, g, other or unknown
  misc_feature (676)..(676): "n" may be a, t, c, g, other or unknown
gttctgtgctttgaaagcttttatctatttcagatcataattttttaatggcagccctttctaggatgctttcggcagaaaaatgtactggcaaaatcgtctcctgaaaagatttacgatgagacacataaagtacattgagtagtatagttattcttaaactagtcataagagtattaactagcaataaataataaaaaataaaccagaggtaggagaaggtatggtgatttcaatgtgagttgcttttggatttatgatttcttggtttctgtgcctaaggaggcatggatggtattattttcttttcttttttttttgagacggagtctcgctgtgtcgcccaggctggagtgcagtggcgccatcttggctcactgcaacctctgcctcccggattcaagccgatttcttctgcctcagcctcccgagtagctgggactacaggtgcctgccaccacacccggctaattttttgtatttttagtagagacggggtttcaccgtgttagccaggatggtctcaatctccttacctcgtgatccgcccgcctcggcctcccaaagtgctgggattacaggcatgagccactatgcccggcctggatggnattattctttttcttcagttgctgctgaaatctaaaaaaacccggtttttcaagtccttatgngntccg

SEQ ID NO: 1056 - DNA, 805 bp, Homo sapiens
  misc_feature (534)..(534): "n" may be a, t, c, g, other or unknown
  misc_feature (612)..(612): "n" may be a, t, c, g, other or unknown
  misc_feature (625)..(625): "n" may be a, t, c, g, other or unknown
  misc_feature (670)..(670): "n" may be a, t, c, g, other or unknown
  misc_feature (724)..(724): "n" may be a, t, c, g, other or unknown
  misc_feature (730)..(730): "n" may be a, t, c, g, other or unknown
  misc_feature (799)..(799): "n" may be a, t, c, g, other or unknown
ggccttttttttttttttttttgtttttgagatggactctccctctgtcgtccaggctggagtgcagtggcgtgatctcagctcactgcaacctctgcttcctgggatcaagcgattctgccttagcctccccagtagctgggactacaggcatgcgccaccacactcggctaatttttgtatttttagtagagatggagtttcgccatgttgaccaggctggtctcaaactcctggcctcaagtgatctgcccacctcagcctcacaaagtggtaggattacaggcatgagcccaggagtttgacaccagcttgggcaacacggcaaaaccctgtctctacaaaaaatacaaaaattagtcgggtgtggtggtgtatgcctgtggtcagcgactcaggagactgaggtaggaggatcacttaagcccaggaggttgaggctacagtgagctatgattgcaccactgcactccagcctgggtgacataacaagaccctgtatgagaaaaaaaaaaaaaaagaatagaaaaaagntggcatgagaccccctcacatggcttctcgtgctttacagcagtgagctgcatggcctgcatggctggtggcactggntcccacttaaggnagcatcactggatcatgaggacagtgtgaacacccccacaaaggncttaagcctgccattcaccttctttccatctcttttctcaacctgcttcgcagnacctgnttggcttggttcccattgaaaatcaagcaggtagtcacatagatttcattaattaaccccaaaataagnatgact

SEQ ID NO: 1057 - DNA, 756 bp, Homo sapiens
  misc_feature (621)..(621): "n" may be a, t, c, g, other or unknown
  misc_feature (713)..(713): "n" may be a, t, c, g, other or unknown
  misc_feature (744)..(744): "n" may be a, t, c, g, other or unknown
  misc_feature (754)..(754): "n" may be a, t, c, g, other or unknown
tatgcataagaagcagcctcaaaactaacaaaaaagattcgcacattcctcagttagaggaggagcagagatgaagaaaaggagaagaaaagcgctggaaagagaagaaaaggaacctccttctgtgcagcaggctcctggcccagggagtgcggtgtgcggcagagtgcgtgcagggaagcagcctctgaaatcgtgcagggaagcaccctgtgaaatcgtgcagggaagcaccctgtgaaatcgtgcagggaagcaccctgtgaagtcgtgcagggaagcaccctctgaaatcgtgcagggaagcaccctctgaaatcgtgcagggaagcaccctgtgaaatcgtgcagggaagcaccctgtgaagtcgtgcagggaagcaccttctgaaatcgtgcagggaagcaccctctgaaattgtgcagggaagcaccctctgaaatgcctagaaatagctgccgggctttcacttggttcccaaatttcttcaaaggtcaaaaccatcacagtgggcaactttacaccccagtgttcactgtcctcaggccactgcagagccatcctagtggggcagtgggcgcggggcgggggcttctgacttcggtgaggtcaccctggangggagtcccaggaatcagcctgatgttcagaatgcctttctggcatctcagaatgtactgggggagactgaggacctttagcccagtgtcancgtcttattgcaggagacattaaagcccaanccagaacttnta

SEQ ID NO: 1058 - DNA, 834 bp, Homo sapiens
  misc_feature (668)..(668): "n" may be a, t, c, g, other or unknown
  misc_feature (805)..(806): "n" may be a, t, c, g, other or unknown
  misc_feature (825)..(825): "n" may be a, t, c, g, other or unknown
aaaaaatgatgaatatataaccagaaggagcccaggtactataaaagctaagtaacgaggaaacaaaaaaatgatgagtatataaccagaaggaacactcagtttgattcccatatcaggaagttcttgggttcagtgcaagacttgaaacctgacatggtttcattagattgtagaaaacgcttttttttttttttctggacaacagatggaaccatgttgtcggttgttcaaagatggacaggagacagaaatctatcaacctgaagtcagctccaactgcagctgtctgttctcctgaggactgtgctagtggtccacagaggtcaccttgcttatcacatgatattttcttgatgttagttgaagcacatcaccttaggtgacacatgagggccaaaggcctctttctcagggatgtatgtgaaagtgtggtgggttggggaccagctaaggaaaaaaagacatgaaggagaatgcaagcatcttacagtcatcattcagtaagaaatctttatgactggacaaaggaaaacataaacgccctttaacctagaatgcaaatttctagtgatttttacttttttagtgtatcagaagtcactgagcaaggtaagtaccagcacttacagagacggagtcataaaggctgctctctaaaagtagangatgtgcaaaacctgtagtaccatttaacagatttttgaccttggtaattatgtcattttgaaactggaataaatatgtaatccgaaggttgatttttctgaccaaaagtaagtcaaggtcaaagtttttttaaagnntactggttggattcttggngggttttca

SEQ ID NO: 1059 - DNA, 754 bp, Homo sapiens
  misc_feature (722)..(722): "n" may be a, t, c, g, other or unknown
  misc_feature (724)..(724): "n" may be a, t, c, g, other or unknown
  misc_feature (752)..(752): "n" may be a, t, c, g, other or unknown
acatattcatgaaaagattggaggagggaattaatttaatcttatttgggtttgggagagatgactggatttgagggtaggcaaatgggaggcagaggagctaaagaccagtggggtggcaagtgcaagctgaaccgagggtactgtggtgggagcagagagggctggataagaaagacatgacagggccgggcgcggtggctcacgcctgtaatcccagcacttggggaggccgagtggggtggatcacaaggtcaggagttcaagaccagcctggccaagatggtgaaaccccacctttttcaaatgatgtatctcaggggagaaaaaagagactccatgttttcaaagtttttgctttttattatttatttatttatttttgctttttaaaagcctctcaacaaactctccttattcccatgtgactgaggatgaaacagtctcagattaaacagacttctcaaggtcacgcattgtcagtgccaacattcaaaagaaggctaggtcaggttcttgaacatccttgtgaaattattcttcccttaagtctgggttaaattataaattatgatctgcatttaaattcccaaatttaaaacaaaccaaacaaaacaacgcacttcagactcttttggaaacctttgaaaggaacttgatttctgtgtgctttgaaagtatatattgcaatcaaggtattggtgggtaagtgtgtttttgangnttgtcacaaattaaccaaaattatatgnct

SEQ ID NO: 1060 - DNA, 760 bp, Homo sapiens
  misc_feature (613)..(613): "n" may be a, t, c, g, other or unknown
  misc_feature (685)..(685): "n" may be a, t, c, g, other or unknown
  misc_feature (740)..(740): "n" may be a, t, c, g, other or unknown
  misc_feature (746)..(746): "n" may be a, t, c, g, other or unknown
agaagcactccgggcgtgctgccggcggcggtaggtggcgcgcgggtccggcgggcggttggcttgagcgggaccggagctgaggcaggaagagccggcgccatggtggagaaggaggaggctggcggcggcattagcgaggaggaggcggcacagtatgaccggcagatccgcctgtggggactggaggcccagaaacggctgcgggcctctcgggtgcttcttgtcggcttgaaaggacttggggctgaaattgccaagaatctcatcttggcaggagtgaaaggactgaccatgctggatcacgaacaggtaactccagaagatcccggagctcagttcttgattcgtactgggtctgttggccgaaatagggctgaagcctctttggagcgagctcagaatctcaaccccatggtggatgtgaaggtggacactgaggatatggagaagaaaccagagtcatttttcactcaattcgatgctgtgtgtctgacttgctgctccagggatgtcatagttaaagttgaccagatctgtcacaaaaatagcatcaagttctttacaggagatgtttttggctaccatggatacacatttgccaatctagganagcatgagtttgtagaggagaaaactaaagttgccaaagttagccaaggagtagaagatgggcccgacaccnagagagccaaacttgattcttctgagacaacgatggtcaaaaaagaaagtggtcnttctgnccttgtttaaagaa

SEQ ID NO: 1061 - DNA, 786 bp, Homo sapiens
  misc_feature (693)..(693): "n" may be a, t, c, g, other or unknown
  misc_feature (704)..(704): "n" may be a, t, c, g, other or unknown
  misc_feature (752)..(752): "n" may be a, t, c, g, other or unknown
ctaagacccctaccacacacctcaaagtaacttgaaatacattatgctcccagtgtggttgtaatattatcatcttattatcaccaattcccttgcatggtggctttgctgagcagctgtttcacagacaagccaatttcttttaagtattgctctatcagactctgaaaccagttctaccagaagggttcttggtaatgaatgttaatgagcagacaagtatcctttctctgacagaggctcactaatcctttgagtaagtatgggtgaattacaggagaaattttatttaagttaaattgatctgctactaagtagagaaaacttattttcttattttaatgaaaatcaagaaaaaatatttaatggggatgtaaattacagctccctggaaacatttttgtcttctgactggagaacacagtagctcagtagactggttcaactgcatagtgtgcttaacactagcaaactcatgatctccagtgaggcctgatcttcagtgggacagtgggaaatggagtagaaaccactcactctctctgggatttggtaccagcagattctttatgttccttagtgataagtaatagggataaaaaattattctttcttcttccactgagccagtgtaagagttcctttttttttccaaaacaaataagatagtaaagccataagaacagcacttgnatgctttttgnattctaagaatatgagaaaaataattcaggggaacctttatctgaaanggatataaccatgtcctggatggaatactgcgaa

SEQ ID NO: 1062 - DNA, 702 bp, Homo sapiens
  misc_feature (644)..(644): "n" may be a, t, c, g, other or unknown
  misc_feature (667)..(667): "n" may be a, t, c, g, other or unknown
  misc_feature (700)..(700): "n" may be a, t, c, g, other or unknown
tgtcgacgccgctgccaccgcctgcctgagagaagtcgtcgcggccgaccccgtcgcctccgccggctaccatgtccgcccaggcgcagatgcgggccctgctggaccagctcatgggcacggctcgggacggagacgaaaccagacaaagggtcaagtttacagatgaccgtgtctgcaagagtcaccttctggactgctgcccccatgacatcctggctgggacgcgcatggatttaggagaatgtaccaaaatccacgacttggccctccgagcagattatgagattgcaagtaaagaaagagacctgttttttgaattagatgcaatggatcacttggagtcctttattgctgaatgtgatcggagaactgagctcgccaagaagcggctggcagaaacacaggaggaaatcagtgcggaagtttctgcaaaggcagaaaaagtacatgagttaaatgaagaaataggaaaactccttgctaaagccgaacagctaggggctgaaggtaatgtggatgaatcccagaagattcttatggaagtggaaaaagttcgtgcgaagaaaaaagaagctgaggaagaatacagaaattccatgcctgcatccagttttcagcagcaaaagctgcgtgtctgcgangtctgtcagcctaccttggtctncatgacaatgaccgtcgcctgcagaccactttngg

SEQ ID NO: 1063 - DNA, 781 bp, Homo sapiens
  misc_feature (703)..(703): "n" may be a, t, c, g, other or unknown
  misc_feature (740)..(740): "n" may be a, t, c, g, other or unknown
  misc_feature (746)..(746): "n" may be a, t, c, g, other or unknown
taaaataaatagggctttagttcttaagtaattctataggattttaccctgaaatccagggtgttcagatttcaaaaaggataatttatcagtattttctcatccagtcaaacttcagctgacattgatacaggtcaaaatgcgtagatgctttttggtgttggaaataagtgtctgtcttatggtcatcattgtcttcttagatttttggataggggggccaggtagggggagactcagaaataaaagcgttccccagataacttcaatctggaaagaattttttgtatagagtccatctctccctcaagactgaccacaggtttcatgagaaggtccctgaaaacatcacatttctctgaagaaccatcaacttgtcttttcttgaaccacaggaatggttctacagaccctactataattcttcacatttcagaacccatgtttaatggagggaagagagaaatgcatgggaaaagaacacctccttttctcctttctcttaaattcaaagacgtttgctttggaatgccctcacttctccctattcacaggcttctaaaatcattaatttactcaaggcacatgtgccttctttgccccaaatgcatcactttccttttagttatggctgattttgggtgtgtgtgtgtaagacatgcagtcaacaacgagatgaaggccattgcatagatctcatgcngatagtgatggattcagaaagtagggtccagtggcgncactancttcttgtaagccagtatacactggctatttgggg

SEQ ID NO: 1064 - DNA, 767 bp, Homo sapiens
  misc_feature (724)..(724): "n" may be a, t, c, g, other or unknown
  misc_feature (746)..(746): "n" may be a, t, c, g, other or unknown
  misc_feature (766)..(766): "n" may be a, t, c, g, other or unknown
ggcctttttttttttttttttttcggagatggggttttgctatgttgcccaggctggtcttgaactcccgggctcaagcagtcctccagtcccagtctcttgagtagctgagattacaggtacgcaccaccatgcccagcttgtgtggggtttcccttgaagatcagtctcaaggttgctgcttgaccggtgagcagcaggattcagacctagatgtgtctgactctgggatcctttcacctaaccctgacgctttcccagcaagcctggatgacctggcttccctccaccctgtgcccatgccctgccccttttccatcttggagtttctgaagccccagtgggctgtccactctgtgcttctttgggtcacttatgatgccagcctccctcccggcccacccgccaatcccaggccactgctaataggggtgtctttggcaggggaacaaagagcgttttggggctgccaggtggctgctctgagtgctccagtgttggccagagtggcttggcttccagaaacttcttgctgcctccttgcaggaggaggtcctggccatgctaggactgtgagctgctccccctgaacccctggcaggagccagacgctgctgtgctgccacgctggctcttcagcccctggacggacgccttggctggccccagggcaggctcctcccaagcggctggattctcttctcttcggggaagcacaaggcanaaggttgccaatttaaaatggnttccttattaaaactctcgnt

SEQ ID NO: 1065 - DNA, 735 bp, Homo sapiens
  misc_feature (639)..(639): "n" may be a, t, c, g, other or unknown
  misc_feature (685)..(685): "n" may be a, t, c, g, other or unknown
  misc_feature (697)..(697): "n" may be a, t, c, g, other or unknown
cattgttgagtattcttcactggagctggaccaccttagtcttaggagttgaagaacttagaggattaaaaggattccagttcacagctacactcctagatttagagagactgcgctttgtgggtacctgttgtctgaggttattgcgtgtctatacctgtgaaatttacccagtgtcagctacaggaaaagcagttgtagaagaaactagcaaattagcagagtgtgttggaaaaaccagaactttgttaagaaaaattttatcagaaggagttgatcactgcatggtgaaattggataatgatcctcaaggatatctcagtcaacccttgagtcttctagaagctgtccttcaggaatgtcataatactttcactgcctgctttcattctttctacccaactcctgccttacagtgggcttgcctttgtgatctgctgaattgtttggatcaggatatccaagaagcaaacttcaagacatcaagtagccgactccttgcagctgttatgtcagctctgtgtcacacgtctgttaagctgacttccatcttcccgattgcgtatgacgggagaagtattactacgatcaattgttaaacaagttagtacagagaacgactcaacactagttcatcgntttccccttttggtggcacatatggaaaaactcagccagagtgaanagaatatctcanggatgacaagcttccgtgaagtctggagaaaatgctgg

SEQ ID NO: 1066 - DNA, 722 bp, Homo sapiens
  misc_feature (611)..(611): "n" may be a, t, c, g, other or unknown
  misc_feature (682)..(682): "n" may be a, t, c, g, other or unknown
  misc_feature (695)..(695): "n" may be a, t, c, g, other or unknown
  misc_feature (711)..(711): "n" may be a, t, c, g, other or unknown
agaaaaaaagaaataaattcgagtcctttcattgtgtttctctcctaaagagtcatttcaataaatttgtattgaatatcttttgtatgccagacacttgtgggtgctttgtgtaatacaaacatgatcactttaaatgagtgtgaagtactgttctgggcaggtgaagggtaaaaggagagcatccctctcaaaatgatggaaataggatgataggtttgggggagagcagggatctccagagggagagaatgatgaataggtaggttggattcatgttgtggatgcccttaaataccaactgagcaaggttactatatatatatacaattaaaggatacctaagaagaagcctgaagacttgagatatagactgggctttatcataattagctgtgttacccttaggtaagtgattttacctctcttgacctcagctgcactactcaaacacacacataaacacaaatgagacgggaaatgagctgggtgtctgtttccttacagctctaaattctgttattccccttaattcagttttaatagaagtgggaaatcattcattgaaggtttctgagcatgggagttctcttcaacagaattactgctgnttcactacctggttgctctatttattaatgctctttcttcccccttatgtgattgctctgggagggactgnctctttatttggntttttggttttttganatggagtctgc

SEQ ID NO: 1067 - DNA, 782 bp, Homo sapiens
  misc_feature (612)..(612): "n" may be a, t, c, g, other or unknown
  misc_feature (670)..(670): "n" may be a, t, c, g, other or unknown
  misc_feature (753)..(753): "n" may be a, t, c, g, other or unknown
  misc_feature (771)..(771): "n" may be a, t, c, g, other or unknown
  misc_feature (782)..(782): "n" may be a, t, c, g, other or unknown
ctgtagtcggacacactcccagctggcccagtttgtgcatgaggtgaagaagagcccctttggcaaggatgttcggctggtctcccttggctcccggcaggtaaacagtagccagtatttccaccaggggccatcctgctcctttcgccacaactttgtcctgctcgtccaggccttgggagacgctgggtctgtgacaggctgaaccgtgtgaggagcagccccctccctgacctggccggcccagcactggaaggcaaaggagaggtggcggggcaggtccacatgtgttggtaggatgtcatttagctggcaccatctttttgcctctttctttctcctttgctgcagaacctttgtgtaaatgaagacgtgaaaagcctaggttctgtgcagcttatcaacgaccgctgcgtggacatgcagagaagcaggcacggtagccactgggaccgtggtgtagccgcaggtggtctggagagagtgaggcaggggtggcagtgactgaagaccattaagtgtctttcatagaaagaatggcagaggagaccccagttcctttctgagtcccctctccttgggaaaaagtgttcctactctctgggtcagtgnctggtccgaatcttggcttggagatgattttacgggctctttctggagaacagaagtnaaaccttacagtggtccgatgagaccacagtaggcaagtactttgggaagggcttatagaccccaccccacggaatggggctnaacatttcacaaaccccnttttgggcccn

SEQ ID NO: 1068 - DNA, 800 bp, Homo sapiens
  misc_feature (741)..(741): "n" may be a, t, c, g, other or unknown
  misc_feature (752)..(752): "n" may be a, t, c, g, other or unknown
  misc_feature (782)..(782): "n" may be a, t, c, g, other or unknown
atggagcgctctgggcccagcgaagtgacaggctcagacgcgtcgggaccggacccgcagcttgcggtcaccatgggcttcacggggttcggtaaaaaagctcgcacatttgacttggaagcaatgtttgaacaaactcgaaggacagctgtggaaagaagtcgcaaaacactggaagcaagagaaaaagaggaagaaatgaacagagagaaagaattaagaagacaaaatgaagatattgagccaacatcctcaagatcaaatgtggtcagagattgctccaaatcatcttccagggatacgagcagcagtgaaagtgaacagagttctgactcttctgatgatgagttaattggccctcctttaccccctaaaatggtaggaaaaccagttaattttatggaggaagatatcctcggtcctttacctccacctcttaatgaagaagaagaagaagcagaggaagaagaagaggaagaggaggaagaggaaaatcctgttcacaagattcctgactcgcatgagataacgctgaagcatggcactaaaacagtgtctgctttgggtctggatccctcaggtgcccgtttggtgacaggaggatatgactatgatgttaagttttgggattttgctggaatggatgcttcttttaaggcatttcgatcccttcagcccttgtgagtgccatcagatcaagtcattacagtatagtaacacaggagacatgattcttggtgnatctggaactntcaaggccaaggtgattggccagagatggntttgaagtaatggaatgt

SEQ ID NO: 1069 - DNA, 826 bp, Homo sapiens
  misc_feature (659)..(659): "n" may be a, t, c, g, other or unknown
  misc_feature (704)..(704): "n" may be a, t, c, g, other or unknown
  misc_feature (747)..(747): "n" may be a, t, c, g, other or unknown
  misc_feature (818)..(818): "n" may be a, t, c, g, other or unknown
  misc_feature (825)..(825): "n" may be a, t, c, g, other or unknown
tcaaatgagaaaattgcaagtagtgtgacagagctgattgattttgttgctttcttgattttttttttcaaaatgggtttactaaaatgtagatgacttaactgcctcctccttcgtctgaaaaatgccaatattcaatcatcatgcagcattataacaagccttataagtcctaaagcattaagttgcacttttttgaggaggggtagtgcagtatttctctggccagtatgaatgaagtttatacttaccatatttgatagaaacatagatcaagctatggcacagcgactcatcagatagctagctttgacgtctgggcacaattgaaccaacttccatcgtgaatctttataatgattgactttggtgtatagtgcagtaaacaaatagtgctcctagttaagtatttgtcagcatccttttgtctctaacttgtttctatttttacagccacacaattcttggcatgtattaagaaaaaaaaaaatccctgttcaagtagtttttccacctatcagcactgagtaaatgccataaatccattgaaatggtctaaatgttccatctgttctcctgttttgccagttatatagtaatgaaatacatttgtaaattttatgcaacaaatggcaaacgtatcattattttgaaattgngtatgtaaaagttatatttttacatgtagactcttggtattatgnggtttaatacattggatcagttttggttttttttaaaaactgngggttaaaaagaagtctcatttaaatgaaatacctccagaatcagaatttatggtcattctgaaaatgtangaaccant

SEQ ID NO: 1070 - DNA, 749 bp, Homo sapiens
  misc_feature (683)..(683): "n" may be a, t, c, g, other or unknown
  misc_feature (742)..(742): "n" may be a, t, c, g, other or unknown
  misc_feature (749)..(749): "n" may be a, t, c, g, other or unknown
ttttttgtggatttggttgtaagttgttaaaagttctctacgttttggatggattgccttaattgtatttatacaaatgagtttggtttatattacgctacttatttagaaggacactctgctcacaaattatactagtttggtagtttcataaactagcttgaatcaaaataaaatggtgctaaaatggatgttattttcaactgtgcactcagtaattgcaaatagttgtactatatacctgggggtgaacacaaaggaagtagttgcatcatctctgtataaaacacagatttatctttcgtgtagttgtgcattacgtagaatatggtaaggcaacatctgagttgtagaagtgctactggagtaacagaggtgaggaatcggttctgctcaagggagaggactggagaagagacctagaggggagagtggaccttgaagaactgattggatttctcctgttggggaatgtgaatcataaagctgaggtagggggaacaagtatgaggctggcaagtagtcggtttggcaggagcacagagtgcctgcagggagggccatgggagatcaagctgggaatgtagaaaggaattttaacttgataaattttgactaggtaacaggttcttttatcaaggagtgacattttatgtcacaaaaatttttaaacccatttctgnctcttggaaaacccaaagggagcagtggcatgtgaaaaattcttggtttaaaagattcnaaccatn

SEQ ID NO: 1071 - DNA, 777 bp, Homo sapiens
  misc_feature (758)..(758): "n" may be a, t, c, g, other or unknown
  misc_feature (764)..(764): "n" may be a, t, c, g, other or unknown
  misc_feature (775)..(775): "n" may be a, t, c, g, other or unknown
gtttttgccactgaaagtaatggcaagaccgcaattacttttgcaccaacataaatatttttgatctagtaaggcagaaccttctaacagccttgtttatagatggggtggcctcttaagtaaggtggtgagtgctgtattagttcagcagaggttacctatgtacttttgggggacagatatcatatagggaattcatgtcagtgaccaaacgaagtgaccattacagcccttttgaaacctgaggtgtaatttttaaaaatgaactcatgactttaatagtcatagactcaaacctgagttgattattatgaattagtttatgggagtctcaatatgtgaatatgatggagacaagttttggaatacagataaatcaagtcactgtattcactctctctctctttgaatagccttatctttgcctatacacacaaacagtgcagccatcaaaattttcaatttacaaaatgttcacagtcatgcttcttccttgactaaacactggggttgctgccagtggtaattggcttgaaaccagctaatttttatatatctatttagtctggatattctagatgagtggcactatagttgcgggctctagtcactgtgccagagcaccagggaggagagtgcttgctaccactgacagctgtgtgtcatttagcaaattattaacatctctttggtaacatgtgacctcaaagaagtcacctaatttctctgagcccagcttctcatctgggtaaaaatgnctcttnctattttttangg

SEQ ID NO: 1072 - DNA, 696 bp, Homo sapiens
  misc_feature (502)..(502): "n" may be a, t, c, g, other or unknown
  misc_feature (619)..(619): "n" may be a, t, c, g, other or unknown
  misc_feature (672)..(672): "n" may be a, t, c, g, other or unknown
  misc_feature (694)..(694): "n" may be a, t, c, g, other or unknown
ctttttgatttgaggatgtgccgtgaacggaagccaaatactaatagacaggacatcctgtgattcccttagtttacgatggccgaggatgtatgggtttttttgtttgtttgtttcttttttttgataagatgattacttggtttttttcctgttaacaagggagcctagatgatgatgtccatttggcttttaggactcttaactagcaaacaactaagcccctgcaaaatcacatgaagacattggaaaatctttttatgtaaggcagagatgatttggtcatagttcgcaatgaagtgaccgtcagttctattggcttgaaataataatgaaccaaagaggggaaatgaccgaagtcgaagttcttgaaattaaggatgttaaaataaaattctgaaatctagtatactgtggtatacctatacggttaagtattatacaaatattacatgtgaagaaaatatgaaaaaagttcacaaatgtaccaatgttaacagangcaagatgattattacaaacgtttatatggattatattagttttccagggctcccataacaaattaccacaaaccgggcggcttcaaattgatcctctcacagttgtgatgccggangctagaagtctaaaaccaaggtgttagtaaggccatgctcccttcaacagctntggggagacccttccttggctntt

SEQ ID NO: 1073 - DNA, 777 bp, Homo sapiens
  misc_feature (614)..(614): "n" may be a, t, c, g, other or unknown
  misc_feature (714)..(714): "n" may be a, t, c, g, other or unknown
  misc_feature (736)..(736): "n" may be a, t, c, g, other or unknown
  misc_feature (746)..(746): "n" may be a, t, c, g, other or unknown
cctctgggctgccatttgcagggaatttcatgtacatattcagacatgcagacttgcacaactgcttattatagaaatattctttgttactaagtgtctaacagacttaaacatacagggtttccgtatatggagaaaagtgattccacccactccatgccctggcacgtcatgatgccagcccttagatttatttggcttccagaatttaaatagacagtgatgtaaatcagaagttagtgtttcacctactggcactaagtaactaaatcatcacattggtgatgaggaaggtaaatccttttcagtttggctacagaatggaaataacatttattacaatatgatctaagttatattgacaacagaatgatttatttctatgttataaaagatgaagaaggagaggagaatacagagaagttaaatggtttggcagtgatcacacaacaagccgaaagtagaatccaagtctctctggagtcccttctctgatcaaagtttcatcttattgaatgtcacagcattataaagtgagataaatgtatctcaccacacatgtgcttagtgaattattctcagtagatagcttcttctatttttaaacattttgntctgagattttaaaatttcaattctattctcttatggtttaaaaccgggtcacagatttgagctaaaatgggaatcgaagaagtgactttggcatttttncatgactattcttggattgacnttaactgggnttacactgttccaggaaggcacttggtttgc

SEQ ID NO: 1074 - DNA, 709 bp, Homo sapiens
  misc_feature (637)..(637): "n" may be a, t, c, g, other or unknown
  misc_feature (695)..(696): "n" may be a, t, c, g, other or unknown
aatgcgaagggagtgatgtccagagtgatttttgcaacagtgacccttgcccaacccatggtaactggagtccttggagtggctggagaacatgcagccggacgtgtaacggagggcagatgcggcggtaccgcacatgtgataaccctcctccctccaatgggggaagagcttgtgggggaccagactcccagatccagaggtgcaacactgacatgtgtcctgtggatggaagttggggaagctggcatagttggagccagtgctctgcctcctgtggaggaggtgaaaagactcggaagcggctgtgcgaccatcctgtgccagttaaaggtggccgtccctgtcccggagacactactcaggtgaccaggtgcaatgtacaagcatgtccaggtgggccccagcgagccagaggaagtgttattggaaatattaatgatgttgaatttggaattgctttccttaatgccacaataactgatagccctaactctgatactagaataatacgtgccaaaattaccaatgtacctcgtagtcttggttcagcaatgagaaagatagtttctattctaaatcccatttattggacaacagcaaaggaaataggagaacagtcaatggctttaccctnccaatgcagtcttcaaaagagaaactcaagtggaatttgcaactggagaaatcttgcnnatgaatcatattg

SEQ ID NO: 1075 - DNA, 838 bp, Homo sapiens
  misc_feature (678)..(678): "n" may be a, t, c, g, other or unknown
  misc_feature (725)..(725): "n" may be a, t, c, g, other or unknown
  misc_feature (774)..(774): "n" may be a, t, c, g, other or unknown
  misc_feature (784)..(784): "n" may be a, t, c, g, other or unknown
  misc_feature (826)..(826): "n" may be a, t, c, g, other or unknown
ggcctttttttttttttttttgacatatgttggttcaacttgtatatactattttgtaaactgtttttcccaattaacaatatacacagatgtcttcattttacacacccctctcctacacaccctcagacaaaaggcaaacctattcaagtttttgatttttgaaaatgtttcaatcagggaagctctgggtacatttcatgaagagaagtgatgaagatatccctctgacataacagaaagtggctgtttagctaggaaaatcatcaaataagtaagtagaaatgcatgcagaaacagaatgagtcaatcccaattaatgtttctgtgtttcctaaaagaaaataaacaccgcacatttgtctttagacagcttagtgtgcaccatggttccagtgtttttgctggaagtgtaaagttgttagcacaggcatatttctcagttagcagaaaacagctgctactggaattagtacccagaaatgaagttatttcctcccatcatcttactgaattgctctgctttacaaacaagaagtgaacattaattacttggaaaataggcctgacccagccaggatgaggctgacgcgtggaaagaggtaaaaataaaatgacaaagctctcttcacttcctatgctagtgtctgaaaacagagctgctcagaccattatggncatttcaaagttttcattcaataaatagttttttagacacctactgngccctacagggacatatatttttggcatacaatcaataactacaaccgnggtaagaaantaaggacctgctgaaccttacccctgcaaaaggacttatcgnccgaatttaaca

SEQ ID NO: 1076 - DNA, 798 bp, Homo sapiens
  misc_feature (584)..(584): "n" may be a, t, c, g, other or unknown
  misc_feature (718)..(718): "n" may be a, t, c, g, other or unknown
  misc_feature (720)..(720): "n" may be a, t, c, g, other or unknown
  misc_feature (790)..(790): "n" may be a, t, c, g, other or unknown
acaaggcaggatgtgtgcgtgggaggaagattgacagtgactgagcctggacgggggagaccaggtatgaggtctgaagcacctggaacagaaaggacaggacagatgtgggcacactgcacgtgtagaatcaaaggactgacagcaggtcgaatgtgaggaatgagggagggaaagaatcaggactcaagtgccatcctggctgcctcaaaaaatgatactgtcttccagagggaaaggaaagataacaatagttactgctttgtggcgtacatgtgatgaatttcattttggacattccagtaggatatccaagtggaaatgcccagtaagccttagacataaggatctggatctcaagagaaaaattgaggttgaaccataatatgtctttcccctcgaatcatgtaggtttctcttttgccttctttcattggcctaagtggtcctaaatgctactgctgatgctgtcttagtttgcgactgttgtttgcaccccaccttttcccaaaggtaatctgtagacttgcatggattgggttaaggtggttaacctgcagctttgctgttcaaagcttggcttnccactaccagtttgccaacttaatgagtacttcaacttgagtcaaattagtattggtccaaatatcctaatagtatcctctatgtgtgactctaggtcttacaaaatcaaggtgtcctttctcattgagacttncntattaataaaatatttcttctattaaattcaacctggcaccaagcattataggtaattaggccccccccnatgactgg

SEQ ID NO: 1077 - DNA, 776 bp, Homo sapiens
  misc_feature (540)..(540): "n" may be a, t, c, g, other or unknown
  misc_feature (565)..(565): "n" may be a, t, c, g, other or unknown
  misc_feature (700)..(700): "n" may be a, t, c, g, other or unknown
  misc_feature (708)..(708): "n" may be a, t, c, g, other or unknown
  misc_feature (720)..(720): "n" may be a, t, c, g, other or unknown
agtttcccgtgggtgtgttcacagaacactgggcccctttccatagttcacagacgtggacaatgagcagatgaggctttctccctctggtcctgaagtagcatcatttcatctgaaatggccacaagcaattttggtttatttttcataacagaatcaaagacatcaccaaaaactccatcccacttcttgcaggggaggaatttgttattttcccttggatcctgttgaacacatgtggcatcctgcctgaacccctcccgcagctgccatgcgatccagagctccatccacttgcccacctaagtggaaagggccttcgagggccatcagtttgcagacgacactgtgcattcctttttctctttcggacgctggctccacaatccgggctccaggaggtggaatcgctgttcacttactgccccctagtggtccgcatttctgaaagttctttatccctgtttcctttgagatttttctccgtagatttataggtgtttaggatggggttagtaatgtggccaaggaggtggttgntttctcaagggtgagacctcgtctncgatctccgtctcttggagctagcattcccctctatccacagacaccacgtctgtcgcatttttattttctgcaatcatttcttctcttggtagcttggagaagagtcatccttggtgatgagacaatcagtatnaaccaganggtctcatttangggcaattttgctccccttcccaaggacattggacaatgtctgggtctggagacat

SEQ ID NO: 1078 - DNA, 740 bp, Homo sapiens
  misc_feature (677)..(677): "n" may be a, t, c, g, other or unknown
  misc_feature (699)..(699): "n" may be a, t, c, g, other or unknown
  misc_feature (728)..(728): "n" may be a, t, c, g, other or unknown
cttttcccggagccgcacccaggtcccccaccatcatgcaccccttacccaggcctctgaggggccaggcaccccccaccactcccctacagcaggagagcttagggaggctgagagcttggacagccgggagagggggccggatctctggatctccccagcctccagatctcagtgtggctctctctggagacaaaagctaagactcaacccacaggcaacactcaacacagagatccagctcagaaaaaaaggagctgaccagggaggaatggagaggccaagacacataatgaagactaagaaaaggaagaaagatgatgctggggctggagccaaagggagaggaagaggaaaggaaggaaagccaggggcagagacctggcagggcagcgtgagcccaacaaccacggggtgggggtggggcgcgcatcaagatttctaacaagcgcagctgaaaacacccagggccgttctctgaggccttctctctgcctaccagccctcaccagtgcttcgaagagccctgaggaacgtctctctatttgaagtcagagccgagtgcctgctctcggcacctggggctccatgcttaccaggatggtgggtacttgaccttcatttgctgtgggactgtcagggattccagggacccactggtccccgaactggctcanagatgcaagccacttttacctnctacacatctataatccccaccccatggnttgacaaatatt

SEQ ID NO: 1079 - DNA, 807 bp, Homo sapiens
  misc_feature (766)..(766): "n" may be a, t, c, g, other or unknown
  misc_feature (791)..(791): "n" may be a, t, c, g, other or unknown
  misc_feature (805)..(805): "n" may be a, t, c, g, other or unknown
agtcagatggtaagcaaagatgcaaataaaaatatcagcttctgataagtgcagtggagaaaaataaacaagaaaaaaaatgctactgtgttcatttcttagtatgtgccaaaaaatgatctcattgaatccccaagataatcctaggaattatgtcctattcctatcatccccatttacagatgaagaaagtgaggcacagagaggctagggtggttgctgaaggtcacacagccaggaagttacagagtcagggctggaactcaggacagcctgaaaccacagccctcgttcatattcagtaaaacccggcagtgaacccccagcagtgttcacatccctggcacatactgggcacatatcaatttggaacccagtggaatgactgaattgtgtctctgcccacaatacgagtgccataattttcctcatgcgaaatggcaggtgtgttaacctcttgcaacatcatcagggctggaggaggacttcagactgagctgggacatggggagagcctctgtccccaggttgttttctgctgggcaactcccctccagagttcagttctgctggcacatgcctaagtgattagctggctctgagcctgagcatggcatagctcaccagggtgggctctcacagcttccaggaaccagcaaatagcccggtggaggaaagcactgattccctattcgcctttttctggcattatcagcaccagtgggcttttcaaaagatgagttgatataagcatcctgtcagaaanggttccggcctaataaatggaatgnccctttcccttttnta

SEQ ID NO: 1080 - DNA, 716 bp, Homo sapiens
  misc_feature (655)..(655): "n" may be a, t, c, g, other or unknown
  misc_feature (661)..(661): "n" may be a, t, c, g, other or unknown
  misc_feature (711)..(711): "n" may be a, t, c, g, other or unknown
ggccttttttttttttttttttgagatgggggttcccactctgttgccctggctggagtgcagtggcgctgatcacggctcactgcagcctcgtctgcccaagctctagagattctcctacctcagtctcctgagtagctgggaccacaggcatgcaccaccatgtccagctaattggttaactttttctttgcagaaatggggtcttactgtgttgcctaagctgatctcaaactcctaacctcaagtgatcctcccaccttggccctgcaaaattctgggattacaaacatgagccattgtgcccagctgagggctggtttctagaaatggtggtatgccaggcttcatactggggtcatgcatgtggactgggctcattggcctgattgctctagcaatatgtggggtagggagaatcatgccccctctctcctcctcttcgaaaaatgtccacatcccaatccctggaagctgtgaatatgttcagttatatggcagttgggaattaaggttgcgagtcagctgtccttgagatggggagattatcctggactatccaggtgggacttttgtaatcgcaaaggtcctcggaagtgaagaaggaagtcaggagagtcagtgtcagagtgatgccgtgggacacagtctttanggctgntgctgccttgaagatcaggaaggggccgtgagccaaggaatgcaggtggnctcta

SEQ ID NO: 1081 - DNA, 734 bp, Homo sapiens
  misc_feature (651)..(651): "n" may be a, t, c, g, other or unknown
  misc_feature (713)..(713): "n" may be a, t, c, g, other or unknown
  misc_feature (729)..(729): "n" may be a, t, c, g, other or unknown
catgatcttaatttaaaatgaactgttggatctctctttcataaattaagtgcaaaactctactttctgcctttcttcttgtgaccagagtaccagttgactcatctcagttataatttgtttaacaggtttcatttgcttttcccccttaatacatgaatccttttatgtgtttaacagttatttgtttcagagggtctgcattgcataatgccatgagcagccaaggttttcacgtaatgattttttatgaaccatgcaaagacagctcaagttatgtaaatctcagtgaactctctagcgacaagagtcccaatccttaggcttcatcatggagctgcttctctctcaatgtatttgaattattggtctagccaacctcttcttttccccttgctgcagtattttaggaggaaggaacaggctaaatcctagctagacgtgcgcatgcattctggtatttaagagccaataaaatatagccaggaatcaccttgtctcctgtaccatacttggatttgtagttcagatcttcaatgtagtgcttaaaagaaacacacactggggttttcatggtgaagtccagggcaagggcatagaaagaccacttgaccctggatggaacaacatgtggaaacccttcttgccctnctttttatcttctttactttttttactatggccagggttggaaatgtgggtggatgatgggntttacttctttgaaanggtaa

SEQ ID NO: 1082 - DNA, 767 bp, Homo sapiens
  misc_feature (643)..(643): "n" may be a, t, c, g, other or unknown
  misc_feature (707)..(707): "n" may be a, t, c, g, other or unknown
  misc_feature (734)..(734): "n" may be a, t, c, g, other or unknown
  misc_feature (766)..(766): "n" may be a, t, c, g, other or unknown
ccagtcagggacagccagacttgtaaactgcacctgcttccacagtcttagtgccccgtctaaaaggaacaggcgctgaagcactcatcttgccgattttatttcaaacgtccaggagatggcagcaaactctccttccctctcagtgcttcacaggcagccattctaatgctcgttgcattacaatttgctttgaatattctttttttaaaaaagacaaaagactaaagggggtcttgagacgtgatttttatctgaccccctgcttctaatcaagaatgagtataaatatttctagggatagaatagaatgatacaattttattatctagaaaagagattggatttccttggctattttttcttatctctggggaaaaagattgtatgacttcccttggctgttgggccctagactctgttatctccaaatccaaaatattcttactaataactagcttaaatctatctggcagtaatctaaacattcttattttgggatctaggctaatggaaaattttgaagcactttgaatgcttattagctttttaaaatgaaaataaatacgattataaaattttcaaaagaaaaaggaagttcatgcactttgtgcatcatagggaaagagcccaatatttttgnttaactttaacattaatcttggcaaatagagtagtatgtcaacaaaatgcaaaatcagtcagangctgcttatatgttacaagagtgtccngacaaagaaacaggcagacccacttggtgacng

SEQ ID NO: 1083 - DNA, 693 bp, Homo sapiens
  misc_feature (659)..(659): "n" may be a, t, c, g, other or unknown
  misc_feature (690)..(691): "n" may be a, t, c, g, other or unknown
ggcctttttttttttttttttaaggcatggacaagctgaatctaaaatgtttatgacaaataatctataacagccaaataactttgaaagaacaaagttgaaagatttaaatcatatgacttcaacatttattataaagttatagtaatcaagacatgtagtaatgccaactaagatagacaaatcagagagtccagaaatagaaccacacatctatgataaatggtcaactgatttttcataaagtgaaaatgcagctcaggagaaaaagaatagttttttaaacagtgctggaccactggatacccataaacaaaaccaaaaattttaaaaactcattttggctgagtgcaatgccttatgccctgtaatcccagcactctggggaggcagaggtgggaggactgcttgaggccaggagtttgagacctgcctggtcaacatagtgaaaccccatctctacaaaagaaaaaaattagtcaggcacggttgcatgtgcctgtagtcccagctacttgggagcctgaggccaaccatcacttaagcccagcagtttggggctgcagtgagctatgatcccatcactgcactccagccttggtgacagagtgagaccccgtgtcaaaaaaaaaaaaaaaaattttgagcattctccaagncttcgccttttctgggtttaatttaaaaccnncc

SEQ ID NO: 1084 - DNA, 746 bp, Homo sapiens
  misc_feature (651)..(651): "n" may be a, t, c, g, other or unknown
  misc_feature (673)..(673): "n" may be a, t, c, g, other or unknown
  misc_feature (728)..(728): "n" may be a, t, c, g, other or unknown
cagtcaggtaaccaattatccgagtaggaaggttgccttagttgaagtaactggaggtgaatggggatttgtcaggcaggctcttccagataaaggtgaaccttccctgttgttttgataggaggaggaaatggaatgaccatcaagagaaaggtagttgctggcttgagaggatcatctgtgcaacaggcagctaagcagaagaagactttatatatatttttaataccacccacactgttgctagtattccccaccactccattggcctggtgaactcttattcatccttcaaaacccagcttaaccatggccttcaggaaatcttgagctggcttcccaggacagagtgggtcagtcctctgcatgctcctgctgctgtgctgtactcaccatactgtactgtaatttactggtttgtaagtcatttccactgctgggttgtgagctcctccaaggcaggggctttgccttatctgcctatgttcccaggacttacacagtgcctgatgtgtagtaggtaccccatgaatgttttacataattagcaggagcgtatcaggtaaattagcaaagcaaactgtgggatgtgggatgtcagacaataggagtaggtgggcttatgggagctgaagaacacatgctcctcanctctgattgattgctctgtgcnataggggcccagtggtggtggatctaacactttttaagaaaatctgacaattcanactttactggtgaatatt

SEQ ID NO: 1085 - DNA, 853 bp, Homo sapiens
  misc_feature (638)..(638): "n" may be a, t, c, g, other or unknown
  misc_feature (655)..(655): "n" may be a, t, c, g, other or unknown
  misc_feature (790)..(790): "n" may be a, t, c, g, other or unknown
  misc_feature (829)..(829): "n" may be a, t, c, g, other or unknown
  misc_feature (843)..(843): "n" may be a, t, c, g, other or unknown
ctgtctctggatttgccttctctgaacattttttttttaacttttttttctgggggcagggcaggttgggttaggatggctgccctctggacctgcccctgaacatttataaatgaaataatatagtatgtgttgcctttcgtggtggcctctctcacttggcataatatttttaatgtccatccatgtggtaacatgtatcagtacttcattctgctttatggctaaataatattccattttgtgggtacaaatttaatctatttttttttttttgagatggagtctcactctgttgcccaggctggagtgcggtggcatgatctcggcttactgcaagctccgcctcctgggttcatgccattctcctggctcagcctcctgagtagctgggactacaggcgcccgccaccatgcttggctaattttttgtatttttagtagagacggggtttcaccatgttagccaggatggtcttgatctcttgaccttgtgatccgcctgcctctgcctcccaaagtgctgggattacaggtgtgagccaccgtgcccggcccaaatttaatctatttatcaattgatggacatttgggtttccactcttttggctattatagataatgctgcaatgaactgntgtatgaaaatttttgngtggtcacatgttttcctttttctttggtatattgctgagttataaactgatttccatttatattccaaccacagtcctgaagatcaaattctcccatctttgcaagattggcatggcttttttctattaaagcncctattaattatggaatttgtacatgactacaccacagntataatctgctgangaactaccaa

SEQ ID NO: 1086 - DNA, 701 bp, Homo sapiens
  misc_feature (479)..(479): "n" may be a, t, c, g, other or unknown
  misc_feature (667)..(667): "n" may be a, t, c, g, other or unknown
  misc_feature (669)..(669): "n" may be a, t, c, g, other or unknown
  misc_feature (700)..(700): "n" may be a, t, c, g, other or unknown
caactcagttttattagtgttttaggtctttccaatctaattggtgaaagtgatactttaatctacatttttgaatactgatgatgtacttcatttcataaacgtttggctgtaaaatttcctctatattcattccagagattaagatattttcaaatcattaaactggggctgttatcttaggttgttctggagatactaattacatgtcaggtagtatcagttgcattggttattttatttagaaattattttttttttaactttaagttccgggatacatgtgcagaatgtgcaggtttgttacataggtatacatgtgccatggtggtttgctgcaccaaccaacctgtcatctaggttttaagccccatgtgcattaggtatttgtcctaatgctcttcttccccttgtctcccaccccctgacagctcccagtttgtgatgttccccttcctgtgtccatgtgttctcattgntcaactcctacttatgagagagaacatgcggtgcttggttttctgttcctgtgttagtttgctgaggatgatggcttccagcttagaaaggaagttttgttgaagagcaaatgtttccgtaagtgctggcaatcctgaaggactctttcaagaatcatttggacagaattttcctgaatatgaaagcngnatttaatggcattgacagctaaaggcttcang

SEQ ID NO: 1087 - DNA, 596 bp, Homo sapiens
  misc_feature (15)..(15): "n" may be a, t, c, g, other or unknown
  misc_feature (573)..(573): "n" may be a, t, c, g, other or unknown
  misc_feature (587)..(587): "n" may be a, t, c, g, other or unknown
  misc_feature (593)..(593): "n" may be a, t, c, g, other or unknown
gcaataaggtaacanggtgtgcccacctctcagggctgctatgaggacaactgaggccacacacctggctctcaataagtgagtggtgctctgtgagcttctggcgagtaaggggcaccctactcattgcggccgggggcctcccccagcaaacgggtggaaagaggcctgagccccatccccagtttctgcccctgctatctccacccaggatccaccagaagatatgaagcaggaccgggacattcaggcagtggcgacctccctcctgccactgacagaagccaacctacgcatgtttcaacgtgcccaggacgaccttatccctgctgtggaccggcagtttgcctgctcctcctgcgaccacgtctggtggcgccgcgtgccccagcggaaggagatgtgaccgactgcagaggccgcgccgcctcccccgtccgaggtctgcgcgctccgccgcagggtgcagacccggggcgcccgcctgggtttggggcgcaagagcagaggcggagccagggcggagccagcgcgccgggtcccccctgaatcgaaagcgaaacaggggccggngaggaaaggcggancccggnccc

SEQ ID NO: 1088 - DNA, 762 bp, Homo sapiens
  misc_feature (674)..(674): "n" may be a, t, c, g, other or unknown
  misc_feature (713)..(713): "n" may be a, t, c, g, other or unknown
  misc_feature (742)..(742): "n" may be a, t, c, g, other or unknown
ttctagagtgtagtggcgtctctactattactgccacatcattaggtgtgaataactcaagtcatagaagaaaaaatgggccttctacattagaaagcagcagatttccagcgagaaaaagaggaaatctatcttccttagaacagatttatggtttagaaaattcaaaagaatatctgtctgaaaatgaaccatgggtggataaatataaaccagaaactcagcatgaacttgctgtgcataaaaagaaaattgaagaagtcgaaacctggttaaaagctcaagttttagaaaggcaaccaaaacagggtggatctattttattaataacaggtcctcctggatgtggaaagacaacgaccttaaaaatactatcaaaggagcatggtattcaagtacaagagtggattaatccagttttaccagacttccaaaaagatgatttcaaggggatgtttaatactgaatcaagcttccatatgtttccctatcagtctcagatagcagttttcaaagagtttctactaagagcgacaaagtataacaagttacaaatgcttggagatgatctgagaactgataagaagataattctggttgaagatttacctaaccagttttatcgggattctcatactttacatgaagttctaaggaagtatgtgaggattggncgatgtcctcttatatttataatctcggacagtcttcantggagataataatcaaagggtattggttncccaagaaattcaggaaaag

SEQ ID NO: 1089 - DNA, 752 bp, Homo sapiens
  misc_feature (679)..(679): "n" may be a, t, c, g, other or unknown
  misc_feature (692)..(692): "n" may be a, t, c, g, other or unknown
  misc_feature (740)..(740): "n" may be a, t, c, g, other or unknown
caagaagatgtgaaaatagtattgtccaaactcaagaaaaaaaaagacaaaattatctcagtggaagactgaattccaaggtgaacaacaggacaatagactcaactgaaaatgtaataagggacattaaggagggaaataaaaagccaagagaataaaaataaatattagaaaaggttaaaaagtatctcaaaggaactgttagatatagaagataatgaacaaaaatccaatatgtatatgtacacgatatgtatatgtatgtataactgaaaacccaaaagaagataaacaaaacaatggaacagaattaacacttaaataagaaaactttccaaaaattaaagcagacctttacctttgtatttataggacctacttttgattcagattggtcaactctaagacatattttagtaaaactattgtattctaagaaaatttcttctaaacttctggcaaaaaaaaagccaagtcttttacaaggtaaagaaagtcaagtttgcagctgtttttcaggtattgaggttatactgaaatcgttttcagcatgcagaactcagggaatattataaccccaagcccattctgaggaattaattagagaaagctcttcatcaaagcaagagatgatcaatttaagacaaaaacaaagcaagggacaagggtagaatagtgnatgtgtgtatcangctcagtccaatgaaagagaggaaccaccccagtaatttggaaccttngaaaggttaaat

SEQ ID NO: 1090 - DNA, 671 bp, Homo sapiens
  misc_feature (621)..(621): "n" may be a, t, c, g, other or unknown
  misc_feature (632)..(632): "n" may be a, t, c, g, other or unknown
  misc_feature (634)..(634): "n" may be a, t, c, g, other or unknown
catgtgtcacatggcaagagagagggaacaagagatggagaagtaggagtgccacacttttaaataaccagattttggtgaattcagaacaaaaactcattcattactttgaagagagccccaatccattcatgagggatctgcctccatgacccaaacacctcctaccaggccccatctccaccatgggggaatcacatttcaatatgaggtttggagggacaagcatccaaagtatgttatcacccatcatcttgtttttcataatttttttttcccataagtaacactggtacttttttcatataggatttccgggaaaaaaatacagatcatatgcgcccagacattgtagctcttctgagaagcagcaagaatgcatttatctctgggatgattggaattgatcctgtagctgttttccgatgggcaattctccgagcttttttcagagccatggttgctttcagggaagctgggaaaagaaacattcacagaaaaactggacatgatgatacagcgccatgtgcaattttgaaaagtatggatagttttagctttctccaacacccagtccaccagaggagcttagagattctgcagagatgcaaggaagagaantacagtaaggntnccaatctggtaaactggtattaccattttccttttgg

SEQ ID NO: 1091 - DNA, 769 bp, Homo sapiens
  misc_feature (718)..(718): "n" may be a, t, c, g, other or unknown
  misc_feature (737)..(737): "n" may be a, t, c, g, other or unknown
  misc_feature (760)..(760): "n" may be a, t, c, g, other or unknown
ggcctttttttttttttttttcacttttcgctaaagtcacattccggcagcaattttatgctgtcaaaatgttctcaacaaggggagatttgactggcttctctgagaaccagtcataggaagcttgggctctgcttcttattgagttcttttttaaaattttgctgggggtccggggaaagaaggaaaaaaagcaacaacaataacgagaaacaagtcacccaggcatcttgtggagggtggctgctcttttcaggccggcggccagtccccgggcgtacagcgtgcggtgcaacctgcagctgcgggacgggtgcattcacgaggggggtgtgtgcgcctgggggtcacccctgctgtctctctgggtaggggtgcaggtgaagctcacatgtgccactctgtgagtgtcaccgcgagggaaaccctcccaggggcccgggcccagggtggccacggtgaggaggaggaggaccacatgcgcagggaagggcatggggcacagcatgtgtgtggcccacacaagggcggtctgctctcactcccctcgctgctctgtaattaagctcggctgcgcccactcaggcttccagacctttccctgagccctccgccccccgggcccactccccgttctcccagccttgctggctacttccactccccaaagagccttcaggggccttcttggcgtgatcaaaacaacagggccaccagnttctcaagagtccaagctntagtttggcccaaatgtcccggncccgggggg

SEQ ID NO: 1092 - DNA, 721 bp, Homo sapiens
  misc_feature (682)..(682): "n" may be a, t, c, g, other or unknown
  misc_feature (693)..(693): "n" may be a, t, c, g, other or unknown
  misc_feature (704)..(704): "n" may be a, t, c, g, other or unknown
tgtttcacggcagcctgaccaacatggtgaaacttcgtctctactaaaaaatacaaaaaaacgaccaggcgcagtggctcatgcctgtaatcccagcactttgggaggccgaggtgagcggatcacgaggtcaggagatggagaccatcctggctaatatggtgaaaccccatctctactaaaaatacaaaaaattacctggcgtggtggcgggcgcctgtagtcccagctactcaggaggctgaggcaggagaattgttgaacccgggaggcggaggttgcagtgagccgagatcgtgccactgcactccagcctggtgacagagcgagactacgtctcaaacaacaacaaaaacaacaacaaaatacaaaaaaattagccggacgtggtggcggatgcctgtaatcccagctactcaggaggctgagacaggaaaatcacttgagtctgggaggcggaggttgaagtgagccaagatcatgccattgcactatagcctcggtgacaagagcaaaactctgtctcagaaaaaaaaaaaaagaaaagcaaagaaaaaaaaggcacaatatgtaatgctatttgctaaagtcagcctctttatgggtcttttgttgacttcttctttagtggctccacttcttagaagttaatgagcaattcctgctatagcagcagagcctntaccaaagcanggggacttcanggaaccactggttgtca

SEQ ID NO: 1093 - DNA, 753 bp, Homo sapiens
  misc_feature (681)..(681): "n" may be a, t, c, g, other or unknown
  misc_feature (724)..(724): "n" may be a, t, c, g, other or unknown
  misc_feature (743)..(743): "n" may be a, t, c, g, other or unknown
tttaaagatgtggctaactagctagtgatgcatgaacaattgttttagaaacctaccattgtggtcctgttggtatctaggaagttttttcatttgttggtggcaactgagtgatctgttatgtctacttttcctctctccctgtcccctcccccatcttcttctctctcttttctttctccctttttttcagtcaaggtagacttgagataggggacttgcatggctatagtagatcataatacatgaggccccccaaataagagagtgaaacattgtctgggatgtattttctgctcgaactcatcgtcatttttctgtgtatttcttacattagcccccagaaaagcatttttcaaagactttgagaaccaaaggttctctctgtaaggaaatgtgttaacctgatttccttgttctcatgtaattttctctcttaaagccataataatagtgtcagaggcagctttctagttagtgtgagtaatgtggttactgtattttctatttttattttaatgtgcttttcctgctgtggattttttttttctttcttgattttaaaaacagcagttgagtaaatgtggttatttgaagactggcgtatattgcatcttctctgagatgcaattttgaaggaaggctctgtgcacaataggcattttttttcagattccttantaggataaatagggagaatgttttggaacacagatcaagtggncaatattgggttaatgggncatgggaagg

SEQ ID NO: 1094 - DNA, 694 bp, Homo sapiens
  misc_feature (422)..(422): "n" may be a, t, c, g, other or unknown
  misc_feature (630)..(630): "n" may be a, t, c, g, other or unknown
  misc_feature (666)..(666): "n" may be a, t, c, g, other or unknown
  misc_feature (682)..(682): "n" may be a, t, c, g, other or unknown
ggcctttttttttttttttttttttagctgagagcagtagctcacacctgtaatcagccctttaggaggctgaggcaggtggattgcttgatcccaggagtttgagactagcctgggctacatggcaaaaccccatctccactaaaaatacaaaaattagccaagcttgatggtggtctatagtcccatcctctttggaggctgcagtgggaggattgcttgagcccaggaggtgaaggctgcagtgagctgagatcacaccactgcactccagcctgggtgacagagcgagaatctgtctcaaaaaaaaaaaaaaaaagtaattttttaatattaggaattagagtgtggtggtcatcagttcatggctgacagaaacagcacttcctgctctttgcaatttagttcttataatggacaantcttgtttcaaatgctgcctccttggtattctgtgtacaatggaaatgggggttggattagatgctctctaaagatggtctgagctctaaaagttttcttcctggacagcagcagtttccctggataaaggacctttttcctgagcatgtggctctgtctcagaagcagcccctctccctggttccccagtagagcttccaggctcanatgaatagggccactggctttgctctacatagaggncctaaataatttaagnggcttaaaagcc

SEQ ID NO: 1095 - DNA, 854 bp, Homo sapiens
  misc_feature (627)..(627): "n" may be a, t, c, g, other or unknown
  misc_feature (780)..(780): "n" may be a, t, c, g, other or unknown
  misc_feature (787)..(787): "n" may be a, t, c, g, other or unknown
  misc_feature (803)..(803): "n" may be a, t, c, g, other or unknown
catgtctggagaccattttcaacctgaatttatctctgatgccagtccccaagatgagccattggttgcttattctttggggtcacccaagatggcagcactgaaggccacatggctggggttttctataccttgggattacatgttatacaaaacagctgactgacaatgcagaatgagggaagggacacctccaaattccttcagcctcccaaagtgctgggattacaggcatgacccaccgctcccggccttgttttccgtttaaagtcgtcttcttttaatgtaatcattttgaacatgtgtgaaagttgatcatacgaattggatcaatcttgaaatactcaaccaaaagacagtcgagaagccagggggagaaagaactcagggcacaaaatattggtccgagaatggaattctctgtaagcctagttgctgaaatttcctgctgtaaccagaagccagttttatctaacggctactgaaacacccactgtgttttgctcactccctcactcaccgatcaaaacctgctacctccccaagactttactagtgccgataaactttctcaaagagcaaccagtatcacttccctgtttataaaacctctaaccatctctttgntctttgaacatgctgaaaaccacctggtctgcatgtatgcccgaatttgtaattcttttctctcaaatgaaaatttaattttagggattcatttctatattttcacatatgtagtattattatttccttatatgtgtaaggtgaatttatggnatttgantggtccagaaaatatntttttaaagctttcattttttccccagtggatgattaaaatttttatgtaa

SEQ ID NO: 1096 - DNA, 791 bp, Homo sapiens
  misc_feature (774)..(774): "n" may be a, t, c, g, other or unknown
  misc_feature (776)..(776): "n" may be a, t, c, g, other or unknown
  misc_feature (778)..(778): "n" may be a, t, c, g, other or unknown
atgatgtgattaatcttacttgtgttaccatagacattttcctgacaaatgctccagcggaagaagcacataaccaatcagcagttgaaacttccccccttttgatgtagaggtccctttacaacacataatctcagtgtttctatgtgtagaacaaacttcttaatttctatataagcagttagataggccccagaggtccatgtgtgctccttttttttccctaaggctaaaagtgtgaggcagccatttgttgcatactattccttcaatattttagtgaaagcacacttcatacccaatctttattatcactatcagcctgtcagtaatcaaatatatagctactaaatgaagagttgtaactacttagtattaacaccataagaaaggaaaacaatattgatgtctgacatgtttaaggatgcttaacagggaaaattaaggagactggcccattaattatgggataaaataataataatcaaacatcttaactagtttatcaagtcacacttacaagcctcttactaatttactcctgtactgaaatgaacatacggtaaaattcaagagaaactgaggttcaaaataaattttacttctgagcttggaatacaagagagtaacagactgctgtcctaattataatacctttttgacacattggtatagtccttgccacctctgaataaactgccatttctacgtaattggtggtcattcttatcaatcctttttgaagtagatgagaaatttttaaaaattgggaanananggaagtgtggctg

SEQ ID NO: 1097 - DNA, 747 bp, Homo sapiens
  misc_feature (711)..(711): "n" may be a, t, c, g, other or unknown
  misc_feature (729)..(729): "n" may be a, t, c, g, other or unknown
  misc_feature (743)..(743): "n" may be a, t, c, g, other or unknown
cggatttctcctcttagaccactcattcaaactctgatgtccctcctggtttagggaagattacttggtaccaaaagttggctttggatcacatgtcttggtaaatagtgataagaaatgaatttgattttccttttcttggaaaccactacttttaaaagggctcggcctttccctttgaagaatttcgggcaccctcagcacttcctgtgcacctgagcgggaggaatggagtgaggtgactctgtttgaaggatgacagagttaaggaaaagcagaagccacagttgattgaagtgattttccagaatttcatctgcaaagtcaccattcctggatgtgcttggaagatggatcttccgtgtgaatttaggctgagcttggaggagtataaatcaagggcttaaggttttattatattctcaaagcacaggatttctgcatgggtgtgcagtgaagttcatccttcccagtgagcaccctcgttcaccttttgtcctctgggccccacttgtgtttacagtacatgtttgtaaaacagagagtgacctctaacaccaagtctagtaagaggcagtgccactgtgtatgttacacagtgtgaggcaaaaggaggagtagcgcgcgcacagaaacgccgtattcaagccttggcagcacaccacggcagtaaagctagcggacccgtccctggggtgcctttaaacccgnctgcattcacacttgcgnctttattggcttgnggca

SEQ ID NO: 1098 - DNA, 825 bp, Homo sapiens
  misc_feature (765)..(765): "n" may be a, t, c, g, other or unknown
  misc_feature (798)..(798): "n" may be a, t, c, g, other or unknown
  misc_feature (808)..(808): "n" may be a, t, c, g, other or unknown
gaaagtttgtcaatttgttttcactataaggcatcaatggcagaaactacatatgagtaattttcaaaatagaccattgcttaaatgtttaaatgaagctaaaacaagtatgaacccattggttagagtgcagtggcttctttcaggcagacagcagatgctctcagatttggtggtgagttttggccttggcatggttggcatggagtcagcacaggaagccgggaggtatgaaggggcatccacctgggtgaaactgtcttgccaagccaaagccccgaggcctgccctgaagcagctgtagtggaggagaggcctgggattccttagagtcacctttttacgaatgtaccgccactctgttagctcacaaggaaaataaggaaaagccaggcctcccacctcttgactcttgtgagagtgaagacaacatggggcatttagaaaatatatttttagtgtatgataatgtgggctggcccacacagcaatgagcccaaagaccccctcgctttgggaattattcatggccctgctcatcacagcctctgatatgcatgactgtaacctaggctgagccaagaatggagctcatgccagaaatggtcctaagcatgcacatggccccctggaatatcaaaatcctggggagaaagaaatcatctttgccttggcagtgaagctggaatggcacatatctatctggtgccacatcttctgcctagtggagaaccctggaaggcaacagacacttgagcaagcacnaggaaggaaaatgtcctggaaaggcagggactnttacccaagnccctacattcccagact

SEQ ID NO: 1099 - DNA, 758 bp, Homo sapiens
  misc_feature (590)..(590): "n" may be a, t, c, g, other or unknown
  misc_feature (610)..(610): "n" may be a, t, c, g, other or unknown
  misc_feature (681)..(681): "n" may be a, t, c, g, other or unknown
  misc_feature (710)..(710): "n" may be a, t, c, g, other or unknown
  misc_feature (758)..(758): "n" may be a, t, c, g, other or unknown
atgatctttatttcaagcttttatagccctttcaagttgctctaggggacttagcaaaacaggtagacagtaagtatggatcaactgagcacaggaaagaatgggatttgggaagatcacattgtttggattttctgctgatactaaagctggatttttactacacaggcagggagaaattactgtcctgtggtggacctggtgagagaggtggcatatgactaagcaagtcagctgacctcaattaaagggctgtgaccaactgtacaatgggaccagtacctcctccaactgttggtctcagctgagtgagattcccatgtctgaggaggtgatcaggggtgatgatgacttttgatggaactgacctcacacaggtttctgggggaaaaaacccaccaaactttattttaagaattctaaaacaattttacaattctgatttgagtagaagtttgatttgaaaagggacttcatctgcaccttctctcttgcctttgtttatagatgtcagtaatgcccgtattttaaaaagttgaaatgagttataaattatatcttaaggattttagtttgttttgaagaattgnttaattggctaggatttctncccccttcagtagcttcagatcccaatggctaggcaatatggagataatagtaaacaggattttgtaaganatggtatttatttatttatttttaaatanagataaggctttgctatgttgcccagccggcttgactcctgggttcan

SEQ ID NO: 1100 - DNA, 551 bp, Homo sapiens
  misc_feature (479)..(479): "n" may be a, t, c, g, other or unknown
  misc_feature (507)..(507): "n" may be a, t, c, g, other or unknown
  misc_feature (539)..(539): "n" may be a, t, c, g, other or unknown
ggcctttttttttttttttttttgacagttacagcaaatatttattgagcatttgccatattccaggaacatggtattttgcatataataatgtatttaatcttcacacctatcctatgaggtaggtaccattattattcccattttgcaggtgaggaaactgagacacagaacggtcaagtaacttgcccaaagtcacaagcttgcaagtggcagaactgggatttgaaccctacactcttaaccaatgctaccctcccttccaagaaaaataggaaaaggacatgaacagatgaggaaatgcaaatgcattttaaactcacagtaagatacccaatctcacaaaacatattgtatttcagtgatttgaagctatacgtttttactttttttttgttttttttttgagacagagtctcgctgtgtcgcccaggctggagttcagtggcgcgatctcagttcactgcaacctccgcctnctgggttcaagcaattctcccgcctcancctcccaagtagctgggattacaggcacccgncaccacacccag

SEQ ID NO: 1101 - DNA, 833 bp, Homo sapiens
  misc_feature (824)..(824): "n" may be a, t, c, g, other or unknown
  misc_feature (830)..(831): "n" may be a, t, c, g, other or unknown
aaaaaaaaaaaaagtgatcaggcaaagaactgaaaggagagagaatgaggaaaacaaaaactattataagtttcaaggtatgaaaagactttataatcaaggtcttctaaccagatattcctaattagatttttttaattttccatatctttaagaaatatttttcagtttgtgacaggaaatagaccctttagcttggaccaaggctactaggcactggccaagcataaaaggcatagctctactctgctccatttagcttgtttctttatccttggctctgtcatttatcacaatttggaattgtcaacatgagcctgaacactaaaaaaaattctgctaacaaaggcactgtgttttccatgcctgagtcaacccactgccctttcctaaatgccaaagatggggaaatgggatggaatttcctggattactacttgtacttaaacctgagtaagttttgaatttggaagacacattccagccagagagggtggattttggacccatgttcgagtgtatcagccacccagattggttttatttaagaaacagataaacaaaatatcttaaagtatctgttatttctagccagaagtaacttccgtatggtttaattaatagacctgccttggctcatcttgacttacagagctggggttctatattctagccctgttctccccagttaacagtcctcagaggaagaaacgagtccataaggcagaatttaaaagctgtgtacaaatttaacatttttacccatggcaagacatctagagtaactggaattaattgactggctttgcttttggccaaggcangacacnntt

SEQ ID NO: 1102 - DNA, 771 bp, Homo sapiens
  misc_feature (641)..(641): "n" may be a, t, c, g, other or unknown
  misc_feature (728)..(728): "n" may be a, t, c, g, other or unknown
  misc_feature (741)..(741): "n" may be a, t, c, g, other or unknown
  misc_feature (760)..(760): "n" may be a, t, c, g, other or unknown
taaaaaaaaaaaccttgtggcaaatcactttgcaaagcagacttactttataaatatgttgcccttttgttttaaagccagattttaaagtacggcttgaaaataggttatatttcagaagttagtttagatgaggtatttggaacttggaaagaattttacaggtaagtatcagtaattcgtcttatgggtaaactgtgcatccatctagaattagtatgttttaaaagaagaatcatgaaaataaaaattaaagttttcagtgaagtagaaaaggtaattcagacgattagaattatccttaagatttcaagtaatatataggtaatgagaaatgaaactgtttgaaaaataaatagaaatgataggaattttgaattatcagaagttgggagtacttttacatttcctgcttaataaaatgggcctgagttacacaaaatatttcagcttagtcaaatttttgctaggttgggaattataatctctgtaaatggggcctttgtgtcagcaagagcttaagacgtaaaagctcctctgttccttgtaataaccgagcggggcaggttctggccttacctccattttacacctgaggaaactgaggcacagaggtccagaccttggcaaggtcatgctgntcctgagctcgggtttgaagccagctgttggagtcccaggtgtgtgctcccacgctcttactggcaccttcactcttaatgggtganggatggaaaatanggctccagtgctggatgantaagcctgata

SEQ ID NO: 1103 - DNA, 768 bp, Homo sapiens
  misc_feature (741)..(741): "n" may be a, t, c, g, other or unknown
  misc_feature (757)..(757): "n" may be a, t, c, g, other or unknown
  misc_feature (765)..(765): "n" may be a, t, c, g, other or unknown
taagtatatgaaaagatgctcatatgtcatcagggaattacaaatttaaaacaatgacataccactacacacctattagatgggcccaaacccaaaagattgacaacattaaatactggcataaatatggagcaacaggaactctcattcattgatggtgggaatgcaaaatagtatagccactttggaagacagtttggcagtttcctaccaaagcaaacatacttttaccatgtgatccagccatcatgctccttggcatttacgtaaatgaaatgaaatcttatgtctacacaaaaacctgtacatagatatttacagcagatttattcataactgccaaaatttggaagcaaccaagatgctcttcagtaggtgaatggataaactgtgggtcatccagacaatggatattattcatcactaaaaagaaatgagctatcaaggcataaaaagacctaccagaaacttaaattgcatattattaagtgcaagaagcctatatgaaaagataacatactatatgatttcaactagataacattttagaaaaggcaaaactatggagacagtaaaaagatcactggttgccaggggtcagtgtggagggaaggatgaataggtagagcacaggggatattttgggcagtgaaactattccttatgatactacaatcatagatgcatgtcattatcatttgcccaaacccacagaatgcccaacaccaaggaatgaacccntaatggggaacctatnggaaattnggg

SEQ ID NO: 1104 - DNA, 333 bp, Homo sapiens
  misc_feature (323)..(323): "n" may be a, t, c, g, other or unknown
  misc_feature (326)..(326): "n" may be a, t, c, g, other or unknown
  misc_feature (333)..(333): "n" may be a, t, c, g, other or unknown
cgctttaaacattttatcttctttacgtaaggaccaaccttctggttgagttagttgcaagacaaaacaaacaaaaacaaaaacaaaaaaaacacaaaacattgtccagaagtataaaagagtgaaagacaagagaaagagaggagtaacaaaacctggttatttaatataatagccagggtattctaaatggtatagtttgtcataccaactgatattccaagccaattgggtgatgccagtggtggggggcggtggggggagggcgtgtggagggggaagcgagaggtgggcatactgagtgcttaagaaacgtacagaanaanaataagn

SEQ ID NO: 1105 - DNA, 745 bp, Homo sapiens
  misc_feature (732)..(732): "n" may be a, t, c, g, other or unknown
  misc_feature (735)..(735): "n" may be a, t, c, g, other or unknown
  misc_feature (740)..(740): "n" may be a, t, c, g, other or unknown
tgcttccatagcccagttagtgtattattcaaagtccacatttatataagactagccctggtttatttgtcatttttgtgaattttaagatagcataggcccaaagtagaacctgtatacatacagtaatcccaactatatattttatgtacctcatccatgctctatgtagagaatgaataaatgcataatatatcagtaactcattttcttctcatccagcttagttgtcgctgaatattggagacacttttggttacagtttaagtgaaacttgccagcttcatcctaaaatgcatgtactgaatggatttaacatttattagctttttccatgtttatttttctgcctaacagaatataatagggatggagggaagccataagtaaagtgttgcccttgctgtgtacttgccaggaggttggaagtaaatttcagattatcagcagttaaagtggggtctcctcccctgaagaatgaaatatcctgttgtagttctttgaaagtgccatagtagctggtgtttattttatgagggaaaaagaaaattttgaaaaaaattttttttcttaacagggcagatcaagcataagctgccctgctgagcaatcattttatgattaggagtccctaaaaggtccatagagccaactataagtcatttggttgaaactggagtaacaggtttccataggagctgattgtagccaaaccatttgatgatatttggntgnagatngagaa

SEQ ID NO: 1106 - DNA, 800 bp, Homo sapiens
  misc_feature (760)..(760): "n" may be a, t, c, g, other or unknown
  misc_feature (767)..(767): "n" may be a, t, c, g, other or unknown
  misc_feature (772)..(772): "n" may be a, t, c, g, other or unknown
acaatagacactaggggctactagtagggggagaatagaaggaggctgaaggttgaaaaactgcctattgggaactatgctcactacctgggggacagaatcatttgtacaccacctctcagtgacatgccgtttacccatgtaacaaacctacacaatgtaccctctgaatctaaaataaaatttttaaaaaagaaaagatgtatttaattcgtcttcaaatttggtatgtaacttgtatgaaagaaattttaatccaagcagattttgtaatgagataatgaagaaattaaaactacaggtgacactgtgctgttgctctctgacccagtggaagtctacatatgtgtgaaaatgaatacaccttctctctccaggttgcaatggttcagttcactgatgatcccagaacagaatttaaactaaatgcttacaaaaccaaagagactcttcttgatgcaattaaacacatttcatacaaaggaggaaatacaaaaacaggtatgaccaaaagaagcccagctaaggctcaaagtaattcattatttgtaactactgaaatgaccttttattttaaggcatagtaattttttaaagattttttttttcattaatttaagaactttgttcccaccctttcttctccagaaaaacaaaaatgggagggagtgaaatcaaactggtgcctttctttggttcaggaaaagcaattaaagtatgttcgagatccttggtcactgcagaagtcaggtacaagaangggcatnccaanggtatcgggggtatactgatggaagatc

SEQ ID NO: 1107 - DNA, 749 bp, Homo sapiens
  misc_feature (604)..(604): "n" may be a, t, c, g, other or unknown
  misc_feature (659)..(659): "n" may be a, t, c, g, other or unknown
  misc_feature (687)..(687): "n" may be a, t, c, g, other or unknown
  misc_feature (730)..(730): "n" may be a, t, c, g, other or unknown
tcactgacatgagcagagtgctgaaatatttgagtgtctggcacacatgtacgttctcagctgagttccaacaaggtggtgctctgccttcttgcttctgctctcatactgaaaacgtgtcctttttgtggctaatagtaccatgtttttcacacttttatgttttttattggtgattttgctatttaaaatgcccctcaagcattgtgctgatctgctgtctatgtttctcaatgctaggcagttgtgttgtgctttacaggaaaaatacatgtgttaaataagttttgttcaggcctgggctgtagtgctgttggctgtgacttcaatgttagtgaatcaacaatatttattaaataaggagtcttgaaacagaaacacacataaaacaagcttatgtattgattggttgacaaaaatgttgtagccagaggttcacaggaacctaatcctgtatttcccctaggagcaatagttcagtatttgctacttcactgtgtgtggcaactttatggaacataatcactacaaataatgagaatggactgtatcctgaatggtatttattatatttggttatataactttgtagttatataattgngaatagtatctggttttatgctatattttctaatttgggtttaactgatgtgcanagtattggtttggtatgctgatgtatgnccactctgcatttactactggggaccatgacaagttgtagttnctaaattgcatacaaatgc

SEQ ID NO: 1108 - DNA, 432 bp, Homo sapiens
  misc_feature (406)..(406): "n" may be a, t, c, g, other or unknown
  misc_feature (414)..(414): "n" may be a, t, c, g, other or unknown
  misc_feature (424)..(424): "n" may be a, t, c, g, other or unknown
agctgcagatgggacacagggcatcaagtccctagactgcacacagtgtgggaggccctgggcctggccaacaaaaccattgttttctcctgaccctttgggcctgtaatggttggggctgctgtgaagatctctcacatgcccttgagacattttctggggagaaattcaagctagctgcagaaattagcataagtaatgaggagctgaatgttaatccccaaaacaatggggaaaatgtctccagggcatgtcagaggtcttgacagcagcccttcccatcacaggcccagaggcctaggaggaaaagatgatttcatgggccaggccctgggctctcctgctctgtgcagactgcagacttggtatcctgcattccagaagctccagccatgcctaaaagaanccaaggtncagcttgggntttggctt

SEQ ID NO: 1109 - DNA, 667 bp, Homo sapiens
  misc_feature (623)..(623): "n" may be a, t, c, g, other or unknown
  misc_feature (645)..(645): "n" may be a, t, c, g, other or unknown
  misc_feature (667)..(667): "n" may be a, t, c, g, other or unknown
ccacctctccagccactcatctctgcccagctgctgccctccccaggaggcctccatggcttcacctacctccaccaacccagcgcatgcccactttgagagcttcctgcaggcccagctgtgccaggacgtgctgagcagcttccaggagctgtgtggggccctggggctggaacccggtggggggctgccccagtaccacaagatcaaggaccagctcaactactggagcgccaagtcactgtggaccaagctggacaagcgagcaggccagcctgtctaccagcagggccgggcctgcaccagcaccaagtgcctggtggtgggtgctggaccttgcgggctgcgggtcgctgtggagctggcgctgctgggggcccgagtggtgctggtggaaaagcgcaccaagttctctcgccacaacgtgctccacctctggcccttcaccatccacgacctgcgggcactcggtgctaagaagttctacgggcgcttctgcaccggcaccctggaccacatcagcatcaggcagctccagctgcttctgctgaaggtagcattgctgctgggggtggaaattcactggggtgtcactttcactggcttcagccccttctaggaangggaatggctggcgtgcccagnttcaacccaaccccctggccan

SEQ ID NO: 1110 - DNA, 778 bp, Homo sapiens
  misc_feature (648)..(648): "n" may be a, t, c, g, other or unknown
  misc_feature (724)..(724): "n" may be a, t, c, g, other or unknown
  misc_feature (753)..(753): "n" may be a, t, c, g, other or unknown
  misc_feature (776)..(776): "n" may be a, t, c, g, other or unknown
tatatgacctcggatcaaatgtgttagactttttgcctttgagcactggtttaagtttctctgccttgtgggtttgtgaggaagcacataaaggatgtaagggaatagaggatcccatctctacagataatcatctggcctcatgcaaccagcatgccacttgttggagaagtgtgttcaaaactcatttctggttcgtgcacctgtggcccttggcggcaggtcccgtaacacacagcctgaccactgatacagaggaggcccctgggactgctttccttataagggtcctgcgccttggtagaatttagatttggagttgcagagactcaactcaggaaagcaagtctttaacctctttgaccttggttttctcacgtgttaagctcaggacgtggaaccggtgatttctcatgcctttgatttttaagagtatgtggaatagaattgtgcataactgtgaatcacagtcactgtagaaccacagggctggctggtagctttcggaatctgttagtggctttatctttgctctttgaaagattggtgctgtccatttcatgatgccagaaagtcatgttgggaattggtgttaatttttctgggctcaaaaaatctggttctttgactatttttcctacttctttncataatgggagctattctgcaaaccaaacactttagtaaaactctctacttctagaaatgggttaacattattggnggggtttcacaatccccttaaactttganagccctcttgggaagtgaaaatnct

SEQ ID NO: 1111 - DNA, 735 bp, Homo sapiens
  misc_feature (549)..(549): "n" may be a, t, c, g, other or unknown
  misc_feature (664)..(664): "n" may be a, t, c, g, other or unknown
  misc_feature (678)..(678): "n" may be a, t, c, g, other or unknown
  misc_feature (735)..(735): "n" may be a, t, c, g, other or unknown
agatgatgctgtttttaggagattgtttaaaagttcatgcttgttagtgtttggtacttaaagatacttttgaaaatggtttatttgccatctttttttgtgtgtgtgttgttttttgttttttggttttttgagatggagtctcgctctgttgcccaggctggatggagtgcagtggcgcgatctcggctcactacagcctctgcctccctggttcaagcagttctcctgcctcagcctccaaagtagctgggattacagtcatgtgccactgcacctgcctaattgggaaaacaagttttaaatgacatctcttttttccaccagatgttgctgtagcattacatttatctgctgtgttaaattgttactaatatgcaattatgtaaaataactttttaactgaaaatcttaagtgtagagatagcttactagctaatggttcaattgtaaattcagatgagccactgcgcctggcctatttgccatctttgagctaagctaaccgtacttaagagtttgttttcctttccaaagaaaggaatgtanagagtaatatgttggtaatatgatttatattaagtgaagagtattatgaatggagtttctatttacttggtattaaacaagttcaaatgatttttttttttcttttaatgattanctttttcttactgnttcaaatttggtaaaagtgttctatgagatattattttattaatttttttggaaccn

SEQ ID NO: 1112 - DNA, 767 bp, Homo sapiens
  misc_feature (601)..(601): "n" may be a, t, c, g, other or unknown
  misc_feature (626)..(626): "n" may be a, t, c, g, other or unknown
  misc_feature (733)..(733): "n" may be a, t, c, g, other or unknown
  misc_feature (742)..(742): "n" may be a, t, c, g, other or unknown
  misc_feature (746)..(746): "n" may be a, t, c, g, other or unknown
ggccttttttttttttttttttgagttggagtctctgtcgcccaggctggagtgtagcggcaagatctccgctcactgcaacctctggctccccagggtccgccaacacgcctggctaatttttgcatttttagtaaacacgaggtttcgccatgtggcccaggctggtatcgaactcctaacctcaggttatccacccgcctaggcctcccaaagtactgggattacaaggtcaggagatcgagaccaccctggccgacatggtgaaaccctgtctttactaaaatacaaaaaattagctgggcgtggtggcacatgtctgtaatcccggctacttgggaggctgaagcaggggaatctcattaacccgggaggcggtggttgtagtgagctgagattgcgccactgcactccaccctggagacagagccagactccgtctcaaaacaaaacgaaacaaaacaaaaatgaattgttatgaagttcaaatgtccaaaattcgatgaagcggagggaaattggttaagctagaattttataatattcaccttttagaagtcacagtagttggctgggcgcagctcacggcaccaacacttgnaatcccagcactttgggaggctgangtgggcagatcacaaagtcaggagtttgagaccagcctggccaatatggtgaaaccccatctctagtaaaaataccaaaattagcacttcaacctggatgaccagancgaggattncatnttaaaaaaaaaaaaaaaaggg

SEQ ID NO: 1113 - DNA, 679 bp, Homo sapiens
  misc_feature (648)..(648): "n" may be a, t, c, g, other or unknown
  misc_feature (651)..(651): "n" may be a, t, c, g, other or unknown
  misc_feature (669)..(669): "n" may be a, t, c, g, other or unknown
ctgttgttctttttccaaatatcctagagtactttgatatagttgagtatattcatctatgcaatgtccttgtgatgttggtagggagaacttctaaccttttgtgcaatgacgagaaggttatataatggcccagccaggtttcatccttgatatcctggcaactgtagtttatattaatgacatctccattgataaagggtctctgaggtttccagaagaaagttttttagatattcatgagtgtactaatatcatcaatttacctgtaactttgattaagcaaagaaagcaaacccatacacacacacaaacaaacaaaaaaaaccacttttctcaggactttccatttgttcccagcttagtttgaggtcctgcttcattggcttagatctggccaggtctgtttgtcatctggcatctgtctcttctttctcatgctccagatccagagccagagagcagccactgctttgctctgaggttggctctattttctccctttggcatatgggatggcagtagccctgtgcccttttggtactgcagaagagatggattccacttggcccatcccacccccatctctggtcacctgggcatgaaggtttccttggcttctgcctgcagccatatttgggctgcttncangagaagagaagaatgtantgacactgca

SEQ ID NO: 1114 - DNA, 735 bp, Homo sapiens
  misc_feature (700)..(700): "n" may be a, t, c, g, other or unknown
  misc_feature (716)..(716): "n" may be a, t, c, g, other or unknown
  misc_feature (719)..(719): "n" may be a, t, c, g, other or unknown
aacaataaatgatgacagtgatgatgatatgatccatgtgatttcttggtcatggctttatgtcaagatttcctttagaaagtgaaataagtttaggtaacacacagaacaaacacagcaagaattgatgacttagacaataccgatttctttttttattgttattatactttaagttctggggtacatgtgcagaccttgcagatttgttacacaggtatacacgtgccatggtggtttgctgcccccatgaacctgttatctacattaggtatttctcctaatgctatccctcctctagccgtgcaacctccaacaggccccagtatgtgatgttcccctccctgtgtccatgtgttctcattgttcaactcccacttacaagtgagaacatgcagtgtttggtttaggtttcctgtgttagtttgctgagaatgatggcttcaaaaaaaaaggttaggtttcttttgttttgttttgtttgagacggaattttgctcttgttgcccaggctggagtgcaacagtgtgatcttggctcactgcaacctccacctcccaggttcaagcgattctcctgcctcagcctcctgagtagctgggattacagtcatgtgccaccacgcccagctaattttgtatttttagtagagtcggggtttctccatgttggacaggctggcctgaactcccaacctcangtgatctggccgcctnggncttccaaagtgcaaaa

SEQ ID NO: 1115 - DNA, 871 bp, Homo sapiens
  misc_feature (859)..(859): "n" may be a, t, c, g, other or unknown
agctttgatgaagagtgaatactgatggagaaatatgataggacaaaaagggtgtgatctagtgtagataaactggggaatttagcaaggcctgtttgttcaggttcctctctgtgacccttcatcttcagagatgagcatgttcctttcttccagggatcgggaggccctcacatgagtgtcttctgacctgcttcttgggaatgttggaaaagctttcctaagctgtatgccctgcatcggggagaagcatatgtgtgggtgaggaggggaggtcagagagactttcctgcttctgtttttttaatatgccaaggtgccgtattttgagtagtgtgtcctgaatcccatcatccttttcaatgtaacttttcattaaatgcagtgttctaggataagggttagcaaatgacttctaaaaaaacaccagatagtaaccatctttgtctttgcagcccataaagtatctgttgcaactactcaactctgttgctgcagcacaaaagcaatagtagaaaatacatagaccaagaagagtggctatgttccaataaaacattttttgtagatagtaaaatttcaatttcctgtaatttttacattataatattttacttattttttttccaaccattgaaaatgaaagaaccattcttagcttactggttctacaaaaacagatggcaacctggatttggcctgctgctgtagtttgtcaacccctcttctatgacattacattcacacagacaaaactaaacccaaacaaaacaataaaaatgcattcttctgacaatccaaagacctatcttaaaatatttaaggccaaccaaaatggccaggttttgacttacttatnaacattgttgta

SEQ ID NO: 1116 - DNA, 838 bp, Homo sapiens
  misc_feature (662)..(662): "n" may be a, t, c, g, other or unknown
  misc_feature (730)..(730): "n" may be a, t, c, g, other or unknown
  misc_feature (772)..(772): "n" may be a, t, c, g, other or unknown
  misc_feature (809)..(809): "n" may be a, t, c, g, other or unknown
  misc_feature (837)..(837): "n" may be a, t, c, g, other or unknown
gaaatggaaaagaaaaaaaaagacaaaaaaaaaaaaaaagaaaagaaaaaaatctcatcacttgaagccaccgggagcctgcggcccgggccagcccgggctttctccggagcagagcagcgctgctggcctggcagccaggacttctccgtgtacgtgcatccccagtccccgccggggcgggcgggccgccagagcagctgtttacaatccagagacagaaaacaaaatctagatgcaacagcgaaacaaagaacccatttccttcctggcacccgtttctgtcccctcctttcctgctccgcctgcccggcatcatcagcccttctggggcgtgtacctctcactgcctgccccaggaccagaggcctgtctcccccttccctccccaccggcccgggggagacctcttcacacccaaagatgctttgtcaagatggctgcgctgtccctttgagttcctgcttcttgtatattgctctggggactctcgccggggaagatggggctgatttcccacctagagaggttgatggcagaaggaaaatggggaggcactggggttgtggagggcatgggtatggctgaggagggtgctgggaacggcaaggcggtctgggggatggggaggggcaaaggtgagagatcaccttcctatcctncacctttccgcaaggaagacgaaccaggtgccagggctggggtcgggacacccatgttctgggccggnttgacccaaatccaaaccccggaagcttcaggcttcggatgngtcctgaacacctgtccgggcccttctttcagctgtnaggcaagcttcccagccccttccttaant

SEQ ID NO: 1117 - DNA, 802 bp, Homo sapiens
  misc_feature (635)..(635): "n" may be a, t, c, g, other or unknown
  misc_feature (780)..(780): "n" may be a, t, c, g, other or unknown
  misc_feature (786)..(786): "n" may be a, t, c, g, other or unknown
  misc_feature (791)..(791): "n" may be a, t, c, g, other or unknown
aggaggtggggcctggtgggcggggcctcagcgtaggccttaggtctcaggggagcagcacgcctgagcaccccaggacctgcgctcagggctcccacaaacggtttatcggtttatcgctgggggacagcctgcaggcttcaggaggggacacaagcatggagcggctttggggtctattccagagagcgcaacaactgtccccaagatcctctcagaccgtctaccagcgtgtggaaggcccccggaaagggcacctggaggaggaagaggaagacggggaggagggggcggagacattggcccacttctgccccatggagctgaggggccctgagcccctgggctctagacccaggcagccaaacctcattccctgggcggcagcaggacggagggctgccccctacctggtcctgacggccctgctgatcttcactggggccttcctactgggctacgtcgccttccgagggtcctgccaggcgtgcggagactctgtgttggtggtcagtgaggatgtcaactatgagcctgacctggatttccaccagggcagactctactggagcgacctccaggccatgttcctgcagttcctgggggaggggcgcctggaggacaccatcaggtanggatggccctgcccatcctgttctcgagtgtcccttccctcatccgctcagactgggcctcccttgcttctggcccagcctctggtgtctgggtcccctctgagtcctccatctgcttctggccccctgttcacggtcctgggangatggnaggcnttcgagctgag

SEQ ID NO: 1118 - DNA, 839 bp, Homo sapiens
  misc_feature (795)..(795): "n" may be a, t, c, g, other or unknown
  misc_feature (818)..(818): "n" may be a, t, c, g, other or unknown
  misc_feature (822)..(822): "n" may be a, t, c, g, other or unknown
caaaagagtgttggtgaggatatggaggaattggaacccttgtatgctgggtgggaatgcaaaattgtgcagccactatctatgccaaaacagtatggaggtttctcaaaatataaaaaaaataattaaaaaaagagctaccatatgatctagcaattttgcttttgggtatttatacaaaataattgaaatcaagataaaagtgatagttgccctcccatgtttattgcagcattattcaacttaaatgtccatcaacagataaatggttaaagaaaatgtggtatagacatacaacggactattattcagccttaaaaaaaggaaaccatgccatatgtaacaacagatgaaccttgaaggcattatgttaagtgaagtaagccagtcacatgaaggacaactactacattccacttatgtgaggtacctaaaatagactaactctaaatcagtgagtagaatggtgattgccagagaatggggggagggaaaatagggagttgctattcaacaggtatgaagttttaattatgcaggatgaacaagttctagagatctgttctacaacattgtgcctgcagctgacaatactgtattgtacacttaaatgtttaacagtagatctcatgttagtgttcctaccacaatgaaaaatcaaaatcctaacaatacaggaaaaaagagggattcaataaatgaaatcaaccaatcaataaaaataatatgatagatttaaaaaaacttcaatcactacaacatctcaaaatttttttggtgaaccttagagaaatntatatttaatcccaaaatgtggncacnttttgggtggtttttgg

SEQ ID NO: 1119 - DNA, 777 bp, Homo sapiens
  misc_feature (600)..(600): "n" may be a, t, c, g, other or unknown
  misc_feature (697)..(697): "n" may be a, t, c, g, other or unknown
  misc_feature (732)..(732): "n" may be a, t, c, g, other or unknown
  misc_feature (741)..(741): "n" may be a, t, c, g, other or unknown
agcaagatggcggctccctgggcgtccctgcgcctggtcgcccccatgtggaatgggcgtatcaggggcatccatcgcctgggtgcggcagtggccccagagggcagtcagaagaagaaaaggacaatactccagttcctgaccaactatttctacgatgtggaggctctgagggattacttgctccaaagggagatgtacaaggtgcatgagaaaaatcgatcttacacctggctggagaagcaacatggtccatacggcgcaggtgcctttttcatcctgaagcagggaggcgcagtcaagtttcgagacaaggagtggatcaggccagataagtatggccatttctctcaggagttctggaatttctgtgaagtgcctgtcgaagctgtggatgccggtgactgtgacatcaactacgagggcctggataacctcctccgcctgaaggagctccagtccttgtcgctgcagcgctgctcccacgtggacgactggtgtctcagccgcctctacccactggccgactcgttgcaggagctctcgctggccggttgcccccgcatctccgaacggggcctcgcctgcctccaccacctncagaacctccgcaggctggacatctcggaccttcctgccgtgtccaaccctggcctactcagatattggtggaggagatgctgcccaattgcgaagntgtgggagtcgactgggctgaaggcctgaagtcanggcccggangaacagcctcgggacacaagccagcccttgtccttg

SEQ ID NO: 1120 - DNA, 881 bp, Homo sapiens
  misc_feature (701)..(701): "n" may be a, t, c, g, other or unknown
  misc_feature (757)..(757): "n" may be a, t, c, g, other or unknown
  misc_feature (795)..(795): "n" may be a, t, c, g, other or unknown
  misc_feature (874)..(874): "n" may be a, t, c, g, other or unknown
  misc_feature (876)..(876): "n" may be a, t, c, g, other or unknown
tgagtgatgctatggaggagatcgacatgcaacaaggcacctcgtcagtaaaaccacaggctaatggtgttttggatgaaaaatctcaaattcaggagccatgttgttcagacctcttcctgtttcctgacgagagtgggaatgtatcccaggagtccggccccacctatgcctcattctctcaccatttcatcagtgatgcaatgacaggtgtgcccactgagaatgatgacttttgcattctttttgcaccaaaagcagccatgcaggagaaggaagaagaaccagttataaaaatcatggttgatgatgcaattgtgataagagacaattatttcagtctgcccgttaataagaccgatacgagcaaagcccccttacactttcccattcctgtgattcgctatgtggtgaaggaggtctctcttgtctggcatctttatggaggaaaggattttggaacagtccctcccacttctccggctaaaagttatattagtccccacagttcgccttctcacacacccacgagacatggacgtaatacagtatgtgggggaaaaggaaggaaccatgactttttaatggaaatacagctaagcaaggtgaagtttcagcatgaagtctacccgccatgcaaacctgattgtgattccagcctctcagaacacccagtcttccggcaggtgttcattggtcangatcttgagattcgagatcgtttggcaacatccaaatgaataaattttatacctgnattgcagtaaagaaatgcccttgaaaagctcacttccnacatgttgacaggggaaagcccttacacgggggtcccagaatctggcaggtcccccacaggaatgcttgctttgaaaangncctta

SEQ ID NO: 1121 - DNA, 741 bp, Homo sapiens
  misc_feature (688)..(688): "n" may be a, t, c, g, other or unknown
  misc_feature (728)..(728): "n" may be a, t, c, g, other or unknown
  misc_feature (732)..(732): "n" may be a, t, c, g, other or unknown
ttttttttttcccggctgggctcgggctcagctcgactgggctcggcgggcggcggcggcggcgccggcggctggcggaggagggagggcgagggcgggcgcgggccggcgggcgggcggaagagggaggagaggcgcggggagccaggcctcggggcctcggagcaaccacccgagcagacggagtacacggagcagcggccccggccccgccaacgctgccgccgggtacgtggctacaccactggctgccctcttgaacataaaggagaaaactcggctgcgggcacctcccaacgccaccttggaacatttctacctgaccagtggcaagcagcccaagcaggtggaagtagagcttttgtcccggcagagcgggctctctggccgccaggtagagcgttggttccgtcgccgccgcaaccaggaccggcccagtctcctcaagaagttccgagaagccagctggagattcacattttacctgattgccttcattgccggcatggccgtcattgtggataaaccctggttctatgacatgaagaaagtttgggagggatatcccatacagagcactatcccttcccagtattggtactacatgattgaactttccttctactggtccctgctcttcagcattgcctctgatgtcaagcgaaaggatttcaaggaacagatcatncaccatgtggccaccatcattctcatcagcttttcctggnttgncaattacat

SEQ ID NO: 1122 - DNA, 830 bp, Homo sapiens
  misc_feature (723)..(723): "n" may be a, t, c, g, other or unknown
  misc_feature (798)..(798): "n" may be a, t, c, g, other or unknown
  misc_feature (811)..(811): "n" may be a, t, c, g, other or unknown
  misc_feature (829)..(829): "n" may be a, t, c, g, other or unknown
actctcctcccccgagcggcagcggcagcggcggcggcggcggctgctgcgggcgctgaatgagagacggtgactgttcgggtcgacgagtgctactctaggcggcggcggccgtggcggtgaagcgtggggccggcatcgtctttccgtcctctgagacgacggccgcggctgcacaggaataatgtatttgtggccttggacatgaggcagtcagtcctctgttgctgttaacataaggtcagggactgatgaggaaagcatggacctaatgaacgggcaggcaagcagtgtcaatattgcagctactgcttctgagaaaagtagcagctctgaatccttaagtgacaaaggctctgaattgaagaaaagctttgatgctgtggtattcgatgttcttaaggttacaccagaagaatatgcgggtcagataacattaatggatgttccagtatttaaagctattcaaccagatgagctttcaagttgtggatggaataaaaaagaaaaatatagttctgcaccaaatgcagttgccttcacaagaagattcaatcatgtaagcttttgggttgttagagagattcttcatgctcaaacattaaaaattagagcagaagttttgagccactatattaaaactgctaagaaactgtatgagctgaataaccttcatgcacttatggcagtggtttctggcctacagagtgccccaattttcangttgactaaaacattgggcgttattaagtcgaaaagacaaaactacctttgaaaaattagaatatgtaatgagtnaagaagataactnccaaagactcagagactnt

SEQ ID NO: 1123 - DNA, 652 bp, Homo sapiens
  misc_feature (504)..(504): "n" may be a, t, c, g, other or unknown
  misc_feature (513)..(513): "n" may be a, t, c, g, other or unknown
  misc_feature (545)..(545): "n" may be a, t, c, g, other or unknown
  misc_feature (620)..(620): "n" may be a, t, c, g, other or unknown
  misc_feature (638)..(638): "n" may be a, t, c, g, other or unknown
  misc_feature (645)..(645): "n" may be a, t, c, g, other or unknown
catctttcaacattttttttttttttgagacagagttttgctcttgccgtccaggctggagtgcaatggcgcgatctcggctcgctgcaacctccacctcctgggttcaagcaattctcctacctcagcctccagagtagctgggattacaggcacctgacatcacgcccagctaatttttgtatttttagtagagatggggtttcaccatgttggcaaggctggtctcaaactcctgacctcaggtgatccaactgcctcggccttccgaagtgctgggattacaggcctgagccaccgtgcctggccttttattttgtgtgtgtgtttgatttctgacttggcctttttaaaaaaatcacaaaatatataatacggccgggtgctgtggctcacgcctgtaatcccagcactttgggaagccgaggtgggcagatcacgagatcaggagatcgagaccatcctggctaacacagtgaaaccctgtctctacttaaaaaaaanaaaaaaaanaaagatagctgggcatggtggctcgcatctgnagtcccagctactcaggaggctgaggcaggagaatcgcttgaaccggggaggcagaggttgcagtgagctgagancacgccattgcactccanactgcangctgagc

SEQ ID NO: 1124 - DNA, 736 bp, Homo sapiens
  misc_feature (709)..(709): "n" may be a, t, c, g, other or unknown
  misc_feature (722)..(722): "n" may be a, t, c, g, other or unknown
  misc_feature (734)..(734): "n" may be a, t, c, g, other or unknown
atgtaaagaagtatgtatttggtgaggagaattttttgagcactgtgcttacgatttgtgtatttttctgtgtattaattttcaataaaaacatttttaagtggatgtaatcaaacaaaagtagttgagtcaactgggtaatgaacattacatatttttctatactattctctgttgtgtatatttgaaaatctccataataaaaacccttttaaaaagtcaatccagaaagtggaaagcaatatactgtacttgcaggaagtagaaaccaatatactgtacttgcaggaagtagaaagcgatgcactgtacctgcaggaagtagaaagcgatgcactgtacctgcaggaagtagaaagcgatacactgtacctgcaggaggtagaaagcgatgcactgtacctgcaggaggtagaaagccatgcactgtacctgcaggaagtagaaagcggtgcactgtacctgcaggaagtagaaagcggtgcactgtacctgcaggaagtagaaagcggtgcactgtacctgcaggaggtagaaagccgtgcactgtacctgcaggaggtagaaagcggtgcactgtacctgcaggaagtagaaagcggtgcactgtacctgcaggaggtagaaagccgtgcactgtacctgcaggaggtagaaagcgatgcactgtcctgcaggaggtagaaagcgatgcactgacctgcaggangtagaaagcgatncctgacctgcanga

SEQ ID NO: 1125 - DNA, 836 bp, Homo sapiens
  misc_feature (712)..(712): "n" may be a, t, c, g, other or unknown
  misc_feature (787)..(787): "n" may be a, t, c, g, other or unknown
  misc_feature (811)..(811): "n" may be a, t, c, g, other or unknown
  misc_feature (819)..(819): "n" may be a, t, c, g, other or unknown
atttatatctacagatcatatctttatatcctttctagtgtgaattattttgtctttgtggatgaatttgtttttatgacattcataattttcttcaaggttatattctataatgtatctatttattattattattttttaagacgagtctcactttgtcacctaggctagagtgcagtggcacgatctcagctcactgcaacctctgcctcctgggtttaagtgattctcctgcttcagcctctcaagtagctggaaatacaggcgcgtgccaccatgctcggctaatttttttatttttaatagagacagggtttacccctgttggccagattggtctcaaactcctgacctcatatgatctggctgcctgctcctcccaaaatactgggattacaggcataagccaccacgcccagcgtatatttaaaatttttaattggatgaaattatcaccccatttacagattatataagttacaaactcagtcatcattgaagcattttttgtattaaatctgcaaactgtatatatttaacatattatttattacccttacatctgtgacaaaaagagactttccactgctgctttctcaagatgcatgtaaagctgtcccattagaactctaaatgttaaaaatttcctgtgcaattttggacttgtatgtgtgaagcagtatttcagctcaaatatgtgctttcatactgnctataatataacccaaatcaacattgggagctcgtagtaaataaattgcttatgtatattagcaccattttatgnatcccttaaaatttggaaatgatncaaagctntgccccgagcaatcatg

SEQ ID NO: 1126 - DNA, 829 bp, Homo sapiens
  misc_feature (657)..(657): "n" may be a, t, c, g, other or unknown
  misc_feature (747)..(747): "n" may be a, t, c, g, other or unknown
  misc_feature (766)..(766): "n" may be a, t, c, g, other or unknown
  misc_feature (778)..(778): "n" may be a, t, c, g, other or unknown
ggccttttttttttttttttttttttttgagacggagtcttgctctgtcgcccaggctggagtgcagtggcacgatctcggctcactgcatgctccgcctcccgggttcacaacattctcctgcctcagcctcctgagtagttcggactacgactacaggcgcctgccaccacgtccggccaactttttgtatttttagtagagacggggtttcactgtgttggccaggatggtctccatctcctgacctcgtgatccgcccgcctcggcctcccaaagtgctgggattacaggcatgggtcaccacgcctggccagtgaaaatatatttataatgacttccctacctattccctatcttcttccaccattcttagacacagtgatagtttaataatcgattaggatgtaactgtaatttccttatgaagaaaactaaagctatgatgtactataaaacatatagcatttcaaggcagccaattatccaaaacatattaactggtaaattaaatatacctgttggttatcttgtttggaacaggagggaggctattattaggtagagagtaagcaccatgtcactttacatagtccatttatatccacatgatggcagactgctctttgacaatgaagaagcatagaatttatttgntttactttggtaaactgactttggctatcaacagacttaatgtccaagtcttataacatttttcaaatatgtttaaaatttaagtttttncaaaaaatcaaagcactgnacactaaaaatngaatataaggcagtgaaatcaaatcctggttacttgaagaaataacagctg

SEQ ID NO: 1127 - DNA, 861 bp, Homo sapiens
  misc_feature (695)..(695): "n" may be a, t, c, g, other or unknown
  misc_feature (730)..(730): "n" may be a, t, c, g, other or unknown
  misc_feature (827)..(827): "n" may be a, t, c, g, other or unknown
  misc_feature (858)..(858): "n" may be a, t, c, g, other or unknown
ggccttttttttttttttttttgagatggagtttcactcttgttgcccaggctggagtgcaatggcacaatctcggctcaccacaacctccgcctcccaggttcaagcgattctcctgcctcagcctcccgagtagctgggattacaggcaggcgccactacgcccggctcattttgtatttttagtagagacggggtttctccatgttggtcagggtggtctcgaactcccgacctcaggtgatccggccacctcgatctcccaaagtgttgggattataggcgtaagccaccgcacccggtccaagaaccagtgttaataaacgtacagtagaagtggggtgggggcagggggaagctactgatcacaaacgagaaactaccacacacaaattaattttacagctttgatttagtctctcgggaccccacatctgaagaggggttaggcagcgaagtgtttcggtatggggcttgaggatagtgattttgggattctgagctactgagctcctctgagactctggggcactgctcacttgtaagcacaagggggctttgcttgacggtaatttaggtcaagcttccttgaatttcgatgaggcagctggagtttcttgaaaatattctcagctagattcagaataattctttctcctcttcgcttttgtggggactttatctcaagtgtctgnttctgctcactggaagacttaattttaggtccttnaacccctaaattcagttgaggaaatgacttctgctgcaaatagaaacctctgctttatttgcatggagaacaaggaactcaaatgagagatccaggnatccttggtttcatgccaatgggtctatcantca

SEQ ID NO: 1128 - DNA, 815 bp, Homo sapiens
  misc_feature (692)..(692): "n" may be a, t, c, g, other or unknown
  misc_feature (760)..(760): "n" may be a, t, c, g, other or unknown
  misc_feature (783)..(783): "n" may be a, t, c, g, other or unknown
  misc_feature (814)..(814): "n" may be a, t, c, g, other or unknown
tttgctaccatcttgctttctagagaactgatggcctgtctttatgagcaccatctctttgaagacacacttggctgtcttcgaatagagttctgttgggactgggacatttctaactcctccccttagaaagactggttaaggtcatcagctacctgttttgcatgttttgtttcaggactctttctttcatttttgggttctcctaggtgaaatccaggctcatttggtgagtaatatcatctggccagagaccgttttgttatgacatactttctgctgacaccaaactgatttggcttccttggcatattatgttccttactatcggggtaactttttcaagttttagaaatgcctgtgtaagtgtgaatgggaactatatagggtatttttaaactataatgtttacctgtattcaaagacaaattatttgtacctaattcactcagcatgtatttgaagtaactcatgttttgttagagtgatagtgttaaaagggatttaaattgagttttatagaaaaagaggttatttagaaaagaaattttaacagagggttaaaaaaagtgaaacagaatttaggtgaaaggaatacctttgtgaaggaagacttattttcaagatggaaagaaagtaacggacagtaggcgcagaagcagaacaaaaaggagagaaaatgggcaggttanggaattcaaacattggctaataaaacaataataaccagcattactatatctgggctttaatactatgngcatgcacccattatgtatttgnctaaattaggatcttccaatccttacaaaant

SEQ ID NO: 1129 - DNA, 866 bp, Homo sapiens
  misc_feature (822)..(822): "n" may be a, t, c, g, other or unknown
  misc_feature (858)..(858): "n" may be a, t, c, g, other or unknown
  misc_feature (862)..(862): "n" may be a, t, c, g, other or unknown
agcaaggtctaatgggatgctgtcttcaagagacccatctctcatcccatgagacccataatgacacccataagctcaaaataaagacatggagaaaaatctaccaagcaaatggaaaacagaaaaaagcaagggttgtaatctcatttcagacaaaacagactttaaaccaacaaagaccaaaaaagacaaagaagggcactacataatggtaaagggttcatttcaacaagaagacttatcctaaataatatatgcacacaatacaggagcacccagactcataaagcaagttcttagagaccttcagagaggcttacactcccacacaataaaaaaagaaaaaggcctgggtatagtggctcatgcctgtaatcccaacactgtgggaggccaagacaggaggattgcttgagcctaggccttcaagagcagcctgggtaacacagcaggacctcacctcatctcttaaaactcccacacaatacggggagactttaatacccaactgacggtactagacagaccatcagagcagaaaattaacaatgatattccggacctgaacacaacactgggccaaatgtacctgatagacatctagagaactctccacccaaagatcaacagaatatgcattcttctcattaccacatgggacatactctaatatcaaccacacaattggacataaaacaatcctcagaaaatgcaaaagaaggaaaattataccaaccactctcttagaccacagcacaataaaaatagaaatcaagacaaaatcacttcaaaaccataccattattttggaaattaaccaanctacttctggatgacttttgggtaaataatggaaantaanggag

SEQ ID NO: 1130 - DNA, 798 bp, Homo sapiens
  misc_feature (709)..(709): "n" may be a, t, c, g, other or unknown
  misc_feature (725)..(725): "n" may be a, t, c, g, other or unknown
  misc_feature (766)..(766): "n" may be a, t, c, g, other or unknown
atttttcatgtcacataattttggagtatgtcatggacatttgaatattttgttacaaaactggatgctgttaaaatcctctggaaaatatttttggttttttggtttcactttagcgggcagttaacctggttaggttcagactgcctctgtgggctgtggatccagtttgaacttacttttcaaaaccttcgtattgctgttcaggtcccaggtgtgccatccatgccattgtgcagttctcagcgcctttcctctgccgccttgggtcagttcacacatgggcatgttggtggtaaacttgagattgtatacacaaatttagaggacgtttcttctctccgtgacttcccttgtacacaagctcccaagagtttcttttcgtggttctttggtgagaaaactggaattttagcttctttgtgcttttcatacgttttctgtagaggggctcatttcctgaacaaaatggagagagagaaaagttagagaaaaaaataaaatgaattccctcttccatactcttccgatcatcgtctttttcctagttcttttgtcagaagaactctcttttagagtttaggagacagctaccagccacaggtgtgcagactcaggattggggcttgctttgaggcagagctgagagagaagaaaaattaccagatatccaccccttcccattggccctctcccattcatcatcttntctagttctctaccanaaggagttctcttggaacttttctctggcttcactcactgnacagttaatgagaattgggctggcctcaagct

SEQ ID NO: 1131 - DNA, 644 bp, Homo sapiens
  misc_feature (632)..(632): "n" may be a, t, c, g, other or unknown
  misc_feature (643)..(644): "n" may be a, t, c, g, other or unknown
atttaacattcaaggaaatacaccaccaggagcaaaagatcaacagtcagaaaagtcagacccataaagacttcagaatacatgatattgcatgtttaatatatttaatccaataaaagaagtgggtgataagatgagggccttcaaaaaataggtgtatttgagagcttttttggaggttctagcaggggagtgcagctactcatataccctggaccaaagaccgctcctcctctattggaggtggtcgtcctcttcgaccaagcgcacagcttcaggagggacgcacatggagcggtgagggaagaaggggacaccacctagccatccagatcagctaaccaaccctggtgattgatggagtgacagatggtgcagccacatcaccctcacatccaaaaaaataggtgtatttgaaaaagaaccaaaaagaggccgggtgcagtggctcacacctataatcccagcactttgggaggccaaggcaggcggattatttgaggtcaggagttcaagcccagcttggccaacatggtgaaaccctgtctttactaaaaatacaaaagtcaattgggtgtggtggcacatgcctgtaatcccagctactcaggaggctgaggcataagaatcgncttggagctgnn

SEQ ID NO: 1132 - DNA, 604 bp, Homo sapiens
  misc_feature (385)..(385): "n" may be a, t, c, g, other or unknown
  misc_feature (432)..(432): "n" may be a, t, c, g, other or unknown
  misc_feature (498)..(498): "n" may be a, t, c, g, other or unknown
  misc_feature (567)..(567): "n" may be a, t, c, g, other or unknown
  misc_feature (598)..(598): "n" may be a, t, c, g, other or unknown
  misc_feature (601)..(601): "n" may be a, t, c, g, other or unknown
agactcgagatgcgcccgaggaggttgggccggtgctgcgcggggagccggctcggacccggggacccagcagcactcacctgtgcaccttcgccctcagccagtcccgctccggagccctctgcgcagccgcaggcacggggcactggacagagagtaggatcccgagccacctctggaacccagttcctctcggaagcccgcaccggagctcgcccggcctcggaggctggagccaaggcaggagcccggcgcccgtccgcattctcggccatccaaggggatgtccggtctatgcccgacaattcggacgcgccgtggacccgcttcgtattccaagggccgtttggttcccgggccactggccgggggactggaaaggcancgggcatctggaagacgccagccgcctacgttggccggcgacccggngtgtccggccctgagcgcgccgctttattcgggagctggaggaagcactgtgtcctaacctacctncgcagtcaaaaagatcacccaggaagacgtcaaagtgatgttatatttgctggaggaggtgtgtactgncttcctgatccagatttttccacctgtctgnganagc

SEQ ID NO: 1133 - DNA, 868 bp, Homo sapiens
  misc_feature (633)..(633): "n" may be a, t, c, g, other or unknown
  misc_feature (682)..(682): "n" may be a, t, c, g, other or unknown
  misc_feature (773)..(773): "n" may be a, t, c, g, other or unknown
  misc_feature (785)..(785): "n" may be a, t, c, g, other or unknown
  misc_feature (837)..(837): "n" may be a, t, c, g, other or unknown
tactatagatggtgaagctttattcaagtatcaatatatgtggtcaggcaagaaatattaataataaatgttgaaaacactattcccattaagaaataagtggatcaaagtgttacccttaatgatcatatagacactgataaataatagtcaactttattactgtggttcaaaccaagtggaggttgtatgttttgtctagaaaatatataaactacaaaaagttaataaacacctaagtgaatgagtaaattaaatgtggggagtaagattcaattaagataaagtcctaattttcttttaatcaaatgctctgctttgtactccttagaatggatgcactggagctgatttaaacattctttggtggtcacaagatgtatagctgcctctgtatgtttggcgcatggaaaaaaatatgagtttttgtggacatacactctttatttgaaaagtatgaaatataatccaagaaagccagccatggctcagtgataaatatggaattgatatgaaacattatattgattaatcacctttgaggatgattaataaaagagagaaagtgattctatatagagatgcaggactatttcaggctcattcatgatctaggtttttgtgcttcatggntattttattatcatcaataaaaagaaaaaagaaaaaaatcttatactgnccaaaaaattagggagaccagcgcccagtggtcatgtgaagggggactagtggccatttcaccaagcagcctggaaatgctcatcctccanggcattggagangttctcaagaagcgagtgcctccatggggggaaataattaccccagattaanctgttcagacctaatggatggtaaaacagac

SEQ ID NO: 1134 - DNA, 766 bp, Homo sapiens
  misc_feature (688)..(688): "n" may be a, t, c, g, other or unknown
  misc_feature (752)..(752): "n" may be a, t, c, g, other or unknown
  misc_feature (761)..(761): "n" may be a, t, c, g, other or unknown
ccctgatgacttgtagatggaggggtacatatgaaaagggcttcagagtggcctccaggagttaggagcaaccaccagtcaacagccagccagaaacagaggtcttggtcatctaagcacaagaaattgtattctgccaacaagaagatttggctgaccatgagaatgatttttttcctagagcttccagatgaggactcagtcatcagacacccagattatagccctgtggtaccctagttaaagaactaagctattccatgtcagagttttgaccaacagtactgtaggctaataaataggtgtgactgtaggctgttaagtttgtgtccatttgctatgaagcaatagaaaacaggcaacatgctctgttttttctactcttgcatcaccttggtctttctgttctcctccattcattaataaattgcttctggttcctctaggtactaggctgtgggtaggggaaggtaggaaagttgagaagaaagttggggtgtttttaaaatgacttaagttcagctgtcttccgagttcatgggaaaataagccattctttttctgccaaacggtggtattaaggcttgcaggatgaaatattttgcttctgacttctccagctgagaagcaggcataattttctgtgattattaatattgcaaactctagaaaatgcaagctagccttnccagaagttttctcactggtctacactccaattgccctaagggaaatagaagggtgaagactgnctttccttntcaga

SEQ ID NO: 1135 - DNA, 727 bp, Homo sapiens
  misc_feature (297)..(297): "n" may be a, t, c, g, other or unknown
  misc_feature (653)..(653): "n" may be a, t, c, g, other or unknown
  misc_feature (681)..(681): "n" may be a, t, c, g, other or unknown
  misc_feature (692)..(692): "n" may be a, t, c, g, other or unknown
ttaagctcctttgacttgggccctaagtctgttttacctgatgttcctgaaagatgttcctgatgtccttcactgttctttcatgctggatgttcttgcctatgctgcctcctcagctatcaccctctcttcccctttttaatgtagaactcattcttaatgatttgtcaaaggcaccctatttcactgaaatgccttctatattccctaccctccaagtggattgtagaccttctaaggtcttttgacatctgcatatctctagcacagcacttatcacggtgattatttatctgntcatctttccaagtagacactctcattttaactccctaccctagtcgccagcatccccagcatagtgcctgtcataaaatggtgccacaatgaaaatttgaaaaatgaatgaacgtgataaacatagatgagaatcctatattctacaattttttaaatgtactgaaattattctttttgaatcctcctatttatttctgtgacttctttgatgacaaagttagaaaaaagtggaggtcagtagggagatatgaagggatgcaggtggaagcagtgagcctgggcgggtgatggagtgggagatacgtggcacaggggtcaagtgagttaatctgggctcattcagagaatggaangtgtgtgccaagaaaactggttggatanggataggtcanggattccctcttgcattctcacacttgggggcatg

SEQ ID NO: 1136 - DNA, 866 bp, Homo sapiens
  misc_feature (748)..(748): "n" may be a, t, c, g, other or unknown
  misc_feature (836)..(836): "n" may be a, t, c, g, other or unknown
  misc_feature (849)..(849): "n" may be a, t, c, g, other or unknown
agagggccggagcgagaagatggccgaagacgtacgattatctcttcaagctcctgctgatcggcgactcgggggtaggcaagacctgcctcctgttccgcttctcagaggacgccttcaacaccaccttcatctccaccatcggaattgattttaaaattagaacgatagaactagatggaaagaaaattaagcttcagatatgggacacagcgggtcaggaaagattccgaacaatcacgacagcgtactacagaggagccatgggcattatgctggtctatgacatcacaaatgaaaaatcctttgacaatattaaaaattggatcagaaacattgaagagcatgcctcttccgatgtcgaaagaatgatcctgggtaacaaatgtgatatgaatgacaaaagacaagtgtcaaaagaaagaggggagaagctagcaattgactatgggattaaattcttggagacaagcgcaaaatccagtgcaaatgtagaagaggcattttttacacttgcacgagatataatgacaaaactcaacagaaaaatgaatgacagcaattcagcaggagcaggtggaccagtgaaaataacagaaaaccgatcaaagaagaccagtttctttcgttgctcgctactttgatgaactctttctgagagactgcagcacacctagagggccctttcctgcttctctgaaagcacaggtcacccagctcagaatcacaccttccggctgctgctganagcccctgacttagacctttaacacagtatgccagtggattccagcctcatgggctagcaaagaacagactccttttcaacatggaancatgaatggagancttcagacctactcgtt

SEQ ID NO: 1137 - DNA, 886 bp, Homo sapiens
  misc_feature (763)..(763): "n" may be a, t, c, g, other or unknown
  misc_feature (821)..(821): "n" may be a, t, c, g, other or unknown
  misc_feature (869)..(869): "n" may be a, t, c, g, other or unknown
  misc_feature (881)..(881): "n" may be a, t, c, g, other or unknown
tataaataaataaatagataaataaaaggtaatcattagcattttttcagttctgttggtatttgatttctatctcaaagatgatatgaggaatcttattaaagggttattataaatgtatggttttatgtattttgaattattctgtaaccaggtatttgtagatgcatagtgtatgtctttttccattggtaaaaattgatctatactgtggaaagatgaaactttattacttttctacaagctttttttcccttcttctcattgccttcccacattttaaagtcatagatctttagcatagaaaagatatagcagtagatgagtttgttttttaaaaaaagttatagtctgcttggtttaaccaaaagtaatttaaaaattaataccacattaaaaagctatttcaaaagcaatatgaaaaggaggattattttttattttaacatattatttgggctgggtgtggtggctcatgcctgtaatcccagctgaggcgggcagatcacttgaggccagtagttcgagaccagcctggccaacatggcaaaaacctttctctactaaaaatacaaaaattagccaggcatggtggtgtacgccagtattcccagctacttgggaggctgaggcatgagaattggttgagcctgggaggcggaggttgcagtgagcccagatcgtgccactgcactccagcctgggtgacagagtgagattctgtctcaacacaaccacaaaaaaagtattggttggtaaaaangggaccttaattcactaactactggacccattagtaaggttcctcttccaaaagcttncctggagtttttctggagtattcagaatttacttggaagtattcaaantgggccctggcntttaa

SEQ ID NO: 1138 - DNA, 865 bp, Homo sapiens
  misc_feature (715)..(715): "n" may be a, t, c, g, other or unknown
  misc_feature (722)..(722): "n" may be a, t, c, g, other or unknown
  misc_feature (745)..(745): "n" may be a, t, c, g, other or unknown
  misc_feature (858)..(858): "n" may be a, t, c, g, other or unknown
attacatggaattttgatttgcttatgtatttttttcttactttaccacttgcattaataaaagtcatacaaaatgaaaaaaaatttattgggggttgaaaaatggtgatattctaatatgtcattttgttttcatttattagctgggataattttatagagcaatacttcccatatctatcatttggttacctagtatgatagttcaaaagcaggaaaaaaacattattttttccttttatttaccagtgtttaatataagttactggtttcttgacatcccttaaagatgatcaattgactataaaaatcattatgaactcacaaatcccattgtaattcttattttattgaagctccaatttcccatcattggccaatgaaaaactcttcaagttggctcctgaatcttttggaaattaccccagtagtatttgatagcttccttgccacctggtatgtcaagatgttttaggttcatcctgtttctttcctgtcccatacagggagtaagcaaaatctataagaacctctgatttctttcagtgggaaataatatttcaatattacaatttgaatctagctatgtttactgctacaactgggttggccattatttctggacttttttagtttatagaactagggaaaatatatctttttaatattatatttatcatatccttttccacactgagaatcatgggtctcaaangcactangcaatgatagaattaaatatacncaaattctcatttgctttatcatccaaatccccccacaagctcagaataatattccaatactggcatcatcaattatgaatatgggaagctgtgaacaactggttttaaaacngagacca

SEQ ID NO: 1139 - DNA, 493 bp, Homo sapiens
  misc_feature (489)..(489): "n" may be a, t, c, g, other or unknown
  misc_feature (491)..(492): "n" may be a, t, c, g, other or unknown
atttttttttttcctctgtgctcttagtgctattattgtaagttcttagctggttccctctcaaccattatccttaaattgaatgtgttattgtcactatgttgtgtcctggtagggcatttttgacagtgaatgttgagaaagcatatgcatgtgacagggcggatttgttagaagcagtggaaaggtgagtactaaactgggtgtttaaaatgcaagcttcagctgggcacagtggctcacacctgtaatcccagcactttgggaggcagaggcgggtagatcacctgaggtcaggagttcaagaccagcctggccaacatggtgaaaccccctctctactaaaatacaaaaaaagtagctgggcatggtggtgcatgcctataatcccagctacttgagaggctgaggcaggagaatcgcttgaacccgggaggctgaagttgcagtgagccaagatcgtgccactacactccagcctgggggcananna

SEQ ID NO: 1140 - DNA, 732 bp, Homo sapiens
  misc_feature (560)..(560): "n" may be a, t, c, g, other or unknown
  misc_feature (644)..(644): "n" may be a, t, c, g, other or unknown
  misc_feature (696)..(696): "n" may be a, t, c, g, other or unknown
  misc_feature (705)..(705): "n" may be a, t, c, g, other or unknown
atttggccagtggtgggcggttgccacagctggtttagggccccgaccactggggccccttgtcaggaggagacagcctcccggcccggggaggacaagtcgctgccacctttggctgccgacgtgattccctgggacggtccgtttcctgccgtcagctgccggccgagttgggtctccgtggttcaggccggctcccccttcctggtctcccttctcccgctgggccggtttatcgggaggagattgtcttccagggctagcaattggacttttgatgatgtttgacccagcggcaggaatagcaggcaacgtgatttcaaagctgggctcagcctctgtttcttctctcgtgtaatcgcaaaacccattttggagcaggaattccaatcatgtctgtgatggtggtgagaaagaaggtgacacggaaatgggagaaactcccaggcaggaacaccttttgctgtgatggccgcgtcatgatggcccggcaaaagggcattttctacctgacccttttcctcatcctggggacatgtacactcttcttcgcctttgantgccgctacctgctgttcagctgtctcctgccatccctgtatttgctgccacgctcttcttttctccatggctacactgttgangaccagcttcagtgaccctggagtaattcctcgggcgctaccagatgaacanctttcatanaaatggagatagaagctccaatggtgc

SEQ ID NO: 1141 - DNA, 863 bp, Homo sapiens
  misc_feature (750)..(750): "n" may be a, t, c, g, other or unknown
  misc_feature (822)..(822): "n" may be a, t, c, g, other or unknown
  misc_feature (858)..(858): "n" may be a, t, c, g, other or unknown
  misc_feature (861)..(861): "n" may be a, t, c, g, other or unknown
gtatattctgcagagataaccaagtaaatgacatacagatagtcaatggctctgagtggctctactagctacatctttttatgttaataggttttttacttttttcagagaaaattatatccagcatttttaatctttagactaataacaccaggtagacacaaagctattcctggaacattgctttattatagataggaattccataaccaattacctcctatttgctagaacacactaacacaaatacataaaaaatacagactaaactataatagaaggcagttttctctggtgtttgtagcacctctcttctactaatttaaaatatcttcatcactgaggatgcctcctattaaaatgttatatctgagttatactaataactatgaaattaccaggtgtctctgcttgagtagttggaattaatttttttgcctcataactctggagacttctcagaaagtgtagctaaaggtttattcatcaaaatccccttctaatgaatcgactctgatgattctgctgttgtcagaatggatgttctaggaagttgtcatcacacttgaccgtaatgaaaatgctgccctggaccatctccccaaactatgtgtcctcagtattgtgggaagaacccacttcatgatttctaaccagggtagcctctggaagtcaaatgattgctgtaaaattatgaacagagcagcatcaggctttgctctgatgtatcttatgaagcctttctacttncaaatgaagactatgaagagaaccttggaacaatgcccttctggggagctcattcagcaaggcatatctganggcatatctgggtccctcttacgcatggaggaatcntgngg

SEQ ID NO: 1142 - DNA, 788 bp, Homo sapiens
  misc_feature (751)..(751): "n" may be a, t, c, g, other or unknown
  misc_feature (757)..(757): "n" may be a, t, c, g, other or unknown
  misc_feature (761)..(761): "n" may be a, t, c, g, other or unknown
aagggactgatggcctggttggcgctgctgagaactgtcgggagcttcttgagaccgaggaccgaaatcccggctccaggcctcggggactgcggactgtggggaggctggccggagagagagggaaggacggggcctggcccccgggactccctgtgccttgcttggagctgacgccgacggtttattgcagggaactgacaagatcacattttgagaagaagttggaaagaatcccaagtggatgaactgaatatctggatgaggacaagatctgtggggagagactgtaagatagaatgagtccatttaagtcccaggacggtggaaactagctagtagattgcagccatgttgtggaagctgctgctgagatcccagtcctgcaggctgtgttctttcagaaagatgcgatcacctccaaaatacagacctttcttagcatgcttcacctatacaactgataaacagtcgagcaaagaaaatacaagaacagtggaaaagctctataaatgttcagttgacattaggaaaattcgtagattaaaaggatgggtacttttagaggatgaaacctatgttgaagaaattgcgaatattttacaagaactaggtgccgatgagactgctgtagccagtattttggaacgctgccggaagcaattgtctgtagtccaaccgctgttaacacccagagaaaactctggcagttggtctgcaaaaatgaggaagagttaatcaaagttaatangagcantttncagaatctttctttactattaaagacc

SEQ ID NO: 1143 - DNA, 811 bp, Homo sapiens
  misc_feature (768)..(768): "n" may be a, t, c, g, other or unknown
  misc_feature (773)..(773): "n" may be a, t, c, g, other or unknown
  misc_feature (802)..(802): "n" may be a, t, c, g, other or unknown
cagtaatatgattgtccatagagatatcaaaggcgcaaatatcctgcgagattcaacaggcaacgtcaaactaggagattttggggccagcaaacggcttcagaccatctgtctctcagggacaggaatgaagtctgtcacgggcacaccatactggatgagccctgaagtcatcagtggagaaggctatggaagaaaagcagacatctggagtgttgcatgtactgtggtagaaatgctaactgaaaagccgccttgggctgaatttgaagcaatggctgccatctttaaaatcgccactcagccaacaaacccaaagctgccacctcatgtctcagactatactcgagatttcctcaaacggatttttgtagaggccaaactgagaccttcagctgatgaactcttaaggcacatgtttgtgcattatcactagcagccagtaacctctcctgtgcctctacctagctcccatctattcattcaccttctctctgactgcacttttcttttttataaaaaaagagagatgggggagaaaaaagacaagagggaaagtatttctcttgattcttggttaaatttgtttaataataataatatcctaaattttttatatttaatctttttttcccttacaagaacttgaagttttttttttaatttttataatgtactgatgtggttcagagagataaagcactttagtacatagtcactctttttagtacaaacaaatcatttgggaatacctaaagattgtagagncattncctttatcactgacacattagtgaccatngggaagacc

SEQ ID NO: 1144 - DNA, 762 bp, Homo sapiens
  misc_feature (709)..(709): "n" may be a, t, c, g, other or unknown
  misc_feature (734)..(734): "n" may be a, t, c, g, other or unknown
  misc_feature (752)..(752): "n" may be a, t, c, g, other or unknown
caccgatttatggtgctgacatcagtggctccttgtttgatgaaaacactaaacaatggaatcttgggcacctgggaacaattcaggacctgctggaaaaggaatgtggggttgtcatagaaggcgtcaatacaccctacttgtactttggcatgtggaaaaccacgtttgcttggcatacagaggacatggacctttacagcatcaactacctgcaccttggggagcccaaaacttggtatgtggtgcccccagaacatggccagcgcctggaacgcctggccagggagctcttcccaggcagttcccggggttgtggggccttcctgcggcacaaggtggccctcatctcgcctacagttctcaaggaaaatgggattcccttcaatcgcataactcaggaggctggagagttcatggtgacctttccctatggctaccatgctggcttcaaccatggtttcaactgcgcagaggccatcaattttgccactccgcgatggattgattatggcaaaatggcctcccagtgtagctgtggggaggcaagggtgaccttttccatggatgccttcgtgcgcatcctgcaacctgaacgctatgacctgtggaaacgtgggcaagaccgggcagttgtggaccacatggagcccagggtaccagccagccaagaactgagcacccagaaggaagtccagttacccagganagcaacgctgggcctgagacaactnccttccactgggcccggnattcccttgg

SEQ ID NO: 1145 - DNA, 763 bp, Homo sapiens
  misc_feature (700)..(700): "n" may be a, t, c, g, other or unknown
  misc_feature (717)..(717): "n" may be a, t, c, g, other or unknown
  misc_feature (746)..(746): "n" may be a, t, c, g, other or unknown
ggccttttttttttttttttttaggagatggagtgtccctctgtcgcccaggctggagtgcagttgagcgatctcagctcactgcaagctctgcctcctgggttcaagtgattctcctccctcagcctcccgagtagctgggactacaggtgcatgccgccacgcccagctaatttttgtattttttagtagagtcagggtttcactgtgttgcccaggctggtctcgaactcccgagctcagacaatccgcccgccttggcctcccaaagtgctaggattacaggcgtgagccaccatgcccggctgagagtcctcatttctaataagttcccaggtgatagcaatgctcctggtctggggaccacattttgagtagcaatgagatacatctgtgctgtccaataggcagccactagccacatgaggcaatttaaattctcaattaattaaaatagaaaattcagctcttcagtcacacaagacacatttcaagtactccacaactaactgtggctagtggccaatatagaacacgtatagatgtttatagacacctatagacatttacagaatatagaacattttcattatcacagaaagttctgctggacaccaccacttttatcattccatcattaaagagtatgtaaatcttgtaagagggtcaagttcaaagcagggatatcagcgattgcctnttaaccttataaggagnttacttgggactcttaagtgatggctgangactgatctaaaagtga

SEQ ID NO: 1146 - DNA, 878 bp, Homo sapiens
  misc_feature (877)..(878): "n" may be a, t, c, g, other or unknown
aagatgctaagatcatagaagcaagaagatgctagttaagtattattaagtaaataaggattccagccactagtatttctagctgggtgagactgataatactacttaaaaagaaaacaaatatgtcacattcgtagtaactgtcgtgtttagaccttgatgcaacagagtagtaaataatgtcatttatttgtggtgttccaggaagagcttgtgaatttattttactgacattttgttaccatcagttgagtttcatgtatctggttttcaatttgagtatagtgaaactttattaattcaatatcatgaatttaaatttattgtgaaaaaacaccagtgtttgttggctgaagtttacatcagcattggatgtgaagaaaggggtccgataaccaaaaagtataaacaacatagttccagcattgttaatataccaagagaacaaattcttttcaatacttagtgaacagtatgcaaattcatcctgttcgttacgagttaggttggtctatttattaacatttccttttgggactattataaagtgaatataacacaagtgcattgttgtaaaaacattcagtaaatttaatgattaatgcaacaattgagactgggattcaggggaattccagtgattctaaaatgccatcaattagaataatcaacattttgaagataatagtttttctgagaagtgtgggatagaacccttattttaaatggacggttatcttaagacatccagttaaaataggaaaaaattaacatctagaatctaattaatgagggttactctaagattggttaaaaatatgccctttaaaatctattggctctttggtttatttggaattttaaccgagatgaaatnn

SEQ ID NO: 1147 - DNA, 817 bp, Homo sapiens
  misc_feature (655)..(655): "n" may be a, t, c, g, other or unknown
  misc_feature (725)..(725): "n" may be a, t, c, g, other or unknown
  misc_feature (767)..(767): "n" may be a, t, c, g, other or unknown
  misc_feature (811)..(811): "n" may be a, t, c, g, other or unknown
aaaaaatgctgaactgctctttggaagtcgccggtgctgttgtagttggagtctgttcacgggcctgagcttcgaggccaggctcccgggtgtcgttaatgttcggggccgccgggcgccaaccgatcggagctccagcagccgggaacagctggcatttcagtagaaccatggaggagctggttcatgaccttgtctcagcattggaagagagctcagagcaagctcgaggtggatttgctgaaacaggagaccattctcgaagtatatcttgccctctgaaacgccaggcaaggaaaaggagagggagaaaacggaggtcgtataatgtgcatcacccgtgggagactggtcactgcttaagtgaaggctctgattctagtttagaagaaccaagcaaggactatagagagaatcacaataataataaaaaagatcacagtgactctgatgaccaaatgttagtagcaaagcgcaggccgtcatcaaacttaaataataatgttcgagggaaaagacctctatggcatgagtctgattttgctgtggacaatgttgggaatagaactctgcgcaggaggagaaaggtaaaacgcatggcagtagatctccacaggacatctctaacaaacggacaatgacccagccacctganggttgtagagatcaggacatggacagtgatagagcctaccagtatcaagaatttaccaagaaccaagtcnaaaaaagaaagttgaaaataatcagaccagggaccaaaaatnccagatgaaggagtagttttagaaagtgaggaaaccaacccganccatta

SEQ ID NO: 1148 - DNA, 651 bp, Homo sapiens
  misc_feature (294)..(294): "n" may be a, t, c, g, other or unknown
  misc_feature (495)..(495): "n" may be a, t, c, g, other or unknown
  misc_feature (595)..(595): "n" may be a, t, c, g, other or unknown
  misc_feature (600)..(600): "n" may be a, t, c, g, other or unknown
  misc_feature (637)..(637): "n" may be a, t, c, g, other or unknown
tcagattatgattaaattagatattaaacacttcaaccacataagaatattgaggactgttgaatgagtcctgtgctctggtggtcctggaacttaattttatttatgaattttcagtcattagagaagagtatggtgtggatatgggaggttggattagccgactaaactttgaagtttgcaactttagcagatgttgggatagaagttaacacagtagttcaaattgatttcgcacttcatggtttatagaaatgctttcacattcatatctgaatatttgaaacaacctantgggtaggtaggtaagcaattttatctgtgtttcccatggaagaaactgaggctgggagatgttcattgtttgttatccaaggtcatatagctagtaagtagaagagtccagatgcaaacccaggccacctgaacaatgttcacatcattttaccatggagaagagattagtgcttttatttgtctaacactctggtcagngaaattaaagtatctccgtgtgaaacagcatgcaaaaggctttggttctaatatttttaacaaatccctttagatcgttgggaattaaacaaatacctanggcantgtggacttacctgaagtcttttgacattttatgaanttctggtaaaccta

SEQ ID NO: 1149 - DNA, 699 bp, Homo sapiens
  misc_feature (611)..(611): "n" may be a, t, c, g, other or unknown
  misc_feature (663)..(663): "n" may be a, t, c, g, other or unknown
  misc_feature (672)..(672): "n" may be a, t, c, g, other or unknown
atgatagtgagtggccctgtaagatcctagtgggcctctggaatcataaaggaagattcagttatgtacaagatggctttggtgttaggtcaactgattgtgttctgattatttagaaattagtaatcactgtactataaggcaatttggcagaaatgggaaaggttgagttagccagatcttcccattccgcattcacaatccaaacaatatgaactccaatcaaattctgattttataattttggtaacaaaatttcattcaaatatatgccttcttgtgctgtgaacagagttttcctttaactttgcatcctttatccccctttaaagatgcatcccttccgattgctgtggtgtgattttatagctccttgagttgtgctggtatctctgtgcttccctttggagagtactaggccttcaggttaggatgaatcctaacacttggccaaggttaggaagggctttgagcactgaaagaaaaccaaggtaaaatttaaggaattgttagaagattcatctgagaaatgtagaattgtaatccacaaactttatgtccgtagaataggaagtatttagtaagcagctagctgctagaagggattttgnttgtttaaaaaaaaaagaaaaagtctgtctttgacattggttatatctaggntttatcatnccgtgtaaagggttcttaagttccttg

SEQ ID NO: 1150 - DNA, 794 bp, Homo sapiens
  misc_feature (740)..(740): "n" may be a, t, c, g, other or unknown
  misc_feature (746)..(746): "n" may be a, t, c, g, other or unknown
  misc_feature (773)..(773): "n" may be a, t, c, g, other or unknown
ctttacttctctgagcctctgttagctcatctgtaaatggggactttcttctgccccagattatggtgaggattagatggcacaatctatgtgaaattgtgagagcacgtagtacagtgcctggcacacaacagattctcagtctatatgccatgtcattcctgcctatcattgttcttggcaagtgtagagtgaaagcctgtggccatacatcttcatgagccatcagcatccccatagccaccgtctctgcttatctcaggccccaaagactctggctttttccctaagagaaacctctttacctatttctcaacctcagtgtaaaatataagaatgcaaaaaaggttagctattagatgatagaactcaaacgatggtaatactaaactgttaagggttcacacagaggtttaaatgcacataccattgggtacagctgtttcgcttcagagaacttatcctgtaggtatagttagacatgcatgcaaagacccacataaaaggatgttcattgaaacataattataatagcaaaaagttaggggagagaaacagtaactgcctatcagtaggagactagttaactcaattatggtctatccacatagaggaatattacgcaacttgggaaaacttgagatagatccaagctatattggtcagttaaaactcagagagcaaaattatgtgtgtaatatgccaagattttcaacaaattcctggttgggggagaaaanctgtantaggagacaagaaaaacccgggtttanggtatatggccacttggattc

SEQ ID NO: 1151 - DNA, 712 bp, Homo sapiens
  misc_feature (685)..(685): "n" may be a, t, c, g, other or unknown
  misc_feature (691)..(691): "n" may be a, t, c, g, other or unknown
  misc_feature (710)..(710): "n" may be a, t, c, g, other or unknown
gaagaatgtgataaaggacatgatgattagagaaaaatgttgtttcaatgttaaatgtgctgaagctgataatactgtggttttataagagaataaccatattcttaggaaataatctaagaagtgtttaagaataaaggaccatgattctactgtgtattggttcaaaaaaagattgtgtgtgtgtgtgtgtgtgtgtgtgtagaaagaggtaataaaagcaaacagtaaaatggtatcagtaggtgaataggtaaatctgggtaaaagtatatggtgtattctttgtactattcttgtgactgttgtgtaaggtttaaattatttccaaataaaaattttaaacaatttttaaagtttaaaaagttaaaatatagcacatctcaagaattttcttagtcaaccaattataacagaccatactctaggatcatcagttttggattatttcctttgatttgttgatgaagcactaaactgaaagcaataggaaattttctttatagctgtagtttctacctattgaaggccattagcttctattaggagattgtattgaattggatacatttatttttcacaaacaaaacaaagtctctaattttcacttgtacttctagctagatgaaagagagaaagtggccatgtgccgtggctcacacctgtaatcccagcactttgggangccaangtgggtggatcaccctgangg

SEQ ID NO: 1152 - DNA, 807 bp, Homo sapiens
  misc_feature (623)..(623): "n" may be a, t, c, g, other or unknown
  misc_feature (658)..(658): "n" may be a, t, c, g, other or unknown
  misc_feature (741)..(741): "n" may be a, t, c, g, other or unknown
  misc_feature (786)..(786): "n" may be a, t, c, g, other or unknown
  misc_feature (800)..(800): "n" may be a, t, c, g, other or unknown
ctttaccactctaatttttttttgtttgagtaaatgagagcaggccttctcagaggcagctgacatcagacagagacttcctttgcggcctctctggttctgttcctctcttccccgtagctggtatttgtagtgacacctgggagccacagatttgcttagcaacctttctccagggtgaacagggtattcacaactcctgaaccaaggcgtgtggctggtatcattttgtggggccagaacgcattgcgtggagaaattcagtgatgacctggtccccacgcctgctgctcagggccccatcaccctcgtgactgtcagtggtgctgcttcccacgtctcctaagagggcttcaggagaacgtagaacgaggtatctgtctcttcctttcggacctggcctttccatttggccatatgtcagaatttccagctgccctaggggcccaggaatctgtattttagttgctttccaaataattctgctgcccagctgtatttggagactatagccttaaatcagtgattccccgtcagtggtgactcatgaagagcttagatgtgggcctggtgtgtggttggtggcaaggggagtctttcagatcccttctgcttggtgctgntggtggcaggaaccgtgcatgttatggtggctcangcctaatcccatctggttgggcatctcgcctgtctggaaaacaggtcccggagccatgcacaccaagcttctaaggaaggcanaaaagcacttcccgactttaacaaagacatgttggaaggtggacntctggccctttaancacctca

SEQ ID NO: 1153 - DNA, 820 bp, Homo sapiens
  misc_feature (699)..(699): "n" may be a, t, c, g, other or unknown
  misc_feature (726)..(726): "n" may be a, t, c, g, other or unknown
  misc_feature (765)..(765): "n" may be a, t, c, g, other or unknown
  misc_feature (806)..(806): "n" may be a, t, c, g, other or unknown
gaaaaacaaaaagaatctttgttttaccccgaaagagaggcagaggcagaaagtcttcttctgctttttgcatctctaagaggctgaaaaagagaatggaagtgctggggcattttggccagggcagtaatggatatttggagttggcacttccctcagctagaggagtctcagtgtgtctgagaaaatggcagtcagccatccaggattttaggagcaacgccactgctctgtgccacatcagaaatcaggcatggccccaacctgaaggaacttgtagcttaatggggaagcacaccaagaataaaagagcctccagaacatgtggtgcctgtggtcctgagacagcaggaaatggctctcaggccagagttgctggaagaacccatgtggcaggatcggtgggaggcagttacagagggaaacgcccatcccagcaactaggggaggccgccactcctctcgtggatggatgatattcttgcttggggatgttgagacagctgcactctgcatagttcctgatttgcctctctactgctgatgaaaaacctctctttctctatagctgctgcttatattggaaggcttttggttattcagcacactcactcctgagcttatttcagtgatattccttggttatttcgaaacatggatgcttgtggcagatggagagcctgggtgtcacagatctgnctgggtttgaaatgcataccatgttgnccgttggttgattgattgacttggaccacgaaagaaaantttactgacagctttcaaggtagggggcaattgtagctttnttgcaaatgttgcc

SEQ ID NO: 1154 - DNA, 760 bp, Homo sapiens
  misc_feature (758)..(760): "n" may be a, t, c, g, other or unknown
atagactaaaagcaaagacatggaaacagatatttaatgtaaatggaaaacaaaagagagcaggagtggcaatatttataacagacaaaatagatcttaagtaaaaaaactgtaaaaatggataaaaattgtcattatatagtgataaaggggtcaagtaatcaaaaggatatgacaactttatttcagacatttagagagaaggatgtaacaactgtaaatatatacacccccaacactggagctcctaaatatatgaagcaaatattaacagatctgaagagaaagacagattgcaatatgataatagcaggagaatttcaaaccctattttcaataatgaacagatcatccagacaaaaaatcaataaggaaacattggacttgaactacacattagaccatgggtgtccaatcttttggcttccttgggcaacattggaagaagaagaattgtcttgagccacatataaaatacactaacaatagctgataagctaaaagaaaaaaaaatctcataatgttttgagaaagtttacgaatttgtgttgggtcacattcaaagccatcctgggccgcatgtagcccatgggccatgggttggacaagcttgttttagaccaaatggacctgaatgacatatataggacaatatatccaaccccactaaaatacacattcctctcaagtatacacacagaacatattccagaatagatatgttaggccacaaaacaagtctttaaaaatgtagtccnnn

SEQ ID NO: 1155 - DNA, 871 bp, Homo sapiens
  misc_feature (833)..(833): "n" may be a, t, c, g, other or unknown
  misc_feature (846)..(846): "n" may be a, t, c, g, other or unknown
  misc_feature (856)..(856): "n" may be a, t, c, g, other or unknown
tgattgtaagccataggatccccatttcagaatggatccttccccatacccagaaggaagaaatgcttcagagagagtccccaagaggaatctaaatagataggccttgctgggatttcccctccatctataaacattggctcatatcctttgtgtccaattatatttctacacagctgttcatacttggctgaacctatgcagaaaaatgaacagcttctcctgtgtcttgggccttcattctgaaggcttttctgtcgcataaaattatggttaaataaatttgtaagcattttatcctattaatttgtgtcttgtcagttgattttcagcaaaccttcagagggtgaaagggaagttttccattgccccaacaggaataaatagccctagtagtgctttgaacctatctaataagttataaaagaaaaccagaagggaccaaactgtaaccaagtaactgaacttttcagatgactcagaataactacagaggtaaaccctactgggccataaaacaaatctcaataaatttaaaatgatccaaattcatacaaatatattctcagaccacaatggaaataatgtaaaattagtaacagaaagatatttgaaaaaattccttaaatatttgaaaaccaactataacacacttctaaataacccatgggtcaaataaggaatcaaaaatggaaaataaaaagtagtttgaactaaatcaaatggatatacaacataatcagactttgtgagatgctgctaaagcagtactttgggggaaattttagcactaaagcttatattggaaatgaattaagatctctaattagganctagctttcactntaagcaaccngaagataagtccaat

SEQ ID NO: 1156 - DNA, 872 bp, Homo sapiens
  misc_feature (738)..(738): "n" may be a, t, c, g, other or unknown
  misc_feature (845)..(845): "n" may be a, t, c, g, other or unknown
agaaggaaagttcctcaacataacagaagccatttatgaaaaatctacagctgatggaggaatattttccaagcaaatggaaagcaaaaaaaaaaccagggattgcaatcttagtctctgataaaacagactttaaaccaacaaagatcaaaagagacaagggcattacataatggtaaaaggatcaaagcaacaaaaagagctaactatcctaaatatatgtgcatccaatacaggagcacccagtttcataaaaaaagttcttagagacctacaaagagacttagactcccacacaataatagtgggagactttaacaaccccgtgtcaatattagacagatcaataagacagaaaattgacaaggatatccaggacttgaactcagctctggaccaagcagacctaatagacatctacagaaccctccaccccaaatcaacaaaacatacacttttctcagcaccacaatgcacttattctaaaactgaccacttaattggaagtaaagcactccttagcaaatgcagaataagggaaatcataacaaatagtctctcagaccacagtgcaatcaaattagaactcaggattaagaaactcactcaaaaccacacaactacatggaaactgaacaacctgctcctgaatgactactgggtaaataacgaaatgaaggcagagataaagatgttctttgaaaccaatgagaacaaagacagagcatatcagacctntgggacacatttaaagcactgtgtagaaggaaatttatagcctaaatgcccacaagagaaggccgagaagatctaaaatcgaccacttacatccaatttaaagactngagaagccaggagcgaccaattccaaa

SEQ ID NO: 1157 - DNA, 854 bp, Homo sapiens
  misc_feature (641)..(641): "n" may be a, t, c, g, other or unknown
  misc_feature (723)..(723): "n" may be a, t, c, g, other or unknown
  misc_feature (777)..(777): "n" may be a, t, c, g, other or unknown
  misc_feature (795)..(795): "n" may be a, t, c, g, other or unknown
  misc_feature (832)..(832): "n" may be a, t, c, g, other or unknown
aaacaactatgatgctaattaggaggaggaagaatgttttcaaagtctttcaccaggtatcgatattcatctcaaagagtttgaacaacagattcaattctgtgtagggaccatttcttcatttattctttattcctactaaatcagaaataccaaattcataagtcatttggaagggtaacaaatgttcgatggtttgtcaactagtcttgacaaacggattctacaatgtacagaaattatggagacagttttcactgatagatgttcagtgcctcaaaggaaactcattaagatgagggaatggcctctcaaatggaacaggattgctgaatatatcaacacaaaagatcactagcaaatggattcctaatgaattcctggttgaatttgcctccgataattatgtattcatattcagtttgagcattcagatgtgttaaatatggccaataatagcactgatttatttcctcctttaatttagaatatctttaagtagttagaaggaaacccttgttaactaatccattgacatcaaaatttaactttttaaggaacttttgctgtctctcactaaatattagaaatgatgatatgttgttcgtgaagtcataaagtcaggcttctccactctctgnttgatttttatgtgtatgtgctgctcataaaaatcatcacactggtagagattcttggtctcacaatgcagattcacagtgnattttctcctgaaacttgtattttctttggacctttatgccaatgatatataanttgcagactatttcatgnctttctacttttacatctccgatggataatggtgcancattaattcatttgggggaagt

SEQ ID NO: 1158 - DNA, 858 bp, Homo sapiens
  misc_feature (658)..(658): "n" may be a, t, c, g, other or unknown
  misc_feature (692)..(692): "n" may be a, t, c, g, other or unknown
  misc_feature (699)..(699): "n" may be a, t, c, g, other or unknown
  misc_feature (821)..(821): "n" may be a, t, c, g, other or unknown
  misc_feature (824)..(824): "n" may be a, t, c, g, other or unknown
  misc_feature (834)..(834): "n" may be a, t, c, g, other or unknown
ctgatgcatgacctctttgacagttgcctttgttcatgattcctagtttcctggtttattttattggggtacagggtgaggtctggaagacctggaaaggaaactcacttttttggtttgacagtattaatgcaatcatctagttcataccttgtaagcccacttattatttcctctgcgtgtgttttttctggtttagcggattagctgcactgtctcttcaaaggctgtccaatcaaggaggggttattaaaaccagggcgatttatgactgagaattaattagagaagcattttcatgcacaacatccaattttttgattagcaatggagcagggccgcaattaacactcgaggaagcttaaatttccagctttttgattctcaggaaatgagattatcaaaccagggtcagacacttgacagcaaagtgggagtgggggagtgtgaaattatatgtaaaaaaaaaaaaaaaaaaaaaaaattccagagtctagaaattcggtcatttttctctttatgtaatggtaagaattaagaatcctcacatctgcaaccaaaaatacaagcctggtgtgtaacactaaagggtaaaacagggatagatataagctgttatgctattcttcaggcaacactgtggataagtgacattcanatgtttactgtaaagaaaaatttgaatcatttgnattgaanggcttttagaaaagagcattactacccagaactgagaagttgaaaatttgaaggtgtgaagattaagagacgcgttactttaaaagataatttaaaaggtatctttccaggcttgacccggnggnccacttcttntagccttaacactttggggaggct

SEQ ID NO: 1159 - DNA, 841 bp, Homo sapiens
  misc_feature (753)..(753): "n" may be a, t, c, g, other or unknown
  misc_feature (803)..(803): "n" may be a, t, c, g, other or unknown
  misc_feature (821)..(821): "n" may be a, t, c, g, other or unknown
gcaaaagtaattttatcagaaacagtttattttgggggctggataacttgggtgagagtgtggggaaagaagtaccttaccaaaaaggagaagcaactgaccctgtggcctgagccacattgtcttccatttcaacttcaatgggctggcagtataccacttctgacctcaaagaatgaatggttccaattctggcttgtcattggtccttgttatctaaattaaatatttttaggaaatatatcaaaagtatcctagagccccatggcaaagtgtcagaggaaatagttttcattatattttaggaagctgtaaaaacataagcccaagtattttgtgtcatctgcatatgtcaggatgaagaccaggcatgtaagaaatatcctaaagtagccaagtgataatctcatgaaaaaatatgagaatcgtttttacagagtgagttctcttttgaatggttttgactatgcttttaaaaacatttttaaaatgtacttacatctttttcgatagcccacgtatttcagaatatcctcttgatagaataatatcactcagtgtgatctttagaaaaagaaaaactcggtggtctcatatcttttgacagttgtttgtgaataataccctccccaacaaccttcccagtactcaactgctatgtaagaatgctttcttatgtggtaaatgtctcagtattttgctgcctggtatttggtcagtttccttggatatctcaaggtcagaaggaatcangctttctccactctgaaacattcagacttactttcttttttgggcagccntttaacaagcaaggacantaactccttttgtcagaatc

SEQ ID NO: 1160 - DNA, 725 bp, Homo sapiens
  misc_feature (661)..(661): "n" may be a, t, c, g, other or unknown
  misc_feature (711)..(711): "n" may be a, t, c, g, other or unknown
  misc_feature (717)..(717): "n" may be a, t, c, g, other or unknown
cagttgctaacatatctggttgtttccccattaataatgctaagattgacacctggatttagggggccatcatatttatttaaaattccttcaataattcaagcttattcaagctgcgagacttgcttaaagataagtgaaatatctaatcacaagggaagtctgttttcaaactatataaacaataacaggagtcataacagttgttttcttagaactgaatacctaacaattctgcagctctttcctcggtattttattataagcagattatatcttaattgttcccctttgttttcaaaggtttttctcttctttgcgtgaatcagtttatataaaaacatatatattcttattttcagaggtattctgctctgaagaacggttttactttataaggcatcagttccctctaatattagaaccttacaaagccacagcactttatatgttgcaaagcaccctctccatgaaaattggttctagttgatgcaacagacaaaacccgcaaatcacagtggcttaacactacagagagttatttcttgctcatgctagatttgatgtagctctcctgttggcatcactcttttctgagtagtgactcctggtcatgggctgtttctattatgtagctacactgattgctacacggggcttncatgccatggatgaagtgagaaaagagagcctcaggattcattagggtgntttcangcttacat

SEQ ID NO: 1161 - DNA, 804 bp, Homo sapiens
  misc_feature (758)..(758): "n" may be a, t, c, g, other or unknown
  misc_feature (775)..(775): "n" may be a, t, c, g, other or unknown
  misc_feature (789)..(789): "n" may be a, t, c, g, other or unknown
gttttataaatggggtagggaccaactgaaagacaggaaaataaggcccttgatgccattaatcttttatcctcttgccctcattggtatcttcatcccaccttgggtcccagtcccctctcctgttcccacaccacctgtcacatgcaagggatgatggctgtctgctcctgggtctatgctttgtggaagaaggatgctgtggagggagcatatccaagctctaaagtggcattctctcccaccctttgcagttctgcctcctgggggcattgctggcccccatccgagtgcttctggcctttatcgtcctctttctcctctggccctttgcctggcttcaagtggccggtcttagtgaggagcagcttcaggagccaattacaggatggaggaagtaagtgagggatcagcccccagagaccctacttctcttccctgctgtctattcggctccctctttgagaagaagaaaagagagcattctgaaactattctgtctagcttgggtagatgagatgagtcagccaagctcagacgtggttcccagacctcacctctaagtaatgtgccctgataggtcccaaagtggccagagaccttggccccttggtcacatcctatttaagggtaaaagaggggtgccctactttcccggtgtctgaacctgggggcgggtgaaggttagaaccactgcttccgctgatacccaaccttgcctgcaaggatgtgtgccacaacggggtgctaggcctgancccgcctgctggttttnctgctgggctttcntccggaatccgttcc

SEQ ID NO: 1162 - DNA, 861 bp, Homo sapiens
  misc_feature (776)..(776): "n" may be a, t, c, g, other or unknown
  misc_feature (836)..(836): "n" may be a, t, c, g, other or unknown
  misc_feature (845)..(845): "n" may be a, t, c, g, other or unknown
tcacttttggcctaaatcagctcttgcaccttaggctgtttaaaaaatatgatgtcaattggaaagcatcccatttggtgctgtttctactttttttatttgaagtatcctgacgcagttgttttctggtgagtagaccatctgtcctaaatatatccaataccagtttgcaaagtctttgtcaggtgcatcctgcatagaagctaaataaatacttttttaaataataaatagaggcgagagatattttgaaggtacatcagtgggatttgctgactgattgagtaagagagttttcatagaggaaaaggagatagtagtcatcactggagctaagatttctgacccgtgtgcttcaacatatattttagatttgaaatatgtaatttttgcagtagtaaagataaaagggaaaaattcccagtgccgctcatatttggctcgtgggtctctcgtgctctttgctgtggcaccatcaggtgtctccggattctcaagctatcttcctgcctttgatgtatttcaggaaccttttattattagcatggggacgcttttcagggctctcctgagttgctgtgggtccacccaatttcttgtttatcccagcagcaccggcctttgacctcgccatccccctggcctggctttgggaggccctgtcagcccatacctctgactatgacggggttgcatggggctgccgcttgctgtaaatctgaagagcaaggcctagatggccctgttcccaagctttctgcaaatctacattctantctggttgctaaaattctttatcatcagcccaggagtgctattcaggaggctgcctaatnatatattanccataaacctaacagc

SEQ ID NO: 1163 - DNA, 855 bp, Homo sapiens
  misc_feature (775)..(775): "n" may be a, t, c, g, other or unknown
  misc_feature (848)..(848): "n" may be a, t, c, g, other or unknown
  misc_feature (854)..(854): "n" may be a, t, c, g, other or unknown
ttaatagattgaagatattattaaatacattctgcattaatattatatgtcctctttgaatccaagtggcaatacaatagaatttcattttataaataacacctttcaagcgaacaccacagggcacagtacataagaatcaaaatagaacacaaatgctgtaatcaaatgcagaccccaggaaggctgattaaaaaggcatgttgctactaagaacagccgacaggttaagtatagtgggtcatagcagaaaagccagcagaacagaagggcaaactaaaataaaatggacttgcctgcctgaatcacacggacttatgacattcctttgtcttcatctctttttgaactcaggaattgcaggggagaggggggtgtgcatgtgtgttggaggagagaactaaacatagggtcattaaatttatcctcagtactcacgcatagcacaaacaaaaggaaatcataaggataaccacctgcagctggcagagatgcctacagtgtgattgtgagacaacccaacatggcttgctttgctggataccactggctttaagaaaacacaactgtgaggtaacaagtagaccccttccataatagtgagaacagatagtgctgatggccagacataggtaaaaacggatgaatggtgagaaagatgttctgtggtcctgacctcagtatagtctactctctacaggactctcctcacccaattagcttttctgctctcagcctctcacaaccacgctccttgctaatggcaggtgtttgngggttttaaactctcctgtaattattccgcaaaagcacctggtcccttcttaagggaattaaggcaaaagttnggggang

SEQ ID NO: 1164 - DNA, 876 bp, Homo sapiens
  misc_feature (761)..(761): "n" may be a, t, c, g, other or unknown
  misc_feature (847)..(847): "n" may be a, t, c, g, other or unknown
ttcagattgcaaagttatataagaaatttcacaaaggggaaaacacaaaactggtacaactaagtgactgggaaagatataaaatcatgtagactcacttcacccacaaaatggtaactcctgaattaaacttcatgtgttttatttaggctttgtcaagttagctatggttgtattaaagcagattgtttgattttgataaatagttttccttaatacatgggaaaatcgagttgtgtgaataaagaaatataaaatagcttttactcagttgtcccatttgtcagcattgatgggtaataaagattagtgttactttttcttctctagtgtagatattttctcaaaattgtgtgtttgctattgttttatttttgaaggggaaaaaggtatacattttatagctactaggagttcaaatacagtaattagaaaggacacacgaattttgaaatagtattttatgcctcttgatctcaggtacaatacacgagatgaagcagttaaatagcaaagcaagacagaagggtcagagaattaaagtaagtgttttctatatattgcatctgtgttcccattaatctctgttttgttatgtaactgctccttctgaatgttctgaatgtgaagaaaactatgagtaagaaaaagggtgtgttttaaagttaggtttaaataaagccagaagagtaaaatgtttttactcttaagttctgtttgaaacagcacctgcctataaattataaccctaaatggttttnggataagaaaaaattgggttgtgatgatgtaaagcacctttaaatctcttgctagcagatatttaaaggtgaaagaaagcccattncggatcagaattggccatggttcctttta

SEQ ID NO: 1165 - DNA, 743 bp, Homo sapiens
  misc_feature (649)..(649): "n" may be a, t, c, g, other or unknown
  misc_feature (694)..(694): "n" may be a, t, c, g, other or unknown
  misc_feature (722)..(722): "n" may be a, t, c, g, other or unknown
tgcttttgtgacttgacttagaagctgaaattgggaatttccttagatgagacagtacatagttcatctgtgatatcagatcagttcaccaatacatgctacatacttgtgcccctgaagctttgtaaaggcctaggacattccagttctcctcactcagtttggtgaacaaggacatgcccatgtcaagtacagtaccccatgagacactggctgagtggggttatgtgtcatttcccatgtcctcagtcagcagatcctctttggccagtctgcatctttcatgcaaggagagagcttcatacccacttcttggtaagcagggtcttcaaatgtcaaacgttctttggacagatggcttccagtccacagaagcacttcttctagtgcttccccttcactccccaagaggctgcttcttgactaatgactgtgggacctaacttggtcgttcaggtgacaaagaatgttccccaagtctgtagctgacaattgatggttctctctgaacagcgctttagggtgggcttttccccccactctttttagagacaaggtcttgctctgtcacccaggctagagtgcagtggcaccatcagtgactcactgcagccttgaatactgggctcaagccatcctatcccctctnacctcagccttccaagtagctgggactacaggtgcacaccactgnactcagctaatttttaaattttttgtanagatagggtctcactttggtg

SEQ ID NO: 1166 - DNA, 861 bp, Homo sapiens
  misc_feature (550)..(550): "n" may be a, t, c, g, other or unknown
  misc_feature (814)..(814): "n" may be a, t, c, g, other or unknown
  misc_feature (853)..(853): "n" may be a, t, c, g, other or unknown
  misc_feature (860)..(860): "n" may be a, t, c, g, other or unknown
tgtgggggataatgagatgttagtctgaagaaaggcagattgaagctggattttagaaggttggtaataatgaattgagaaattttacctttgtccgataaagattctagagagccattttcatggtagtgggtaaaaatggtttcgaaggagagacaaagtagagcagtgaattagcaaaactgtcctgataatccaggcttgagctttgaataaggccctgagatagaatagtaaaaataggaaagcagcaacaggcttgccaaagagaggttatgagttaggttcagatatattgagttcagatattttgggaaattcaagcaacagtagtttagacagagaagtcagagttagagatgtcaatttgcttatttctaaaaatttgtcattctcataaattatgatagtgagtaagtacagggttatttttttcatcttttatatttgccattgtcttaggatagtacttaccccaaatgttacattgaattttgtagagttcattaatgtgataaactaggtcatgcatctgagggagaaagtgtanagagtgaaaagggctgaaagtggaagttgaggatctgcctacatttgaagatcaggagagaagccggaagagtaattcaagctttgtctttccttctcatggccatgttatgctagatttagcagtagcctcaaagatggagaattaagtcagtcgagagcagccagatcctcagtcctcttctctttctcattccagtctagacttttgacttactctttgaggacttacaacactggcattttattcacattattggacatntggccatctattccacgcttgaccagtgctttaaaaggntttttang

SEQ ID NO: 1167 - DNA, 817 bp, Homo sapiens
  misc_feature (761)..(761): "n" may be a, t, c, g, other or unknown
  misc_feature (797)..(797): "n" may be a, t, c, g, other or unknown
  misc_feature (810)..(810): "n" may be a, t, c, g, other or unknown
tcggactctgtgtcctcaaacagccctttccactttgtaccttgttgtgccagatcatacctctagggaattgttgagaaagcctgattgctgtttaaaggtacaatggaagtcttgagtttgagaagtaatgttgactttgcccttccttctccctagtgctgtgatgggctgtttcctgatttggtttcatatgctcctcacaacaaccctgtgaggtggtccgttggcagaagctggtatgactggcagttgtctcgctagaggaaccttctacttcataccataattaaacggcttctaaaataatatgatgtctttaaattttaagtctggcattatttgtattagctgtttttttaactttattattaaagaatttctaaccataatatttagagaaagagtggtagagttaacctcgttacccaatactttcttccctttccttttataaaaacactgcatacggttttttgtttttttgtttttttgttttttttttaagagacagggttgccctgtcacccaggctggcctcaaggaatcttcctgcctcagcctcctgagctgggactgtaggtacaagccaccatgcctggctcacaatacagtttttttatctgaagcactcagtttacttttttgctcttttatgtcaaatgaatataaagttgatatcatcctctgaccaattaaaacattcttttcagatattggtaacccgtggcctggcaagaccccgtcctggctatccaaangcactttaacagcagctttttctctagcggtaccgngagtaagaacccntagctga

SEQ ID NO: 1168 - DNA, 872 bp, Homo sapiens
  misc_feature (753)..(753): "n" may be a, t, c, g, other or unknown
  misc_feature (759)..(759): "n" may be a, t, c, g, other or unknown
  misc_feature (845)..(845): "n" may be a, t, c, g, other or unknown
  misc_feature (867)..(867): "n" may be a, t, c, g, other or unknown
  misc_feature (869)..(869): "n" may be a, t, c, g, other or unknown
cattattgcagccctagcagcactccacctcctattcttgcacgaaacgggatcaaacaaccccctaggaatcacctcccattccgataaaatcaccttccacccttactacacaatcaaagacgccctcggcttacttctcttccttctctccttaatgacattaacagccatcacagcacgcctatcggatgtgagaggagaagtcccgctgctcgggcactgtctatatacgcctaacacctacatatattttaaaaacattaaatataattaacaatcaaaagaaagaggagaaaggaagggaagcattactgggttactatgcacttgcgactgatttcttggctttttatcattttgaactttatggaatacatcggcagccaaaacgcctcccggggaaggcgccagcgaagaatgcatcctaacgttagtcaaggccgccaaggaggctgtgcaacatgctcagattacaatggatgtttgtcatgtaagcccagactattttttgctctggaaagaattggcatgaagcagattggagtatgtctctcttcatgtccaagtggatattatggaactcgatatccagatataaataagtgtacaaaatgcaaagctgactgtgatacctgtttcaacaaaaatttctgccaaaatgtaaaagtggattttacttacaccttggaaaggcctttgacaattgcccagaagggttggaagccaacaaccatactatggagtgtgcantattgngcctgtgaagtcagtgaatggaatccttggagtccatgccccaagaagggaaaaacatgtggcttcaaaatagggactgaaacacnggtcccagaaataatccacatncntta

SEQ ID NO: 1169 - DNA, 679 bp, Homo sapiens
  misc_feature (546)..(546): "n" may be a, t, c, g, other or unknown
  misc_feature (597)..(597): "n" may be a, t, c, g, other or unknown
  misc_feature (629)..(629): "n" may be a, t, c, g, other or unknown
  misc_feature (669)..(669): "n" may be a, t, c, g, other or unknown
ggccttttttttttttttttttggagacagtctcactctgttgcacaggatagactgtagtggcacgatctcggtttactgcaaccttcatcgcctccctggttcaagcgattctcttgtcttagtctcctgagtagctggaccacacccagctaattttttgtgtatttttagtagggatgaggtttcgctgtgttgatcaggctggtcttcttgaactcttggtcacaagtgatccgcctgccttggcctcccaaagtgctggcattacagctgtgagccactgcgcccagcacctttttttgtcttgtttactgcgaaatccccaacaactatagcatttccaggcacatagtagatgcttaagaattacttacttacaagagcacaaacatcggcgaataaaaagaattacctattgaatgaatgagagttagctggtgcaaaaaaaaaaaaaaaaaagccagtgcagattgagagacctggccatagaaaattacaacgctcagggataaggtatggcaaggaacgttttttgttttttgntttttttttcgctttattgccgaggctggagttcagtggtatgatctcggntcactgcaatctccacctcccaggttcaagcnattctcctgcgtcagcctccgagtagctgggactataggngcacaccacc

SEQ ID NO: 1170 - DNA, 763 bp, Homo sapiens
  misc_feature (690)..(690): "n" may be a, t, c, g, other or unknown
  misc_feature (757)..(757): "n" may be a, t, c, g, other or unknown
  misc_feature (760)..(760): "n" may be a, t, c, g, other or unknown
aaaccatgaaccgatgcccccgcaggtgccggagcccgctggggcaggcagcgcgatccctctaccagctggtgactgggtcgctgtccccagaccgcgtggacgatgaatttgaattgtccaccgtgtgtcaccggcctgagggtctggagcagctgcaggagcaaaccaaattcacgcgcaaggagttgcaggtcctgtaccggggcttcaagaacgaatgtcccagcggaattgtcaatgaggagaacttcaagcagatttactcccagttctttcctcaaggagactccagcacctatgccacttttctcttcaatgcctttgacaccaaccatgatggctcggtcagttttgaggactttgtggctggtttgtccgtgattcttcggggaactgtagatgacaggcttaattgggccttcaacctgtatgaccttaacaaggacggctgcatcaccaaggaggaaatgcttgacatcatgaagtccatctatgacatgatgggcaagtacacgtaccctgcactccgggaggaggccccaagggaacacgtggagagcttcttccagaagatggacagaaacaaggatggtgtggtgaccattgaggaattcattgagtcttgtcaaaaggatgagaacatcatgaggtccatgcagctctttgacaatgtcatctaacccccangaaaaggggtcaatgtttcctggggggaccatgcttttaaccctaatccaagcggaccttaaccttnttnttt

SEQ ID NO: 1171 - DNA, 897 bp, Homo sapiens
  misc_feature (766)..(766): "n" may be a, t, c, g, other or unknown
  misc_feature (897)..(897): "n" may be a, t, c, g, other or unknown
ggattttctatgtttgcacatgcccccctgaccaatattccactgtgtaaagtaattagattcaacatagactacacgattcatttcattgaagagatgatgccggagaatttttgtgtgaaagggcttgaactcttttcactgttcctattcagagatattttggaattatatgactggaatcttaaaggtcctttgtttgaagacagccctccctgctgcccaagatttcatttcatgccacgttttgtaagatttcttccagatggaggaaaggaagtgctgtccatgcaccagattctcctgtacttgttaaggtgcagcaaagccctggtgcctgaggaggagattgccaatatgcttcagtgggaggagctggagtggcagaaatatgcagaagaatgcaaaggcatgattgttaccaaccctgggacgaaaccaagctctgtccgtatcgatcaactggatcgtgaacagttcaaccccgatgtgattacttttccgattatcgtccactttgggatacgccctgcacagttgagttatgcaggagacccacagtaccaaaaactgtggaagagttatgtgaaacttcgccacctcctagcaaatagtcccaaagtcaaacaaactgacaaacagaagctggcacagagggaggaagccctccaaaaaatacggcagaagaatcaatgagacgagaagtaacggtggagctaagtagccaaggattctggaaaactggcatccgttctgatgctgtcancatgcaatgatgctcctgtctgacccatcatatccgttccaccaatgcctaatgcatttgggacaagttgataggatatacttttcaagaaccgttgctggtgcaactggccatgactcatccaagtcatn

SEQ ID NO: 1172 - DNA, 728 bp, Homo sapiens
  misc_feature (552)..(554): "n" may be a, t, c, g, other or unknown
  misc_feature (668)..(668): "n" may be a, t, c, g, other or unknown
  misc_feature (716)..(716): "n" may be a, t, c, g, other or unknown
  misc_feature (727)..(727): "n" may be a, t, c, g, other or unknown
aagatatttataagagtattgataacagccttatttgtaatggcccctgaatggaagcagctcaaatgtccattcatagtataaattgtggtgtcctcatttaatgaaataccaccagcaattacgatgaataaaactatacaatgtgaacaaatttacaaacattattttgagcacagaaattcagcaagaaagaatatatactgtgtgatgatatataaatgatcccacttacgtaaggtcaaaaacaagcaaaactggccaggcacagtggctcacgcctgtaatcccaacactttgggaaacaggtgggcagatcacttgacatcaggagttcaagaccagcctggccaacatggtaaaatctcttctctactaaaaatacaaaaattagccaggcatggtggcacacgcctgtagtcacagctacttgggaggctgaggcaggagaactgcttgaacccgggaggcagagtttgcagtgagctgatatcacaccactgcattccagcctgggcaacagagggagactccatctcaaaaaaaaaaaannnaaaaaaaaaaggcaagcgaaactaaaccatagttttagaagactgtatagtaaataaattgggagtagttttggggaaggaacctgagcttggcttttgggatgatgataatgncctatgcatgatggtgatgtattatatggagctatgtgttaatgatgnatacattatgng

SEQ ID NO: 1173 - DNA, 757 bp, Homo sapiens
  misc_feature (673)..(673): "n" may be a, t, c, g, other or unknown
  misc_feature (732)..(732): "n" may be a, t, c, g, other or unknown
  misc_feature (743)..(743): "n" may be a, t, c, g, other or unknown
attgatcgctttctgcaaccattcagactgatctcgggctcctatttcatttacattgtgtgcacaccaagtaaccagtgggaaaactttagagggtacttaaaccccagaaaattctgaaaccgggctcttgagccgctatcctcgggcctgctcccaccctgtggagtgcactttcgttttcaataaatctctgcttttgttgcttcattctttccttgctttgtttgtgtgtttgtccagttctttgttcaacacgccaagaacctggacactcttcactggtaacatattttggcaagccaaccaggagaaaagaatttctgcttggacactgcatagctgctgggaaaatgaacatcagtgttgatttggaaacgaattatgccgagttggttctagatgtgggaagagtcactcttggagagaacagtaggaaaaaaatgaaggattgtaaactgagaaaaaagcagaatgaaagtgtctcacgagctatgtgtgctctgctcaattctggagggggagtgatcaaggctgaaattgagaatgaagactatagttatacaaaagatggaataggactagatttggaaaattcttttagtaacattctggtatttggtcctgagtacttagacttcatgcagaatggtaactactttctgatttttgngaagtcatggagcttgaacacctctgggctgcggattaccaccttgagcttcaatttgnccaaagagatntacatctgcaaaag

SEQ ID NO: 1174 - DNA, 797 bp, Homo sapiens
  misc_feature (690)..(690): "n" may be a, t, c, g, other or unknown
  misc_feature (737)..(737): "n" may be a, t, c, g, other or unknown
  misc_feature (741)..(741): "n" may be a, t, c, g, other or unknown
  misc_feature (795)..(795): "n" may be a, t, c, g, other or unknown
ggatgaaaacatccccagcatggagatgtgtgaccagagacacaatatcaccatgtgcccgctttgcgacaagacctgcagctactggaagatgagctcagcctgcgccacggcccgcgccagccacctcttcgacaaccccgccacggtcttcttctctgtcttcatggccctctgggctgccaccttcatggagcactggaagcggaaacagatgcgactcaactaccgctgggacctcacgggctttgaagaggaagaggaggctgtcaaggatcatcctagagctgaatacgaagccagagtcttggagaagtctctgaagaaagagtccagaaacaaagagactgacaaagtgaagctgacatggagagatcggttcccagcctacctcactaacttggtctccatcatcttcatgattgcagtgacgtttgccatcgtcctcggcgtcatcatctacaggatctccatggccgccgccttggccatgaactcctccccctccgtgcggtccaacatccgggtcacagtcacagccaccgcggtcatcatcaacctagtggtcatcatcctcctggacgaggtgtatggctgcatagcccgatggctcaccaagatcgaggtcccaaagacggagaaaagctttgaggagaggctgatcttcaaggctttcctgctgaagtttgngaattcctacacccccatcttttacgtggcgttcttcaaaggccggnttgntggacccccgggcgactacgtgacattttccgtccttccgatggaaaatgtccnca

SEQ ID NO: 1175 - DNA, 694 bp, Homo sapiens
  misc_feature (672)..(672): "n" may be a, t, c, g, other or unknown
  misc_feature (684)..(684): "n" may be a, t, c, g, other or unknown
  misc_feature (690)..(690): "n" may be a, t, c, g, other or unknown
gggggagctaatttctgcttcttggccagtattcacaaaagcagcaatcctggtgtaattaatggtgcttacagtttgtttaaaggctgtttatcatacatcctgatgtgctgcgaatagtcactacttgcctcaagaggagcttgtcctatgctaataaagattctataacattggccaaagggtccgtttatacattctttgagcctggtggagcacgtttgctgaggtgatgtggtctcctcagtgtcactgtgaagagctcagtcaggaaaagccagcagcatctaccctgccaccctccaaaccttctgactttggggagactccagtcccccaggtctttacccagcctgcagatctcattctagcttaacaagggcatgcgtgtgcatgaagttgaactaagagtggaggaaggccagaggtagggatgggtgtggtactaggtagcagatattacagacttctgaatgcattcagatttccaaagggtttcctgagacctctcaaccaatctttctaggacaatagctagtgtaggggtctcctgactcaataggggacccaggccttcagataccagccactcactggctgctctgtgacgtgctatcttaagaccgtgaatggaagacaagccctatgtaaacacaaatcttaaagccctgntggctactcganggcctncttg

SEQ ID NO: 1176 - DNA, 749 bp, Homo sapiens
  misc_feature (623)..(623): "n" may be a, t, c, g, other or unknown
  misc_feature (692)..(692): "n" may be a, t, c, g, other or unknown
  misc_feature (733)..(733): "n" may be a, t, c, g, other or unknown
  misc_feature (746)..(746): "n" may be a, t, c, g, other or unknown
ggatatctgtatgcagttggtgggcgaaatgcagcaggtgaactgcccacagtagaatgttacaatccaagaacaaatgaatggacctatgttgccaaaatgagtgagccccactatggccatgctggaactgtgtatggaggagtgatgtatatttcaggaggaattactcatgatactttccaaaaggagctcatgtgctttgaccctgatactgacaaatggatccagaaggcgccaatgaccactgtcagaggtctgcattgcatgtgtacagtgggagaaaggctctatgtcattggtggcaatcacttcagaggaacaagtgattatgatgatgtcctaagctgtgaatactattcacctatccttgaccagtggaccccaattgctgccatgttaagagggcagagtgatgttggggtcgctgtcttcgaaaataaaatctatgtggttggggggtattcttggaataatcgttgtatggtagagatagtgcagaaatatgatccagataaagatgaatggcatagggtttttgatctgccagaatcccttggtggcattcgtgcttgcacactcacagtttttccaccagaagaaaccacaccatcaccttctanagagtccctctttctgcaccttaagatcatctctacaactaagatgctgtagttctatctttgcaatgngtcataaattctcttctttttcccttaagtagtatatatgntaggattaccctntgg

SEQ ID NO: 1177 - DNA, 706 bp, Homo sapiens
  misc_feature (598)..(598): "n" may be a, t, c, g, other or unknown
  misc_feature (620)..(620): "n" may be a, t, c, g, other or unknown
  misc_feature (649)..(649): "n" may be a, t, c, g, other or unknown
  misc_feature (698)..(698): "n" may be a, t, c, g, other or unknown
tgacttcctattggtttggtgaaccaagtcacaatctttgttgggtttaggtgataggttgtaatgactgagtcactcagtactgggctgtcttgtgtgtcactgccattctgtgtgctcatggtggttggctggtgaggcccagctgagggcagggttggtcggccaggactggaaacaaagagagaatggtggtgttggggtgtacatggcttgcctcggtagtggtccacttttgaattaggccaggatactttctatttgtttgttcacttggtttgagggaaattaagatttactgtgtttttagatattcttcttagtctagtgccatgaaatcaaacagatctgggttcaaactgtggccctgccatgtactagtttatgtgatcttggacaggttattcacactcgcagattgttttttcgtaatcaaatggccacaggaatggcaaaatatcagagaatatgtcgaaatggaaggaaatcctgggattatctgatctgtagactcttcctattaaattaaacattaaatgcctgaaatgttataagacgttattaaatatctgaaacgaaatctcagtatgaaaagcanatatgttaggtggatgcctcanttgaattcagtcttcttattgggtaagantaagctttgttcacagaactactttaccacctttactgagtcccatggntcactgca

SEQ ID NO: 1178 - DNA, 611 bp, Homo sapiens
  misc_feature (546)..(546): "n" may be a, t, c, g, other or unknown
  misc_feature (568)..(568): "n" may be a, t, c, g, other or unknown
  misc_feature (582)..(582): "n" may be a, t, c, g, other or unknown
aaatatttgcatacagacatttgaggctgctctgtatattacaggcaagaactggaaactgttcggctgcagggtgacagctaactagattgtggtttattaggggaatgagcctttctttgtgtatgacaactatgaaaactattgagaagaaatagttacgtgatacagtcataatcctcaaaaacggagaatcaggaattatgatcaaatagtgatagtaacaaggaaaacatctgtctaaataattactgagtagaaataggttcggaatttgtaaatagtcattaatttgggagattggggtttttttgttttgttttttgtttgtttttcattattttgtgctattattcatacgtgtacatttctacttcagtttttattatccattacataacatacatgcttgattatttgcttcaaggaaatacacctttataagtaatactcaataactactgggtttgagaatgaaggtgtcagaacgaatgagattgtcctatgaaagaagaggcaggagccagggaggaggatcccacccgnccggggctcaaccaggaggcanggccattggggcanggtggcagtccaaggaaccgctctgggaa

SEQ ID NO: 1179 - DNA, 590 bp, Homo sapiens
  misc_feature (415)..(415): "n" may be a, t, c, g, other or unknown
  misc_feature (545)..(545): "n" may be a, t, c, g, other or unknown
  misc_feature (549)..(549): "n" may be a, t, c, g, other or unknown
  misc_feature (589)..(589): "n" may be a, t, c, g, other or unknown
atcgagacctttaatttttcggggagagcagctgaggccgtgtggaaaattagtggagagctgacaagtgtctgggctcctggcccaggggtccgtggtccagcacgttgtgcgttcagtgggaagcaaagggcttgcccgggattacctgccccagcccctaggtgggttgtgctccctgcagctgccatcggcccgctttgcttcgtcctggcagatgcccagtgattgtccccgagcaagtgccagggttgggctgagctgctatgacagggaggcccagggagttctgctcagggagccaaagggaacagccagatcctgaatgttctatgttcacctgccccagccccacccaccctggcccactccacaggcccctgaccatggtcactcacggagagggatggagganaaggtggttgaactgagtactgagaacccagaggacagagcccacagcttccaagcaggaaaagggacctctctgaaaaatctggataaccagaattatcacagcaccctctcattcccagcgcgtcttntganctcggaccttgagcatttactgggtttctttttgaggaana

SEQ ID NO: 1180 - DNA, 742 bp, Homo sapiens
  misc_feature (686)..(686): "n" may be a, t, c, g, other or unknown
  misc_feature (691)..(691): "n" may be a, t, c, g, other or unknown
  misc_feature (701)..(701): "n" may be a, t, c, g, other or unknown
gtgttaggtgcttttgcccaactttagactaatttaagtgttctgatcacatttaaggtaggctaggctaagctatgacgtttagtagtagatattttcaactcatgatgggtttgtcaggatgtaaccccatcataagtcaaagagcatctgtaaagacaaagtactttagaaaaaaatacagtgataggatgacaagatcagaaaagagattaagcataggtaggtttgctgtagtgctgttgaaatctaaccttctaaaaacggtctgccaaacctgcatctgctcctccttgtaaaagaagtgaaaggtaatataatattatcaagaatataaaattaaacagacgggaactcttgtaactcagtacacaaaatttctaaaacatggccttaaaggctaagcatgtctgtatttttcctttctgtcttgacagaaaaaatctaacctttctataggtcagactaagcaagttctattaattagcccaaacttcaataggacagattatctgagaatgttcttacttgtagggcactttaattgaaataagactaattctgactcctgattttacgggtgagaaagttgagatccacaaaattaattaccataaagaacaaaaatctgattgccatttttggtcctttttcaatatcttaagtagccctttctcaaagaaagntttancacaaaatgnattctcttacttggaattacttctgctgttggttctggatg

SEQ ID NO: 1181 - DNA, 671 bp, Homo sapiens
  misc_feature (624)..(624): "n" may be a, t, c, g, other or unknown
  misc_feature (663)..(663): "n" may be a, t, c, g, other or unknown
  misc_feature (665)..(665): "n" may be a, t, c, g, other or unknown
aacaacttccgctcgggaagtttgtaaaagtctggtctaccggcgcggcgtagtggatgcagcatcctagtggaggacgcccctgtgatctgccctccttggcactgtgcttccccagaggggtggcctcgctgttcccatggacatggcccaggagccagtgaccttcagggacgtggccatctacttctcaagggaggagtgggcgtgtctggaacccagccagagggccctctaccgggacgtgatgctggacaacttcagcagtgtggctgctctgggtgagcacgggctgagcgcagcgtgagcacagggattttgcagccccagaccagacctcgtctctcgcctggaacagtgggaggagccgtgggttgaagaccgggagagacctgagttccaggcagtgcagaggggaccccggccaggggcaaggaagtctgcagaccccaagagaccttgtgatcatccagcttgggctcacaagaaaacccacgtgcggcgagaaagagccagggaaggaagcagctttaggaagggcttcaggctggacacggatgacgggcagcttccagagctgctccagaaaggacagacgccaagcccacggctttcccgtgtcangtgctcacgcagcgttgtgggccggcggccgggccgcananagcgcc

SEQ ID NO: 1182 - DNA, 647 bp, Homo sapiens
  misc_feature (632)..(632): "n" may be a, t, c, g, other or unknown
  misc_feature (635)..(636): "n" may be a, t, c, g, other or unknown
ataaagaatggggggccggggggtattggaaaggctgatcaataaggctgggcttcatgtcaaacatgtcaatgtatgcttaggccagtttcaaatgtttggtggcattttgttcacaaaaggatagagtgtgtgcatcatatttgttttttttgttttttcacaaaattgagttaaatccagtgcttttgttattggctattcttcatgtagctttctttagggtggttgtttacaaagacttcggcatggtttcacagagactcattccagtggaatccagttagatggtcctaatgctttcgttccagctatgacatgtgttttgattcacagtatgcttggatggactgtgtggatgcttcattcctatggaagacataattcagaacagaaaacttgtaacagcagcatcttgcctgcaaaattatttaagaaaaaaaaaaaaagactttctggttaataccaaaatctttaactgcctttagataggtactgtttcaagtaattaacccctgtgattctcaacaatgggtccataatagccttacctgaacattaactcctcctatttgcccccattactcccagagattccggtatttttttagtggggctttggtggtggtgtnccnngatgtatgatg

SEQ ID NO: 1183 - DNA, 756 bp, Homo sapiens
  misc_feature (384)..(384): "n" may be a, t, c, g, other or unknown
  misc_feature (698)..(698): "n" may be a, t, c, g, other or unknown
  misc_feature (729)..(729): "n" may be a, t, c, g, other or unknown
  misc_feature (752)..(752): "n" may be a, t, c, g, other or unknown
tccggatgctgagacaggagaatctcttgaacctggagggtggaagttgtagtgagccgagatcatgccactgcactccagcctgggtgacagaacaagactctgtctcaagaaaaaaaaaaagaaaaaaaaaagccaggtttggtggtgcacacctgtagtcccagctactctggaggctgaaatgggaggatcacttgagcccaggagtttgaggctgcagtgagctattattgcactactgcattccagcctgggtgacatatcaagacctgtttgggagaaaaaaaaaaaaagaaaatgcagacagaatgtgggactgggcaccaacaacatctctacaagaggtgaacaagacggtcctggtctttgccctcacgcagnacacggaccagggtggtagaccagagtgtgccctcagtgttatttccactaataacgacgtttcctcctctgtccttcgcagaaccaaatctgtttcttccatgtctgagtttgaaagcttgctcgactgttccccttaccttgctggcggagatgcccggggcaagaagctgcctaacaaccctgcctttggctttgtgagctccgagccaggggatccagagaaagacaccaaggagaaacctgggctctcgtcgagggactgcaaccacctgggtgccctgcctgccaggacccccaaggagcagatgcangcaattcacggttctgcaagacggcatccantctactatatcccgggggcccgngcct

SEQ ID NO: 1184 - DNA, 735 bp, Homo sapiens
  misc_feature (699)..(699): "n" may be a, t, c, g, other or unknown
  misc_feature (717)..(717): "n" may be a, t, c, g, other or unknown
  misc_feature (733)..(733): "n" may be a, t, c, g, other or unknown
tgaaaatgcctttcccttagaattctcattctctccttcagttactcacatccaaaaattatttaaggcctaaaccaagtccaatcatcttcaagcagctttcttccactcccacccaccatagagatagatctctctttcccttaccttcctgtagcactttgttatctatacctctcatgtgcacttaccccagctccaattctggatgtcttgttctcctagtgagattgtgagctcttcaaggtaaggatcatgtctttgtgcttccttcttttgtgactctgaagtgcataacatggtgatgtgccttgggaattttcaataaatattcatgggaaaaatgaacatatcaatgtattaagctcaataaagtccgttttcctaaaaacagtccttcattgctgaagtgtgaaagcatgtaaactataatctactggatttggtatttttattattcttttttactaatatatacattctaacactttttgaccactgcttagagaaaatagaaggcatgcttatcaaatttcagatggcacgaattagaagtaataagtaatgcacgagataacagaatcaaaaactagacaaattagaaataagtaaataacatttaacagggataactacaaaattaagattttaaaagaacaggtacccaatttcagtatggaaagacatggctaacatcanggtttaattggctgctanactgacatgagcccanag

SEQ ID NO: 1185 - DNA, 752 bp, Homo sapiens
  misc_feature (707)..(707): "n" may be a, t, c, g, other or unknown
  misc_feature (737)..(737): "n" may be a, t, c, g, other or unknown
  misc_feature (742)..(742): "n" may be a, t, c, g, other or unknown
agcactttatgtttggagagggctgttattaaatatttgtcttaagtattcagcctgagagtcgcctctgtggattgaaaataacaagcctttgcccttctctctgactcttccatgtggcagctgtgtgaccctgagcaaatttttacttgacttttctgagcctgttttctcttctgttaaatgagctgtaataactaactcatggagctgctctgaagaagaaatgagcaaatgcacgcacaaagcactttgcacagtgcccagcctgtgcacgacgggacctcagtagataatcattctctcctctttttatgcctgacttgagctctgtcctgggtagtacccagaacttggctgtgttgtcgctgggtttggggatggccctgagccaggtgtggccaagccctgctggcagtagatagctctgaggttaccccagccttggaagccagttctgagagatggcagccactggccactacacagtcctcctaaacccgctgggggcggagtaatgaaaccacttgctcagttgtgctgaaagaaggaaaaggctgttcctcatctcacaccccagtgatagccatgaatccccaagcacacagtgtaaaataaggtagggaataatcagatgcaaaaccctgggatgtccagagatgccagggcgaagtaagtgaaaccagatcctggctttaaaatcctgnaatgcattccccagagatgctgtcgggttnccttncattcccaga

SEQ ID NO: 1186 - DNA, 862 bp, Homo sapiens
  misc_feature (767)..(767): "n" may be a, t, c, g, other or unknown
  misc_feature (789)..(789): "n" may be a, t, c, g, other or unknown
  misc_feature (838)..(838): "n" may be a, t, c, g, other or unknown
ctggagagagtgtagatggaggagaaaagagtggtctcgaaaccaagctctgggagtggttggaggagaatggaccagtgaagaaggctgggtgagaagaaatcaaggagcctgtgctatcgtggaaatcaagaaaggaaagtgtgtcaaggaggagtattcacttttgttaaatacttccgagacattcaataagaaatgctaacactgttttgttataaacaactgaaattaattttagctgtgaaaaaattaggtcctaaagtaaataaaaagatagtaatggggacataaaataggctgtgaaatgaatttaaaatgccaaaagttacaaatcccaaagacataacccttgctctggatgtgctacagatcttggctgtggacattctaaaagccattagaaagccttcagtcacttccagtattcacaatgaccataaagtaaaaggggtccccaagaccaccccaggctagatgatttgctgggaggactcacaggactcaatatgttagtcatactcacaagtaagatttactagagtgagaggaactagagcaaagtcagcaaaaggaaaagacatgtggggtgaagtctgcaggaaaccaggcacaagcttccaagacctctcctgtgtgtgtctgccacaggacagtccattcctgtggcagtgagttatgacagcatgtgtgaaatgtgttctgccagggaagctcgtaagagactccgtggcaggtttttactggggctggtcatggagcccctntgccgctgtccaaatccagctncagaaggaaagcggttcacataactgcctggggcataacagttaactgngagctgttttattagctgaaatgg

SEQ ID NO: 1187 - DNA, 801 bp, Homo sapiens
  misc_feature (570)..(570): "n" may be a, t, c, g, other or unknown
  misc_feature (691)..(691): "n" may be a, t, c, g, other or unknown
  misc_feature (716)..(716): "n" may be a, t, c, g, other or unknown
  misc_feature (769)..(769): "n" may be a, t, c, g, other or unknown
  misc_feature (797)..(797): "n" may be a, t, c, g, other or unknown
aatcatggactggctgtgcttcaggcactttggcggctcactataatttattattcatagagttatctttctgagactgtcagttttaagctattttaaaacagcattacctttactttagcaatacttcatttcttcttgtattccctagcttataaagaatttaatttcatttttaaaataagttattccgtaggatgatgttgaaatacatctgcattagcaacaccggcatactgcacaatagagtttaatttatatcatgatgactacatatttgaatcagactcgagaaacatagctaatgaccataaatctaatggaatatgtatcaatgtgttttcttccttaggtagatacaatcagtttaaatgctgcaagcacactgttagtttccggcaccaaagaaggcacagtgaatatttgggacctcacaacggccaccttaatgcaccagattccatgccattcagggattgtatgtgacactgcttttagcccaggtagatattatcctttttaaaacagataatactaggtaaattggaattttgaaataaacaatattgntaattttgaaataaacaataaaacttacaaagaaaaacactatttgctgataaaagaggttttgccaatggctaacactgctttatgccagggtacagtatacttgtggcatttgtatcangtagaaaagccggactgggtatttntaattcctcattagagaaattaatttaagataaaaatgaactcataatcaaanggtcatctcatccttacatcttggaaanggct

SEQ ID NO: 1188 - DNA, 796 bp, Homo sapiens
  misc_feature (730)..(730): "n" may be a, t, c, g, other or unknown
  misc_feature (735)..(735): "n" may be a, t, c, g, other or unknown
  misc_feature (795)..(795): "n" may be a, t, c, g, other or unknown
aaaggcgcgcgggaacatggggctgtatgctgcagctgcaggcgtgttggccggcgtggagagccgccagggctctatcaaggggttggtgtactccagcaacttccagaacgtgaagcagctgtacgcgctggtgtgcgaaacgcagcgctactccgccgtgctggatgctgtgatcgccagcgccggcctcctccgtgcggagaagaagctgcggccgcacctggccaaggtgctagtgtatgagttgttgttgggaaagggctttcgagggggtgggggccgatggaaggctctgttgggccggcaccaggcgaggctcaaggctgagttggctcggctcaaggttcatcggggtgtgagccggaatgaggacctgttggaagtgggatccaggcctggtccagcctcccagctgcctcgatttgtgcgtgtgaacactctcaagacctgctccgatgatgtagttgattatttcaagagacaaggtttctcctatcagggtcgggcttccagcctcgatgacttacgagccctcaaggggaagcattttctcctggaccccttgatgccggagctgctggtgtttcccgcccagacagatctgcatgaacacccactgtacccgggcccggacacctcattctgcaggacaagggccagcttgtcttccagccatgcttgctggaccccccggcaggcttccatgtcatcgatgccttgtgcccgncccangcaataagaccagtcacttggctggcttcttcttgaagaaccaaggggaagaacttttgnc

SEQ ID NO: 1189 - DNA, 847 bp, Homo sapiens
  misc_feature (703)..(703): "n" may be a, t, c, g, other or unknown
  misc_feature (719)..(719): "n" may be a, t, c, g, other or unknown
  misc_feature (828)..(828): "n" may be a, t, c, g, other or unknown
  misc_feature (830)..(830): "n" may be a, t, c, g, other or unknown
  misc_feature (843)..(843): "n" may be a, t, c, g, other or unknown
ggccttttttttttttttttttgagatggagtctctgtcactcaggctggagtgcaatggcgcgatctcagctcaccacaatctccgcctcctgggttcaagcaattctccggcctcagcctcccgagtagctgggattacaggcgcatgccaccacacccagctaatttttgtttttcgagtagagatggggtttcaccatgttggccaggctggtcttgaactcctgatgtaatccacccacctcggcctcccaaagtgcagggattataggcgtgagccactgcgtccggctcaagtgaatgttcttaatgggatcatgggatctagaatggtgaatccttttcagaaggtggactttgcccagatccatcaaaggaatcactatttatggcagtgttgccttatgaaatgtgtttcttaggtaataacacttgaaagtctgaattactcctggatacatggactgcagaatggatgttgtggtagcaggcatgaaaacaacattaatcttgtacatctccatcagagcttttggatgactaggtgccttgtcaatgagcagtaatattttgagaagaatcttttttttgcaagcagtaggtctcaatggtgggcttaaaaatattcagtaaactatgctgtaaacagatgtgctgtcatccaagctttgtccatttatagagcacaggtagaatacagntagcatgattcctaangcctgtaggattttcagaatagtaaataagccttgggcttcaatttaaaaaggtactagctgcatttggctctaacaagggtcaacctgtcctggggagctttgaaccngncatggcttctctntact

SEQ ID NO: 1190 - DNA, 814 bp, Homo sapiens
  misc_feature (718)..(718): "n" may be a, t, c, g, other or unknown
  misc_feature (781)..(782): "n" may be a, t, c, g, other or unknown
agcaataaaacaagtcatatgaatgttttggtttcccagtgcatataaagttttgtttacactatactgtagtctatttgggtgcaatggcattatgtctaaaaacaatgtaaataccttaattaaaaaatactatattgctaaaagatgctaccaatcatcgctgagccttcagtgagtagtaatctttatgctggcagagggccttgccttgatgttgatagctgctgactgatcagaatgtgtttggtgaagcttgggctggctgcagcaattttgtaagacaacaatgaagtttgcctccttgatggattcttcctttcacgaaagatttctccatagcatgccatgctgtttgatagggttttacccacagtaaatcttctttcaaaattggagttgatcctctcgaatcctgctgctgccttatcaacaaagtttatagaattttctaaaccctttgttgtcatttcaacaaattttcacaacatcttcgccaggagtagattccaggtcaagaaaccactttctttatttaaccataagaagcaactgctcattcattgaagttttatcatgagactgcagcaagtcaggcacatcttgaggctccacttattctaattctcttgctggtgctaccatatctgcagttacttcttcctctgaagtcttgaacccctcaaagttattcatgagggttaaaatcaacttcttncaaacttctggtaatggtgctatttttacttcctccatgaatcatctattattaataataatnntcttttttttgagacagaagcttgctctggtt

SEQ ID NO: 1191 - DNA, 857 bp, Homo sapiens
  misc_feature (661)..(661): "n" may be a, t, c, g, other or unknown
  misc_feature (677)..(677): "n" may be a, t, c, g, other or unknown
  misc_feature (769)..(769): "n" may be a, t, c, g, other or unknown
  misc_feature (788)..(788): "n" may be a, t, c, g, other or unknown
  misc_feature (841)..(841): "n" may be a, t, c, g, other or unknown
ttttttccttctgtttggcaacctcaatggctctacctgtttctggctgtcatacttcggcttgtgaacagccttcctccctaattttcaggaaactaacaaattaaaggtgcaaatgtcaggtggttactacatatctactggctcacataattcaaaacagagtcatgcagctcctatctaaagctagttccttgccccttctcagtcactaccacatcaagcacaaatgtagatgaaagggtagtgtgtcaaggtgagagctgcccactgggtagtgttactcggtcacttgctataggggacagattagctgccaatcagtatctcatcactgtcattggcgtttataatccaggttcctagccccactggtgatctatttctgtgcctccgcagtgacgccagttgtcctagcaacgtgctggctggcacttcgttaaaggcaagtaagggagtggtggtggaagagggtggcctcgagagggtcagaagggagttggcagtcaccttgctcaaagaggattttccatttccctcatctgggcaggcctccaggaggaaaacgtcacttactaagtgtatcatgggagtgtcacttactaaggatcatggaccacatggtctttctggtcagatagaatcccacggagaataacanatgaattaatgggtangtccaggcagaatgtggggactgccggccaagatgttaggcgatctcaaagcatcttgatggtatcagtttttcttgggaaataaggttaanggtttgcttggttaatcancactggcattgcaaaagttggagaccttgataaaatgtttgggaaggaatcanagggtcaagggaaggc

SEQ ID NO: 1192 - DNA, 763 bp, Homo sapiens
  misc_feature (685)..(685): "n" may be a, t, c, g, other or unknown
  misc_feature (717)..(717): "n" may be a, t, c, g, other or unknown
  misc_feature (758)..(758): "n" may be a, t, c, g, other or unknown
agttggtcggtgggccagtggcccgtcgctcgcttctgggctctcatgtttgaaggtgggagggacacgggagcggcccgcacaccttattgacagccacccctcaggacatggaaaaggagctaggaattaagcacccactccacaggaagaagcttgttttagcagtgaaagccatcaacaccaaacaggaggagaagtctgcactgctagaccacatttgggtgacaaggaggcttgatgatattggctaccccagtacaaagaccagtttcatgaatctagagttgacggacgaatgctgcaatacctaactgtgaacgatttactcttcttaaaagtcaccagccaactacatcatctcagcatcaaatgtgccattcacgtgctgcatgtcaacaagttcaacccccactgcctgcaccggcggccagctgatgagagtaacctttctccttcagaagttgtacagtggtccaaccacagggtgatggagtggttacgatctgtggacctggcagagtatgcacccaatcttcgagggagtggagtccatggaggcctcattatcctggagccacgcttcactggggacaccctggctatgcttctcaacatccccccacaaaagacgctcctcaggcgccacctgaccaccaagttcaatgccttgattggtccggangctgaacaggaaaagcgagagaaaatggcctnaccagcttacacaccactgaccaccacagccaaagtccggncaagg

SEQ ID NO: 1193 - DNA, 694 bp, Homo sapiens
  misc_feature (1)..(1): "n" may be a, t, c, g, other or unknown
  misc_feature (4)..(4): "n" may be a, t, c, g, other or unknown
  misc_feature (24)..(24): "n" may be a, t, c, g, other or unknown
  misc_feature (661)..(661): "n" may be a, t, c, g, other or unknown
  misc_feature (674)..(674): "n" may be a, t, c, g, other or unknown
  misc_feature (677)..(677): "n" may be a, t, c, g, other or unknown
ngangatgattgtcttaacatgtntttctaatcactttaaaacctcactgtgatagatttgcttgttctttgtacttttgtggtacaatctaatagatttttttctttgaggtttactctatttttagatattaaaagtattttaaactgaaatgatgactcatacgtggatataagaaaataaaaagcagctctgtttcctacattttttactgctttttactctcccaatttttatgtcttttcatcaattctgcaatagacagagattaatagtagcacttgcagttttcgctgagacatatccagttcactgaagacccactttagtgttttgggaggaaaaaacaagtcttttctgaaataatgagttcaagattgatttgaggtttaggaagacttttagcaaactcaatcgctcaggagctgattctcagcttatcagtaatcacatcctttcctattcccttctgcagacaatatctgactattttcaggcttgttagaagggagagtaagaggaagtttagttctagatcatctatttttttttccctgtaagtaagttgctttgatataagatttggtggtggtaatcagttgcttaaatgatatcctaaaataatctccagctcatttaataactgccttcactaaattnttattaatggttntgntttaagttttaagctct

SEQ ID NO: 1194 - DNA, 820 bp, Homo sapiens
  misc_feature (730)..(730): "n" may be a, t, c, g, other or unknown
  misc_feature (776)..(776): "n" may be a, t, c, g, other or unknown
  misc_feature (800)..(800): "n" may be a, t, c, g, other or unknown
acatagtcaaggctacacaatatggaatatatgaacgctgtcgagaattggtggaagcaggttatgatgtacggcaaccggacaaagaaaatgttaccctcctccattgggctgccatcaataacagaatagatttagtcaaatactatatttcgaaaggtgctattgtggatcaacttggaggggacctgaattcaactccattgcactgggccacaagacaaggccatctatccatggctgtgcaactaatgaaatatggtgcagatccttcattaattgatggagaaggatgtagctgtattcatctggctgctcagttcggacatacctcaattgttgcttatctcatagcaaaaggacaggattattttaaaaaatgtacttgcatattggaaatgttgagtgaggttgcagaagatattcctgacaacactattaaagtaaatccagaaatggatttgtaatggataaggcataacattctatgacagtatgcatggatgtagatatgatggatcagaatggaatgacgcctttaatgtgggcagcatatagaacacatagtgtggatccaactagattgcttttaacattcaatgtttcagttaaccttggtgacaagtatcacaaaaacactgctctgcattgggcagtgctagcagggaataccacagtcattagccttcttctggaagctggagctaatggtgatgcccagaatatcaangggcgaatcaacgcttgattttggcaaaacagagaaaaaatgtgtnggatgatcaaccactttccaagangcaaggcaagccaaaaggtt

SEQ ID NO: 1195 - DNA, 781 bp, Homo sapiens
  misc_feature (552)..(552): "n" may be a, t, c, g, other or unknown
  misc_feature (738)..(738): "n" may be a, t, c, g, other or unknown
  misc_feature (761)..(761): "n" may be a, t, c, g, other or unknown
  misc_feature (765)..(765): "n" may be a, t, c, g, other or unknown
tattagatggggataagtaaagattatgataacttcatgtcatttcaggtcagattttgcttccaaatgatttgcacacacttaggaaaaaaatttctgttttcagaacgttttggatttcagaattgcagataaaggattgtggacccataattttctcctgttttgcactggcggtagtttaacttgtggaccatcaaaaaaatatgtttgagagaggacccttatcacctcttttgtttaaaaagcaaaataaactttgtttccaccaaaatgcctgcctccccgacatttaggggctgctgtggcaccattcctgtgtgtgtccccttggtagcttagttccaagcttgacagttctcaggggtggggagttctctctgctctcccttaccctcacccccaccagtctcttcagctgcatcccgtttctcctcttctaagggatctggagagttgctggcttccatcatcttccgtgtgaggaccgtcacagcttgcactgctcagcaggcagcttttctggacaccacactctccccaagcctttgnttcttgattttgggagcattcgccatggaaaccattttggctcatcttatcccattcccaggtggtctccaaggctttgcccacacagtgccacaatgaaaaatgcagcctggctcaccggtttgcttttcacgttttcatcgcttatttggctcatggcacaatcccacggaatcctctgcaaanggtggtgttgcgccattcccttntganccaagtgttggctctt

SEQ ID NO: 1196 - DNA, 902 bp, Homo sapiens
  misc_feature (556)..(556): "n" may be a, t, c, g, other or unknown
  misc_feature (618)..(618): "n" may be a, t, c, g, other or unknown
  misc_feature (802)..(802): "n" may be a, t, c, g, other or unknown
  misc_feature (870)..(870): "n" may be a, t, c, g, other or unknown
tgctggtttgattgtgctgctgttagatgagctgctacagaagggttacggcttggggtctgggatttccctctttattgccaccaacatctgtgagaccattgtctggaaggcctttagtcccactaccattaacactggcagaggtactgagtttgagggtgcagtcatagctctgttccatttgttggccaccaggacggacaaagtccgagctttacgggaggctttttatcggcagaacttacccaatctcatgaacctcattgctacagtttttgtgtttgctgttgttatatatttccaaggatttcgcgttgatctgcccattaagtcggcccgttaccgaggacagtacagcagctaccccatcaaactcttctacacctccaacatccccatcatcctccagtcggccctggtgtccaacctgtatgttatttcccagatgctgtctgttcgatttagtggcaactttttagtaaatttactaggacagtgggccgatgtcagtgggggaggacccgcacgttcttacccagttggaggcctttgntactatctttctcctcctgagtccatgggcgccatctttgaggatcctgtccatgtcgttgnttatatcatcttcatgttggggtcatgtgcattcttctctaagacatggattgaagtgtctggttcctcagccaaagatgtagctaaacagctgaaagaacagcagatggtaatgaaggggccaccgagatacctctatggtcatgagcttaataggacatcccaccgcaactgcgtttgcggnttgtgcattggcgccctgtcaatgctggcttgatttctgggggccattggatctggcctggaatttgntaccagcctattattaccagattttgaaaatt

SEQ ID NO: 1197 - DNA, 820 bp, Homo sapiens
  misc_feature (740)..(740): "n" may be a, t, c, g, other or unknown
  misc_feature (785)..(785): "n" may be a, t, c, g, other or unknown
  misc_feature (808)..(808): "n" may be a, t, c, g, other or unknown
acttaagaggagctccataaatcatctaattccaccattcatgttaccaagaagcccaagaaaaggaggcagtttaccagaagacgtataggaagtgaataacccagtggtcttttatctttgtctgtactttctctttaggtgactgtcttcctttccttggctttagctacagatgaaattttatctctatcctagaactctttcctgagttccttacatatattgccaactgactacctgacatttccacttagatttgtagtagacatctcaaacccaacatatgtgaatcagaattattgctatcccactgccactctcattctgcttctttagtctttcgcttctaagtaaaagacacctgcttcccttaccaacccccttttgtgtggctctccccagatcactgggacccagctccactggctgaattttccaccctttttgctcctgtgatctggaatggtcttcaattggctagctcattcattcttttgatcttagcttaaatgttacttccaaaaaaggaatgcttattacctattttaaagtaggttccccctctctttattttcacatggtaccctgatttttccttcatagcatttaccataatttttatgtttgccatttgtttaaaacatgcctctctcttccgctagaccgtaagcttcaagaatgcaggcaccatgccagtttggtcacgactattaagccaggacctacacatagtaggnactcagtaatttcttggtgaatgaaaaacagggtaatgccagggnctacacattagcagggactctgnaatttggtgctg

SEQ ID NO: 1198 - DNA, 824 bp, Homo sapiens
  misc_feature (642)..(642): "n" may be a, t, c, g, other or unknown
  misc_feature (708)..(708): "n" may be a, t, c, g, other or unknown
  misc_feature (775)..(775): "n" may be a, t, c, g, other or unknown
  misc_feature (803)..(803): "n" may be a, t, c, g, other or unknown
  misc_feature (810)..(810): "n" may be a, t, c, g, other or unknown
ttaatatgttttattcatttgtggacactaaaatagctcaggaaagtgaaaatgtcttagacatacgcaagtcacatgaccatttaaatgtgcaaatgtaagaagattcaatgtgtttacatcaaatgacatattttattgatttattgcagattcagtgcatatgagccaaattgttgagtgtgtaagagctatattgtgtattttattaaattaatatatagttgtgttgcaaaaatatttgggcttatattgtaaatggcaagtgttgccttggtagctgtcgaactctatgagttttgttttttcctgcttccttttccccatggagtgtgggaagcagtgcctcagagcaaagtctcttgtttaatgtatagtctaccaagtactacagtacataatctgttcaaaatgtgtttgagtgagctgatggagctaactgaaaggtcaaaaattacatccatcagccatggttatgtgcaagtccttgtagaagcttttattaaagtcatgctaaatcacaagaattgacatttgtaccaatatctgaaacttcttcatgttttttcaataacatacagcttctgcttgtgtagatattatgccatcagtcggttctcaaaagtattttaagtgcttcanatgtgtgttcccattatattttgaaaacatgaaaaatgctttaatgcatgtatgtccagcagtggntacttgcattgggtaatgggttttcaagaagtctgggtcttaacaaaatggtttcctttatctcaanggctcttctggctctttttggtgggggncctttgngaaccattccccct

SEQ ID NO: 1199 - DNA, 742 bp, Homo sapiens
  misc_feature (653)..(653): "n" may be a, t, c, g, other or unknown
  misc_feature (727)..(727): "n" may be a, t, c, g, other or unknown
  misc_feature (729)..(729): "n" may be a, t, c, g, other or unknown
atgctatataaaattttcttgaaatataattggtgatgacactggcattttcctttgttgtcataatcaggaacaaggggacaagaaattacagtgcgtggatcagaaaccagtcactgcttcactggcctttcaccagacactgattatggcgtcactgtttttgtgcagacaccaaatctcgagggaccaggagtctctgttaaagaacataccagtaagtttttgaggaatctggaaagctttcataaggctttagaatagaatgctctaggtaaggaagacttaagtgaatcctgtgcaggtacctctccgtaggggtagcaataatgatgggatgatggcagattcctgaatgtggagtctaaagctggttcaggacctttttctgtagcaatttgcaagttgtccctgttattgagttggtgctactttgaggaagggctaaaggagggagagatggctctcgctgagaaggtgaattcatattagtgacttttactcatttgaccctatctgaaggccttacattttccctttagatctttattttctgtagctgtagtggatgttgaatgactaccagtgacatcaatttggatggaataaaatccccagcatgtcagtaccgatgacaatgggtctcattttgnacaacttgatttggtatccaggatttaaattgctcttaaaatttactttctgggatatcaaatgtgcccatggngnggttttataatta

SEQ ID NO: 1200 - DNA, 746 bp, Homo sapiens
  misc_feature (637)..(637): "n" may be a, t, c, g, other or unknown
  misc_feature (727)..(727): "n" may be a, t, c, g, other or unknown
  misc_feature (740)..(740): "n" may be a, t, c, g, other or unknown
  misc_feature (743)..(743): "n" may be a, t, c, g, other or unknown
accgagaagaagatatttaccagtttgcttactgctacccatatacatacactcgcttccaacattaccttgacagcctgcaaaagagaaacatggattacttctttcgggagcagctgggccagagtgtgcaacaacgaaagcttgacctcctgacgataaccagccctgacaatctccgggaaggggcagagcagaaggtggtattcatcacaggacgagtccacccaggggaaacaccctcatcatttgtgtgccaagggatcattgacttccttgtaagccagcaccctattgcctgtgtcctccgggaatacctggtcttcaagatcgcaccaatgctcaatcctgatggagtctacctgggcaattacaggtgttctctgatgggatttgatctgaatcgtcactggctggatccctctccatgggtccatcctaccctgcatggagtgaaacaactcatcgtccagatgtacaacgacccaaaaacaagcctggagttttatattgacatccatgcccactccaccatgatgaatggcttcatgtatggcaacatctttgaggatgaggaacggttccagaggcaggccatttttcccaagctcctctgccagaatgctgaggacttctnctattccagcacaccctttaaccgggacgctgtgaaagcaggaactggccgcgcttcctcggtggacttctggaccacactttctattgnttcaccctaaagnctnctt

SEQ ID NO: 1201 - DNA, 740 bp, Homo sapiens
  misc_feature (649)..(649): "n" may be a, t, c, g, other or unknown
  misc_feature (711)..(711): "n" may be a, t, c, g, other or unknown
  misc_feature (724)..(724): "n" may be a, t, c, g, other or unknown
aattaactgattactctttcagaaaatagcaggtgtctcaatgctttttttccataattataaagaccattgtcaaaatctttggtttactaaatatttcactgagcatatatagagatacgttgcttgtggcataaaaagtcttgtagataacttactcacatttggcttttttttaattggtgcattttttaatttgcttttttgaaaattatgaagttaaaatttaattctaaggtagtatttttcatgtataaaactaataatgtagttaagcatactgtttgaataaaattataataaatggcacaattccttaaaccctgaaaataccaagttatattggaaaatagtggaaagaaaaaactagtggagaacatcttagaaaattctattgtggaaattacgatgattattttcagtgagaatgaatttatatatacaacaaaaatatacaaaagctaaccttctcatcctaaaaagatttttccctttgcttctgttttatttagccctgccatgcaccacattaattttatgaacataaatgatatttaacttttctttttttttttttgagacagagtctcactccgtcaccaggctggagtgcggtggcgcgatctcagctcactgcaacctccatttnccaggttcaagcaattcttctgcctcagcctccaagtagctgggattacaggcacgcgccancacgccccctaanttttggatttttagta

SEQ ID NO: 1202 - DNA, 737 bp, Homo sapiens
  misc_feature (605)..(605): "n" may be a, t, c, g, other or unknown
  misc_feature (675)..(675): "n" may be a, t, c, g, other or unknown
  misc_feature (681)..(681): "n" may be a, t, c, g, other or unknown
  misc_feature (729)..(729): "n" may be a, t, c, g, other or unknown
agtggtgtggtaccgggtacccggagacgtgtatcggacggtgggccgcagccatggccgagagaaaacctaacggtggcagcggcggcgcctccacttcctcatcgggcactaacttacttttctcctcctcggccacggagttcagcttcaatgtgcccttcatcccagtcacccaggcctccgcttctccggcctccctgctcttaccgggagaggattccacagatgttggtgaggaggacagcttccttggtcagacttctattcacacatctgccccacagacatttagttacttctctcaggtatcaagcagcagtgatccttttgggaatattggacagtcaccattaacaactgcagcaacctcagttggacaatcaggattccccaagcccctgactgctctcccttttacaactggatcccaagatgtctcgaatgcattttcaccatccatttcgaaggctcaacctggtgctccaccttcctcactgatgggaataaattcttatctgccttctcagccaagtagtctccctccttcatattttgggaaccaaccccaaggaattccccaaccaggatacaatccatatcgncatacccctggcagcagcagggctaatccttacattgcaccaccccagctgcagcaatgcccaacaccangccctnctgctcatccttcaaccttctggacccccctggttcaaaatgtaccanatggccct

SEQ ID NO: 1203 - DNA, 834 bp, Homo sapiens
  misc_feature (725)..(725): "n" may be a, t, c, g, other or unknown
  misc_feature (783)..(783): "n" may be a, t, c, g, other or unknown
  misc_feature (821)..(821): "n" may be a, t, c, g, other or unknown
  misc_feature (833)..(833): "n" may be a, t, c, g, other or unknown
aacaattcatttaaaaaaatacacatacacacacacacacacacacacacacacacacacacgtcatctaatttagcaatgtatgagaatagtggatgccattttaaaattatattaatgcctagatttgtttctagggggaaaatatggccgtgtttgcttctgatgtatataaaatctcagacatttatagtgctctaagccatagtaagagaaatatgagtgctatcaatacatgaatatttccaaactcagttctcccaactgcctcaaaactaaacactaattcaggaaatgcaagcaataacatttaaaatgtgttcaaatgcttttagcttttaattcttttatgtttttgcttcactaaagacactctcatttgttttgtcatccattgatgtaatttacactttggtaaaacatatctcaaaggactttgcagatattgataaatactcttaacctatagtctctaagataggcatatgttttagataaatgcaatataagtaataactaaccattgctgtaaataattcagctaatgtgtttttttctgagagttatcctttttttaagattttttaaaaaaattttaaaaattcaaagcaaactgtcaagaattgcaccctgaaactacatccatttgacaccactttttttaaaaaagcaagaaagacggccgggcacggcggatcatgcctgtaatcccagcactttgggangccgaagcgggcggatcacgaaggtcaggagatcgagaccattctgggctaacatggngaaaccccggctttacttaaaaattcccaaaaaattancccgaaccgttnt

SEQ ID NO: 1204 - DNA, 844 bp, Homo sapiens
  misc_feature (605)..(605): "n" may be a, t, c, g, other or unknown
  misc_feature (660)..(660): "n" may be a, t, c, g, other or unknown
  misc_feature (714)..(714): "n" may be a, t, c, g, other or unknown
  misc_feature (763)..(763): "n" may be a, t, c, g, other or unknown
  misc_feature (801)..(801): "n" may be a, t, c, g, other or unknown
  misc_feature (826)..(826): "n" may be a, t, c, g, other or unknown
gatcgcccgccgccatgggctcctcgcaaagcgtcgagatcccgggcgggggcaccgagggctaccacgttctgcgggtacaagaaaattccccaggacacagagctggtttggagcctttctttgattttattgtttctattaatggttcaagattaaataaagacaatgacactcttaaggatctgctgaaagcaaacgttgaaaagcctgtaaagatgcttatctatagcagcaaaacattggaactgcgagagacctcagtcacaccaagtaacctgtggggcggccagggcttattgggagtgagcattcgtttctgcagctttgatggggcaaatgaaaatgtttggcacgtgctggaggtggaatcaaattctcctgcagcactggcaggtcttagaccacacagtgattatataattggagcagatacagtcatgaatgagtctgaagatctattcagccttatcgaaacacatgaagcaaaaccattgaaactgtatgtgtacaacacagacactgataactgtcgagaagtgattattacaccaaattctgcatggggtggagaaggcagcctaggatgtggcattggatatggntatttgcatcgaatacctacacgcccatttgaggaaggaaagaaaatttctcttncaggacaaatgggctggtacacctattacacctcttaaagatgggtttacagangtccagctgtcctcagttaatcccccgctttgcaccaccaggaactacnggaatttgaacagaagtcttgactggactttctattancttaacttccccaactgtcaataantggttttaagacaggtgt

SEQ ID NO: 1205 - DNA, 568 bp, Homo sapiens
  misc_feature (277)..(277): "n" may be a, t, c, g, other or unknown
  misc_feature (385)..(385): "n" may be a, t, c, g, other or unknown
  misc_feature (491)..(491): "n" may be a, t, c, g, other or unknown
  misc_feature (515)..(515): "n" may be a, t, c, g, other or unknown
  misc_feature (549)..(549): "n" may be a, t, c, g, other or unknown
tgcagctttgccttctctccaagagaagggtccacccaatcagaactcctcttccttttcattcctggattaaagcacttgtaatcagtaaccagaaagttccagagcgggagagaccggaaggcactggagtgctatcggacgggtgtctggggcagagccaggagggcgagcctcttctctccccgcctgcccttgctcacttccccctccatgccaggtgctgtgggagcagctgggcctggccggggtcggcgggtgaagctatccgcatggngtctggagcaccggttctttgcttcctggatgggctggatgggctcccgtgttcttcaccaatggcagcgttaccagcaccaatggcagcgttaccagcaagaaggcnaaggcaggagcacatcgagggtgggagccagggctgtggggtcaggagtcccgctccttgccgcgggaagcctggctcagccacctccagcacacttcggctttgnccagcataaaaggcagagcgacgntttcactgcaggctgcttccaccagggcaagtgngacaggtcgaagtgctgac

SEQ ID NO: 1206 - DNA, 806 bp, Homo sapiens
  misc_feature (745)..(745): "n" may be a, t, c, g, other or unknown
  misc_feature (751)..(751): "n" may be a, t, c, g, other or unknown
  misc_feature (758)..(758): "n" may be a, t, c, g, other or unknown
ttaatggtcagaaacaatatttaaaaaaaaaatagccaacaacttcccaaatttgatttttttaaaaattgtgtatctaagaacctcaatgaactccaagtaggacaaaatttttaaaaacccacacttagacatatcagtcaaaccgttaaaagacacagaatctttaaaggagcaaagaaaattggtacatcacatgtaaggagtctcaataagattagcaactgacttcttatcagaaaccatgaaggccagagggcaatgggatgacatattcaaagtgatgaaagaaagaactgtaaaccaagatttctatatccagcaaaactgttattcaataatgaaaaaatgagataccacttcatttgtactatgatgagtataattttttaaatcaagacagaaaagtgttggtgaggatgaaaagaaactggaaccttcgtacatggctgatgggaatgtaaaacggagaagtcactatggaaaacagtttggtagttcctcaaaatcacagaagtactatatgatccaaggctgggcacagtggctcacacctgtaatcctaacactttaagggccaaggtgggaagatcacttgagctcaggagttcaagaccagcttggacaacatggcaaaaccccatcttcacaaaaaatacaaaaattatccaggtatggtggtatgcacctatagtcccagctactttgtgggagctaatgcaggaggattgcttgagcccaggangtcaangctgcantgagccatgttcacaccacaagtgcttcagcctaaggggatgaccaaa

SEQ ID NO: 1207 - DNA, 843 bp, Homo sapiens
  misc_feature (706)..(706): "n" may be a, t, c, g, other or unknown
  misc_feature (788)..(788): "n" may be a, t, c, g, other or unknown
  misc_feature (791)..(791): "n" may be a, t, c, g, other or unknown
  misc_feature (832)..(832): "n" may be a, t, c, g, other or unknown
gtctagcgggatcgcttgcttggtaacccggagggagagattggaaaccgcggagtttcctttgggaggctgcggccagccggggctgacttgttatgttgggctccggaggccgttaagagccgagagagacatgaggtgtctctgaagcccggtcgcctgggccatgaagaagatttttagtaagaagggcgagtcgcccttgggctccttcgcgcggcggcggaggagcagcgcgggaggcgggggcgagccgggggagggcgcctactcgcagcccggctaccacgtccgagaccgagatctcggcaagatccacaaagctgccagcgcgggtaatgtggcgaaagtgcagcagatccttttgctcaggaagaatggcttgaacgatagagacaagatgaacaggacggctctacatttggcctgtgccaatggtcatccagaagtagtaactctcctggtggacagaaaatgccagctcaatgtctgtgacaacgaaaacaggacagctctgatgaaggctgtacaatgccaggaagagaaatgtgcaactattctgctagaacatggtgctgatccaaatcttgcggatgtccatggcaacactgctcttcactatgctgtctataatgaggacatatcagtagcaacaaagctgcttttgtatgatgcaaatattgaagcaaaaaacaaggatgacctnacaccacttttacttgcagtaagtggaaaaaagcagcaaatggtggaatttttaataaagaaaaaagcaaatgtaaatgccntanataagttggaaagcagtcaccactaatttcagaattttaangaagaaaggat

SEQ ID NO: 1208 - DNA, 794 bp, Homo sapiens
  misc_feature (642)..(642): "n" may be a, t, c, g, other or unknown
  misc_feature (705)..(705): "n" may be a, t, c, g, other or unknown
  misc_feature (765)..(765): "n" may be a, t, c, g, other or unknown
  misc_feature (774)..(774): "n" may be a, t, c, g, other or unknown
cattattagtgcatcctctgatggcactgtaaagatctggaatatgaagaccacagaatgttcaaatacctttaaatccctgggcagcaccgcagggacagatattaccgtcaacagtgtgattctacttcctaaaaaccctgagcactttgtggtgtgcaacagatcaaacacggtggtcgtcatgaacatgcagaggcagattgtcagaagcttcagttctggtaaaagagaaggtggggactttgtttgctgtgccctctctccccgtggtgaatggatctactgtgtaggggaggactttgtgctctactgtttcagtacagtcactggcaaactggagagaactttgacagtgcacgagaaggatgtgattggtattgcacatcaccctcatcagaacctgattgctacctacagtgaagatggactcctaaagctctggaaaccataattcaacttttctttttaaatcagctcgaaagcatgtacttaaatgaagcatattcatgtaatgtgcttttttttttttttgccagcttttctaagcaaatagattgtctgaattagtcacagaataattttgtgaaaattcatgtttaagtagcaactaccctttctttttttatatatttttaaggnattagtttatcttcttctaactggtgcagtcacttaatggtttcattaatcttcgacctgganagggaaatactgatatttctagaaaaaaattctactcctctgattatttgaaatgctganggaaaatgncccttccatagtaaaacttg

SEQ ID NO: 1209 - DNA, 740 bp, Homo sapiens
  misc_feature (731)..(731): "n" may be a, t, c, g, other or unknown
  misc_feature (737)..(737): "n" may be a, t, c, g, other or unknown
  misc_feature (739)..(739): "n" may be a, t, c, g, other or unknown
gatgtcatgcaggcaagatggcggaaggggaggacgtgggatggtggcggagctggctgcagcagagctaccaagcagtcaaagagaagtcctctgaagccttggagtttatgaagcgggacctgacggagtttacccaggtggtgcagcatgacacggcctgtaccatcgcagccacggccagcgtggtcaaggagaagctggctacggaaggctcctcaggagcaacagagaagatgaagaaagggttatctgacttcctaggggtgatctcagacacctttgccccttcgccagacaaaaccatcgactgcgatgtcatcaccctgatgggcacaccgtctggcacagctgagccctatgatggcaccaaggctcgcctctatagcctgcagtcggacccagcaacctactgtaatgaaccagatgggcccccggaattgtttgacgcctggctttcccagttctgcttggaggagaagaagggggagatctcagagctccttgtaggcagcccctccatccgggccctctacaccaagatggttccagcagctgtttcccattcagaattctggcatcggtatttctataaagtccatcagttagagcaggagcaggcccggagggacgccctgaagcagcgggcggaacagagcatctctgaagagcccggctgggaggaggaggaagaggagctcatgggcatttcacccatatcttcaaaagangcaaangnt

SEQ ID NO: 1210 - DNA, 591 bp, Homo sapiens
  misc_feature (533)..(533): "n" may be a, t, c, g, other or unknown
  misc_feature (578)..(578): "n" may be a, t, c, g, other or unknown
  misc_feature (588)..(588): "n" may be a, t, c, g, other or unknown
tgtacattatgtatgataatgtatgcacattttcttatttttaacttcagggccatatgtggtgctgttgtcggagcaggtgaaaagtctgagtgtgtttaatttgcttgacaaacattaggctggggcttgtcaagtggagtatagtgaatgccaatctttatttactccttattgattaccccaaactctaaacatctgcataccttgtataaatttccacttatgaagctgaaattgatgaatgaaagcccatgccatttcccggggattggtacatttcaggagtgaatcacaatcaattattgtcataggactattgaaatataaagggagagctgggagggagggcccagcgccctgctctcacgattgattcaggcaggagcctgttccgaaccgtgtgtgccagattagcccgtgacttcatgacgagcatgggaagtatgctaattaacggctggctgccggcgccctcccctaaaatgggaaaatacatatttgggggttatgatttgatggcgacgttcaantgcgttgtcacagattgggaaagcgttttcatcaagctggcttgntatgcctcgnttc

SEQ ID NO: 1211 - DNA, 721 bp, Homo sapiens
  misc_feature (654)..(654): "n" may be a, t, c, g, other or unknown
  misc_feature (677)..(677): "n" may be a, t, c, g, other or unknown
  misc_feature (717)..(717): "n" may be a, t, c, g, other or unknown
aatatttatgtatatttatgtgtgtgtgggataagtgtggatatgtttatacatactcatatgtatgtttgtgtgtgtatctgtctgtgcctgcctccattttcttttgctttagagaggctatacttgaggctgccatcaagagtgagaagtttgaagctggaagagcctgcatgggcccttcttgaactggtgcagcatgtgcagcatgacatcactcaagagttcttgtcagagtgataatgaatgtctggctattgtaaacgggaacaagaaaactatttccagctgtgtgacaaccaagacgacaaaaagcattgcagagaatattattgccacaaggaccctgcttcatctgggtctcagacgacgggaggaggggcattttggagcacgtgtttggcatctgtgaaccttttgttaggtagaaaacaaggcctgaatgaaaggcctttcaaccacttctggagcagagaagataggtagagttactcattataggcaggtttcattgtaggagtattcagtgaggacccccgccttggaagtctgtaatcagcatatgataaggatggtgtgttcttactaagagaataacacaactgaaacagaattgccttttgttaaggggatgctttgccttcttggactacnattgtggggagaaggattattgncaactaagtgaggcattcattctgtcccactatttaatgnagtt

SEQ ID NO: 1212 - DNA, 714 bp, Homo sapiens
  misc_feature (637)..(637): "n" may be a, t, c, g, other or unknown
  misc_feature (652)..(652): "n" may be a, t, c, g, other or unknown
  misc_feature (693)..(693): "n" may be a, t, c, g, other or unknown
aataaatttgaaacagttaatcaacaagtcttgaattctgaggatttggtggcctttaaggataatatctgaattcatttttcagtgatgtagaaaaatatgaaaacttacaaatgtccttaaaaggtggagggttagggggtggaagacaagcagggggttaggagataagtaagcaggttctgagaaaattgagaatagagttgctgacctgagagtcatggtgtttgggatacagtttgggctggatcagggaggtgtatcaataagggcaggccaaaaagaaggcagacatttggctcactagtggcaaagggatggattgggagaaggctgaaattgagtagctagagtagtatccagaagcaagagaatttaatagcttaattgagggctgtttatgtacccaggccctgtcctaggcttcctacacatgatctcatttaatccccataacatattggagatagaaatgataatacccactgtaggtggggaaaacagacctggagaagttaaaatttcacctgatgccacaaagctagaatgtggcagagccagagaccatgtttttctgaattctcttaattactaccttctgtactgcttttcttaattctgaaagtgaatctactgntgacattaaacttgnatttgcttattggtggtgtaattttgtaacctgacaccatnaccaatttttttgggaagtaa

SEQ ID NO: 1213 - DNA, 837 bp, Homo sapiens
  misc_feature (745)..(745): "n" may be a, t, c, g, other or unknown
  misc_feature (776)..(776): "n" may be a, t, c, g, other or unknown
  misc_feature (801)..(801): "n" may be a, t, c, g, other or unknown
attcagaatgaatagaatttacactaacatgctatataaaatgttaaagtctgatgctgtgaaagcaatctagtgctatatttctacctcctcatttgtcttaattatttggtaagtgggattatgatgagtaactggaggggcttagaaacaaaaactggatgaaagagtatgcatgaagaaaagcttctttgataaatgtggagttcttcattataaatatatattcatgaattcacagataagtacttaaagaacagacagtttacttggcctaaaaatattttgatgtttactcaaaaagtacctcttcaggtcttgagaacatggaaaagaattgagtgcttttaaatactttttagaaagtaatcataaaagtaaattgaatttcaaacctatttggcttctgttttgtgaacctttgaactatatgtatgtgtataagggtatacacatacatatatggcatataacaagtgtacacatatacacataacaagtgtagaagtatatattacatacatacactcactctgtctggtataggctaattttgaagaactcccataagtttctgctgcttctcccataactgctgccaccaccatcagaattcataatcaaacctaacctttttgtttggggcaccaaatctgaagacaaaattaatttgcaccagtaaacttcaagctgctttctttcttgaaaactaacgtttaacgtataatgctggttggatctggtnccaatggtgatgctgtgggtaatgtgcttanagccctttgcaattgcataattcantaaggtttggagcttgctttggagttattggtgaca

SEQ ID NO: 1214 - DNA, 849 bp, Homo sapiens
  misc_feature (711)..(711): "n" may be a, t, c, g, other or unknown
  misc_feature (792)..(792): "n" may be a, t, c, g, other or unknown
  misc_feature (817)..(817): "n" may be a, t, c, g, other or unknown
  misc_feature (833)..(833): "n" may be a, t, c, g, other or unknown
cacagctgcctgaccatcacctgatggtcatctgacattcctagtgcaggggggatgccctctcctgccctgctcatgtctgactagctacctactgtagcagcaccacatctggccaatttttgtattttttgtagagacagagtttcatcatgttgcccaggctggtcttgaactcctggactcaagtgatctgcctgccttagcctcccaaagtgctgggattacaggcatgagccacctcacctggcctgagatgtttgtgggggttttgcttttgtttttgtaaattagaaacagggtctctctatgttggcaaggctggtcttgaacttctgggctcaatcaatcctcccacctcagcctcccgaagtgttgggattacaggcatgagccattgcagccagcctgaattctaattctaattggtaaaaattaggactgtgcccttgccattcccttcttttaaacttgtaattcaattacttggcatgactggtccttatattataaaatatactaaatcaaaaatcatcataataaaagcagctccttgagcaactggacaaaaaaagcagctgggcataaacactagtaaagtttaaacaattgtatttggcaagtattccccaacgtataaacaattaccactaaaaaaaatctgtcagttcattttgagtagttatattaatccattcagctattactggnacatttgcaactcaacctggctaaatcattcagaatagaatcctactaaaaattataccatcatgagatagtatcctgtantggaaagacccaggctttagactanggttaagtatcaagtnccaaattattagggat

SEQ ID NO: 1215 - DNA, 831 bp, Homo sapiens
  misc_feature (760)..(760): "n" may be a, t, c, g, other or unknown
  misc_feature (771)..(771): "n" may be a, t, c, g, other or unknown
  misc_feature (795)..(795): "n" may be a, t, c, g, other or unknown
aactgattcaggtagtttataatggtaatatactctcagatatcccaatatccaacactgattgcatgcacattatgataaacaattatttattcattaggcaaataaatattaatataatttctaatcttgaaaagcattattttaaaaataaaactattcataaacataagttgcatgtgaattatgaataaattataatttatttttgtaacccacaccttattttccaggaacataaatgtgtaagacaaaagcacagtatcagtggaatttctttccttttttaaaaattgatgcttaactttgtaaaactatatcccacattctgaatcctggagtaacttcagctctttagttggagaggctattaaaacattaagaaaagtaatgttgaaaggattctttaatgaaacccttagtgaatatgacagtgagtagtgaaaaataagtttattaagctacttcgcatcctagagtttcatgaaaccctatgaagttttaaataaaacatttatttactattaagtgtagttagtttttaaaatgttaatgaataaagaacttactctctcagtttatcttttacaatctttgaccagttaaaggggaaacaatttttacttaataaaatatttagaagtctgtagagtaggaatctttgaattggatgaaatttagtatttatctaattcatatactcaaacagccatcagatataagattcaggtcttactttctaaattatattaatggatgnatatatgaaanttcaaaaacaatttgggctctttncacttgagaataggcatgaagaaaataggaattcaa

SEQ ID NO: 1216 - DNA, 814 bp, Homo sapiens
  misc_feature (776)..(776): "n" may be a, t, c, g, other or unknown
  misc_feature (778)..(778): "n" may be a, t, c, g, other or unknown
  misc_feature (793)..(793): "n" may be a, t, c, g, other or unknown
gacacactcctctacaacaccagagactcccaaacacaaggccttatattgactcatttcagctcacatcctggcgactctcaagagagaaacctcagagtgactaaaatctccataatgagaagacatgtacattcagtatctattttggcattttccccaatacatctctgctcatctgactcttatcttggcatctgcttcctggtggatctgaactgacccataagccacgcttactggtgattttccagaagatgaatccggcctcggcgccccctccgctcccgccgcctgggcagcaagtgatccacgtcacgcaggacctagacacagacctcgaagccctcttcaactctgtcatgaatccgaagcctagctcgtggcggaagaagatcctgccggagtctttctttaaggagcctgattcgggctcgcactcgcgccagtccagcaccgactcgtcgggcggccacccggggcctcgactggctgggggtgcccagcatgtccgctcgcactcgtcgcccgcgtccctgcagctgggcaccggcgcgggtgctgcgggtagccccgcgcagcagcacgcgcacctccgccagcagtcctacgacgtgaccgacgagctgccactgcccccgggctgggagatgaccttcacggccactggccagaggtacttcctcaatcacatagaaaaaatcaccacatggcaagaccctaggaaggcgatgaatcagcctctgaatcatatgaaccttcaccctggcgtcagntncacaccagtgccttnaaaggtccatggcagtatcca

SEQ ID NO: 1217 - DNA, 846 bp, Homo sapiens
  misc_feature (738)..(738): "n" may be a, t, c, g, other or unknown
  misc_feature (837)..(837): "n" may be a, t, c, g, other or unknown
  misc_feature (841)..(842): "n" may be a, t, c, g, other or unknown
gacatcgacctagtggtgtttgggaagtgggagaacctacccctctggactctggaagaagctcttcggaaacacaaagtcgcagatgaggattcggtgaaagttttagacaaagcaactgtacctattattaaattaacagattcttttactgaagtgaaagttgatatcagctttaatgtacagaatggcgtgagagcagctgacctcatcaaagattttaccaagaaatatcctgtattgccatacttggttttagtattgaaacaattcctattgcagagggaccttaatgaagtatttacaggtggaattggttcttatagtctctttttaatggcagtcagtttccttcagttacatcccagggaagatgcttgcatccccaatacaaactatggtgttctcttaatagaattttttgaattatatggacgacacttcaattatttaaagactggcatccggataaaggatggtggttcatatgtggccaaagatgaagtacagaaaaatatgctagatggctacaggccatcaatgctttatatcgaagatcctttacaaccaggtaacgatgttggaaggagttcatatggggccatgcaagtgaagcaggcctttgattatgcctacgttgttttgagtcatgctgtatcaccaatagcaaagtactatcccaacaatgaaacagaaagcatactaggtaggaataattagagtaacagatgaagttgncacatatagagattggatatcaaagcagtggggcttggaagaatagaccctgagcccttcatgccatggaaatggaaacctctttcatcaaggtccagnggcnnccct

SEQ ID NO: 1218 - DNA, 858 bp, Homo sapiens
  misc_feature (720)..(720): "n" may be a, t, c, g, other or unknown
  misc_feature (750)..(750): "n" may be a, t, c, g, other or unknown
agataaaaagggtacaacttgtttccatgtgggaggtaggaagaacattgcttttggagtcagttctaggcctggtgactctttgacttgccagttgtgtgccatgatcactccaagcatccattttctcatgtgtaaaaagcatgttaaaaattttaaatgaggagtttaaaaattacactcccagtaggcttactatgaggactaaaataaataaaagtgtgaaatgcagtgccaagcacataatagctgctcaataaatggaagctaaattattttccacagttatctttcaaatttcactttgatcagttttcacagactatcttctaagcaaattctgtaggtgtttgccttcggaaaagtgcgtttgttgtcagtgaatggttacagggaaaaggagatacttgtcatgcagctggaaacatgaaaacttggccctgtgttcttaaaaatgaaaactccctgcaggatgggtcaagttgctaccataggctggagcctatgattctcagagcagcatcactcttaatggcactgttctgcatgcccttaccttgctcattttgctgggctcagtactaattttcatcccctaggcaggcaaactaagtgtcattgtggcagttccttccatactaagaggaagcattgatcactaagagtcagcatggtttactatgagtaaattaaaccagacctatcttgacctctgacaangttgtcgtgatgaccatgtcagtttgggtncttgctgtatgcccagtgtctgacctgatcctagcatatagtagacactctatatattaaataaatgagccacaatgtccttgtgagcctatgaaaaaatactggccg

SEQ ID NO: 1219 - DNA, 820 bp, Homo sapiens
  misc_feature (591)..(591): "n" may be a, t, c, g, other or unknown
  misc_feature (681)..(681): "n" may be a, t, c, g, other or unknown
  misc_feature (710)..(710): "n" may be a, t, c, g, other or unknown
  misc_feature (790)..(790): "n" may be a, t, c, g, other or unknown
  misc_feature (806)..(806): "n" may be a, t, c, g, other or unknown
  misc_feature (816)..(816): "n" may be a, t, c, g, other or unknown
ggcctttttttttttttttttttttttttgcttatgaagcttggaaatctagtgtatattttacactaacagcatatctcaattgagatggccacatctcaagtgcccagtagccacgtgtggcctgaggccatgactctgggcaatacagctttaagtgagtctagggcagggcagagggcagcacctgggatcaggtgtggagcctggggccttgtttagcaccctctggtgagggcactttctttccataaaacccaggtcaagcatgcctcacaaaggggacagtggaagtgcctcagtttacttgggagcttggcctctccagcttgccttcctactgcctggaagaagattggtgtcctcttgccttctctagcccctttcacaagaaccctcccagaatttagtcctatgaagggccaggggtgcaaggagccacccacacaatgacaggacccaccagcaataccggaagttggccagccctactcatccaaattcccttctgccagctgaacatcacaaggatttcagactgccatgctgtggcaactccattttagggtctgggcatgtaaggattactgnattaatccattctcactctgctaataaagacatacctgaggctgggtaatttataaagaaaaagaggtttcatggactcacagatccatntgacaggggaggcctcatgattatggcanaaggtggagaagaagcaaaatccatcttacatggcagcaggcaagaaagttgtgcaagggagctcccctttataaaaccnttagatcaggcagggnacagtgactnacat

SEQ ID NO: 1220 - DNA, 737 bp, Homo sapiens
  misc_feature (697)..(697): "n" may be a, t, c, g, other or unknown
  misc_feature (724)..(724): "n" may be a, t, c, g, other or unknown
  misc_feature (732)..(732): "n" may be a, t, c, g, other or unknown
tactaaaaatacaaaagttagccaggcatggtggtgcattcctgtagtcccagcttactcgggaggcagaggcacaagaattgcttgaacctgccaggaggcagaggttgtagtgagccgagatcgcaccactatactcccgcctgggtgacaaggcgagactctgtttcaaaaatagaattttttctaaggtaaaaggaggatgtaccttaatcaggtttgtcatcaaacatccaagcctttagcattggctttgccctttgcttttacacagctctgatcttgtgtcctccttctgttatgtgtaaatttgccttgtctccattcttgctttccagctattttagaattgattctcatatcctggcctgtcttttaaatgtctctcttctattttgaaacaatatacttctttcattcaatcgaaaacctttgctgaatgcctctatgtgttatgcccagggctacatgctaagaatagacagataagatgcagttccgtagtttctgttcccttgaaagagcagagaaataagtcacagcactgtgtagtaagcataacactgtattgtagaaaagtgtagactgaagtgtggacaaatgccagagaagcctagaatcctaagcagctactttatcctgggaaggatgggaaagacatcagcaaaaaaggtgaaacctcagccctcttctttgncataatgctctggtttctctttcctanaagactgncttca

SEQ ID NO: 1221 - DNA, 698 bp, Homo sapiens
  misc_feature (267)..(267): "n" may be a, t, c, g, other or unknown
  misc_feature (474)..(474): "n" may be a, t, c, g, other or unknown
  misc_feature (652)..(652): "n" may be a, t, c, g, other or unknown
  misc_feature (688)..(688): "n" may be a, t, c, g, other or unknown
  misc_feature (691)..(691): "n" may be a, t, c, g, other or unknown
ggcctttttttttttttttttgacggagtctcactctgtcacccaggcatgagctcttttgggcctgcatctatcttttttaaaaaacaaaaaacaaaaatacaaaactgtaaatgaaaacagtagtagaactgttgataggatttgaattcctatagctatctatgccttgataaacttacagcatgtttaaactttctgggtctaagtttccttcttcatctgtaaacaggggtaatagtaccagccttaactatttaacaaggngtcaatgcagatcaaataaacaagagtatcaaactaggtaactaaacaaatgataaaaatggccattaactttctaagtgctgtaagatcaaatggagtgaaaatagatcattttttaaaataaggcatatctggaatatatggaaatagggaaggaaatataagtagaattgaaagataatttttggttcacagaaaaataaaggncgggtgtggtggctcacgcctgtaatcctagcacgttgggaggccgacggaggcggatcacttaacgtcaggagtttgagactaacctggcaattgtggtgaaacccccgtctctactaaaaatacaaaaattagctgagagtggtggcgcatgcctttaatcccaactgctcgggangctgaagcacgagaatcgcttgaacccaaggggcangangtttgca

SEQ ID NO: 1222 - DNA, 778 bp, Homo sapiens
  misc_feature (644)..(644): "n" may be a, t, c, g, other or unknown
  misc_feature (658)..(658): "n" may be a, t, c, g, other or unknown
  misc_feature (733)..(733): "n" may be a, t, c, g, other or unknown
  misc_feature (755)..(755): "n" may be a, t, c, g, other or unknown
  misc_feature (775)..(775): "n" may be a, t, c, g, other or unknown
ggccttttttttttttttttttaaataagctactggagaaagtgtgccttcgaaatgaggacagtaaggagagataacgacatgggaaccagggatataccacaggaaaggagccagggagaacaatttattaacaatttcttgcaactatccagggaaaatataaattatacaaaaagaaatccaaacaaatcagaaaaaaaatgaaatgactcaatagaaaaatggacaaagccattcagtcaatttaaaggaaagaagttaaacagccacgaaatgtatccaaaaaatgtccaaatctacctataattaaagaaactacatcaggtgcttgaaaagatttagtatagttaatgttagccaaatgtgtacaagaaacaagtccttttacacactgttaatgtgagtgcactgtccgaagtttatagagggcagactgacagcattttaggtacatacacttgaaaggtagcatgatttctaacagtttctacatgatacactcccttttataaggtatgacagaagactatgctgcaagtagaattagttagatatctatgcaatagcagtgaaagatctatcagaggtgttaggtagaaaaagcagaaaataagtcttatttatgtagaacgttctattgnattcatatttatgngttttcatacacaataagtctggaaaaatacaaactatagcaggttagcaataaagggagaacattcagacccanacgtggggggcttacacctggnaatcacaacacttttgggangct

SEQ ID NO: 1223 - DNA, 873 bp, Homo sapiens
  misc_feature (762)..(762): "n" may be a, t, c, g, other or unknown
  misc_feature (777)..(777): "n" may be a, t, c, g, other or unknown
  misc_feature (811)..(811): "n" may be a, t, c, g, other or unknown
  misc_feature (870)..(870): "n" may be a, t, c, g, other or unknown
aatcatttattttggaccaagaagatctggataacccagtgcttaaaacaacatcagagatattcttatcaagtactgcagaaggagcagacttacgcactgtggatccagagacacaggcacgactagaagcattgctagaagcagcaggaattggcaaattgtcaactgctgatggtaaagcttttgcagatcctgaggtactccggagactgacatcctcagttagttgtgcactggatgaagctgctgctgcactgacacggatgaaagcagaaaacagccacaatgcaggacaagtggacactcgcagtctagcagaagcttgttcagatggggatgttaatgctgttcgtaaattgctagatgaaggcagaagtgtaaatgaacatacagaagaaggagaaagcctgctgtgtttggcttgttcagcagggtattatgaattagcacaagtattgcttgctatgcatgctaatgttgaagatcgagggaataaaggagacataactcccctgatggcagcttccagtggaggttacttagatattgtgaaattattacttcttcatgatgctgatgtcaactcccagtctgcaacaggaaacactgcgctaacttatgcatgtgctggaggatttgttgacattggtaaagtgctccttaatgaaggtgcaaatatagaagatcataatgaaaatggacatactcccttaatggaacaccagtgcaggtcatgtggaagttgcaagagtcttttanatcatgggcagcatnaacactcattctaatgaattcaaagaaagtgctntaacacttggctgctacaaaaggccatttggatatgggtccgcttttacttgaaactgngcc

SEQ ID NO: 1224 - DNA, 833 bp, Homo sapiens
  misc_feature (644)..(644): "n" may be a, t, c, g, other or unknown
  misc_feature (689)..(689): "n" may be a, t, c, g, other or unknown
  misc_feature (761)..(761): "n" may be a, t, c, g, other or unknown
  misc_feature (773)..(773): "n" may be a, t, c, g, other or unknown
  misc_feature (816)..(816): "n" may be a, t, c, g, other or unknown
gctggtgcgcgccggagcccaaattccaagtggaaactgcaggcgcacgagggaggaacgcgtggagcatgaaaaggcagggggcctcctctgagcgaaaacgagcgcggataccgtccgggaaggccggagcagcaaatggatttctcatggaagtttgtgttgattcagtggaatcagctgtgaatgcagaaagaggaggtgctgatcggattgaattatgttctggtttatcagaggggggaactacacccagcatgggtgtccttcaagtagtgaagcagagtgttcagatcccagtttttgtgatgattcggccacggggaggtgattttttgtattcagatcgtgaaattgaggtgatgaaggctgacattcgtcttgccaagctttatggtgctgatggtttggtttttggggcattgactgaagatggacacattgacaaagagctgtgtatgtcccttatggctatttgccgccctctgccagtcactttccaccgagcctttgacatggttcatgatccaatggcagctctggagaccctcttaaccttgggatttgaacgcgtgttgaccagtggatgtgacagttcagcattagaagggctacccctaataaagcgactcattgagcaggangtggtataacagacagaaatctacaaaggatccttgagggttcangtgctacagaattccactgttctgctcggtctactagagactcgggaatgaagtttcgaaatcatctggtgncatgggaacctnactttcttgctcagaaaatttcctaaaggtaaccagatgtganccaaggtaagggacttt

SEQ ID NO: 1225 - DNA, 856 bp, Homo sapiens
  misc_feature (699)..(699): "n" may be a, t, c, g, other or unknown
  misc_feature (791)..(791): "n" may be a, t, c, g, other or unknown
  misc_feature (796)..(796): "n" may be a, t, c, g, other or unknown
  misc_feature (799)..(799): "n" may be a, t, c, g, other or unknown
cagaaaagttaccaaacagtggtaaccataacaagtaccaacaatgaactatggggagggaggagaatctgatttccagagttaccacattataatactattcaaaatgtcacatttttagcaaagattacatgacaaggaaaaaccagaaaagtatggcccatacacaggtaaaaaaagaaattaatagaaactacccctgaagaagcacagacttcggatgtacaaaacaaagacttttcatcaactcttttagatatgctagaagagctaaaggaaaccatggacagagaacaaaaaaattaggaaagcaatgtctcatccaatacagaatatcaataaagagattgaaattgtagaaaagaaccaaatagaaattctggagttgaaaagtattataactaaaactgaaaattcactagaggtattcagcagcagactggagaagtcagaagaaagaatcaacaggcttcaagataggtcaattaagattatacagtctgaggagcagaaaggaaaaagaatgaagaaaaatgaacagagcataaaagacctctgggactctatcaagcataccagtatatgcatgaggggagtcccagaaggagaagaaagagagaaagggacataatatttgaagaaataatggtagaaaatgtcccagctttgatgaaatacatgaatctagatattcaagangctcaaagaaccctaaatagggtaaactcagaagacccaaccggatgcaaagtgactggtgtggtggcagtgccggggtccagttctcagangttangcngaaatcgcttgacccggagcaaaattgcgggagccggattgcccaggcctcactggc

SEQ ID NO: 1226 - DNA, 842 bp, Homo sapiens
  misc_feature (712)..(712): "n" may be a, t, c, g, other or unknown
  misc_feature (767)..(767): "n" may be a, t, c, g, other or unknown
  misc_feature (786)..(786): "n" may be a, t, c, g, other or unknown
  misc_feature (814)..(814): "n" may be a, t, c, g, other or unknown
ataagggaaaaaaactccattaaaaagcccagctttcctccatgttagatgtgacttggaaaatgagaaagatttagcaaaattccaccgtgtcttttgccaggctagagacagggagagcagagtaaaaccctcaggctgctgaaatttctaggctgttaggaagcccctcgaattctgtgaaaatgagggtttcttaactcacactgagagcggaaaggggcagacccttttcataactccctcaagtgtgtgttacctttctttaccagcatggtaagcaacaggacatatcccagcctcggacatgtctgtatgatccaaggtacccaaagtcagacagagtaaactcaagcctggcactggctttctgccgcttcatgtgctttggaaaaagcaggagaagcaatagcagcaggagtccccagcagctggagccgcaagaatgaactgcaaagagggaactgacagcagctgcggctgcaggggcaacgacgagaagaagatgttgaagtgtgtggtggtgggggacggtgccgtggggaaaacctgcctgctgatgagctacgccaacgacgccttcccagaggaatacgtgcccactgtgtttgaccactatgcagttactgtgactgtgggaggcaagcaacacttgctcggactgtatgacacccgcgggacaggaggactacaaccagctgaggccactctnctaccccaacacggatgtgttttttgatctgcttctctggcgtaaaccctggctnttaccacaatgtccaggangaatgggtccccgaacttcaaggactgnatgccttaagtgcccttatgtcctcata

SEQ ID NO: 1227 - DNA, 825 bp, Homo sapiens
  misc_feature (690)..(690): "n" may be a, t, c, g, other or unknown
  misc_feature (739)..(739): "n" may be a, t, c, g, other or unknown
  misc_feature (763)..(763): "n" may be a, t, c, g, other or unknown
  misc_feature (824)..(824): "n" may be a, t, c, g, other or unknown
tctacagtctgtggagacaggtgagcgacgaacttctgagacaggtgtgggtgcgagggtcgggagggtcatgggattgggaccgaggtgtgaggagggaatctgcaattccttgctacacagagcgctggcaacttctgacaggctgtttctggggtatgggctgcctcgggttgttgctgttacaaggaaagaaaagagttcccctgcccaccgcctcccagccactgggctacctcctggcaggaaatttgcaaactgagtttaacaagttaggatcagcagagggtagaggagggccctggcagatgtggggtctagaagaggacaggagttatcagggcctccggccattgtgctgggcctttgcctgtacaattgtttctcaagcagttgtgtccctgtggctttggtgcgcctgtgtgcactttctccctccacctggagcatgggctaacaccggaggaaaggaaaagacagagtcagacagggtaagtggggctccctcccctcttctctctaacggggctggattgagggcctctggctggggaggtgggggtggagatccagtaggagcaataacagaggaagggcagggcctgccccatcacctgaattccagagatgccagtgtgcactgaaccccaggcagggcgtgcccaggaccggatcctggatggtggtaanggacaaagctggaagggagacttcagggaaggagaaaggaaagaagcanagccatgacccagtcaacttacanaatgctgggagtcaaaacttctgggctgggtttcctggctttttcacacacttccaagacnt

SEQ ID NO: 1228 - DNA, 888 bp, Homo sapiens
  misc_feature (736)..(736): "n" may be a, t, c, g, other or unknown
  misc_feature (845)..(845): "n" may be a, t, c, g, other or unknown
  misc_feature (853)..(853): "n" may be a, t, c, g, other or unknown
  misc_feature (878)..(878): "n" may be a, t, c, g, other or unknown
atgctgaattttctgctttggaaagaaaaaaaaaagaagctattgtccacagattgatgcttccataatggaatcagctttaattgcaaggaatgaagaaaaacaagagtggaccttcaaagctacaacattttcctcctcccctccctccccaccagccccttccccaccaagaactgctatgatgtcccaaagtgaggtgttgttgattccagtctcaatgggattttctgactttaatgtttgcaaggcatttcaccagaatacagctataaacggccgctcccaacaactgggctctgactcacccacacccacttagtgtccactaagtagtccagggtgactcagtttaagcacatctcaggtgaggtcactctgcatataccttggcttacctgaaatagcctgaacttgaatctcacataagggaaaactagtcatcaatcaccaactcattgactaccctcaggaagtcctgcagaaatcaagagtccttgaggagaacacgtggatcataccaaaaccagggtttaaatccattctgcttaagagttctatcagtcagtttaaccataaattacgctacagaaacaaacaacccaaaaacctcagtggcttacagatttatttttcactcacatgtttgtaatgatccatcttggttgtaatccatattgcttcagcacccagtctaaaggagcagcctctaaggggggcatgttggtcttaaganggaaaagaaaggtgggaaccacatgatggctctttcatcttccgctaggaaatgataccctttactttcatgacatttcattagcccaaacaagtctgtgacaggcccnatgtcagncaccacagttaaatatcctgcatanggagggatag

SEQ ID NO: 1229 - DNA, 810 bp, Homo sapiens
  misc_feature (301)..(301): "n" may be a, t, c, g, other or unknown
  misc_feature (447)..(447): "n" may be a, t, c, g, other or unknown
  misc_feature (636)..(636): "n" may be a, t, c, g, other or unknown
  misc_feature (734)..(734): "n" may be a, t, c, g, other or unknown
  misc_feature (740)..(740): "n" may be a, t, c, g, other or unknown
  misc_feature (800)..(800): "n" may be a, t, c, g, other or unknown
gatgcttctaaattgtgatcactttcaggaggcagcactgcagctggaaggatgcgagcgacctagggtggagtggctgaggcggcagatctgaacttgcggaggataagaacccaaactttgactacatcagtccgcacctcgccagtgaagcaaaggacgggttatctttttttttttctaagactcaaacttgggcacttgatcccttttcttggattgctttggaggagacgatttgctggcaacgttgggaacagtcaggactgtgttgtaactcttacttttaaagcgacagtanaggatcagactttttaaatgtttggaattcaagatactttaggaagaggaccaactctgaaagagaaatcgctgggcgcggagatggattcggtcaggtcctgggtccggaatgtcggagtggtggacgctaatgtcgccgcgcanagcggggtcgccctgtcccgggcccactttgagaaacagcctccttccaacttgaggaaatccaacttctttcacttcgtcctggcgctctatgacaggcagggccagccggtggagatcgagcggacggccttcgtggactttgtggagaatgacaaagaacaaggcaacgagaagaccaacaacggnactcactacaagttacagctcctctacagcaacggtgtccgcacggaacaggacctctatgtcaggctcatcgacttcggtcaccaagcagcccatcnttccanggacagaattagaatcccgaaatgtgccgagttcttctgacgcacgaagtggatgcgtangtccaatgct

SEQ ID NO: 1230 - DNA, 818 bp, Homo sapiens
  misc_feature (651)..(651): "n" may be a, t, c, g, other or unknown
  misc_feature (677)..(677): "n" may be a, t, c, g, other or unknown
  misc_feature (683)..(683): "n" may be a, t, c, g, other or unknown
  misc_feature (767)..(767): "n" may be a, t, c, g, other or unknown
  misc_feature (785)..(785): "n" may be a, t, c, g, other or unknown
  misc_feature (788)..(788): "n" may be a, t, c, g, other or unknown
gacatgctagtgctcggcccacccttctgtttttgtagccaaggcttgattggattttctgtatgtataatgggctgtttcaaaatggtcttgcctcattgtttcttcatatcttattgaaaccaacccactgttgatctcaatctgtgtaaggagaatgcggagtatggcattcgcaggactgaatccctagattttaagtttggaaggagatccaaccgggcagatgaattgaccggtggtgaatattctgtagcattttcctccctggagaggaatgccgccaccgctgggaaccgtggactggcatgtgagccagtggctgtgaaaggcgctgtgccctgtgtcctccgtgtactttagagcaggagcgtcacacatggtggagccgggtgatatcccgggcaggctcccgaaagctcctggtggcccatcaggggctggtttttccacctttttttttttttttttttcctcgagacaaggtctcactctgtcacccaggcaggagtgcagtggcatgatcttgactcactgcaacctttgcctcctgggttcaagcaattctcgttccttagcctcccgagtagctggcattacaggcactcgtcaccatgcccggctcgttttttttttttggatttttagtanagacagggtttcaccatgttggccangctggncttgaactcctgaccccaaaatgatctgcccgcctaaccttccaaaggctgggattacaggtgtgaaccaccacgctggccctnctaacttttttttttttnaanaacccttattatcccaattttttctatgaa

SEQ ID NO: 1231 - DNA, 679 bp, Homo sapiens
  misc_feature (571)..(571): "n" may be a, t, c, g, other or unknown
  misc_feature (632)..(632): "n" may be a, t, c, g, other or unknown
  misc_feature (665)..(665): "n" may be a, t, c, g, other or unknown
  misc_feature (673)..(673): "n" may be a, t, c, g, other or unknown
ttcaggtataccaatcagacctagatttggtcttttcacatagtcccatatttcttggaggctttgttcatttctttttactcttttttctctaaacttctcttctcgcttcatttcattcatttaattttcaatcactcataccctttcttccgcttgatcgaatcgctactggagcttgtgcattcatcatgtatttcttgtgccatggttttcagctccatcaggtcatttaaggacttctctacactggttattctagttagccatttgtctaatcttttttcagggattttagcttccttgcgatgggttcaaacttcctcctttagcttggagaagtttggtcatctgaagccttcttctctcaactcatcaaagtcattctctgtccagctttgttgcattgctggcaagtagctgcgttcctttggaggtggggaggcgctctgctttttagaattttcagcttttctgctctgttttttccccatctttgtggttttgtctacctttggtctttgatgatggtgacgtacagatggggttttggtgtggatgtcctttctgnttgttagtttccttctaacagtcaggaccctcagctgcaggtctgttggagtgtgccagangtccactccagatgctggttgcctgagtatcancagcagangctgca

SEQ ID NO: 1232 - DNA, 679 bp, Homo sapiens
  misc_feature (589)..(589): "n" may be a, t, c, g, other or unknown
  misc_feature (633)..(633): "n" may be a, t, c, g, other or unknown
  misc_feature (657)..(657): "n" may be a, t, c, g, other or unknown
atgctttcaagtcctgtgggacgttaatgttagtcttttaagttgagtcctttttggttatattaagaggtagttctgatgtttcaaaggccatccagaaataggaatgcctgaacaggaatttccaattaagtcggtcagaatcctgaacagaggatatgatgaatatattacggtataactattagtggtatctgtcagatgactttaattttaggaatagcatgatcactgtgtataatcttatacagaagagaactgaataatagtttatgttcctgaaacggtcataggcatttgagtaaaatgcagtatatagatttacttgttaatattttgcttaaagatgaatatttaaaaaatgaaaaagcatattacttatacaggacagtggaaaggttgagaccaaaaagctggtacttttagtgtcctgtctgtttagttctattcttatttttcatttatgcaatgtttcaaaagtgtaagatgctttgtgattaaagtgtgcgtgtatgtatgtgaatgcgtttgtatgcatgtacatacagtgtgtgccttttaagtgcatttttaaaattagttggtttgntacttaagattttttttttttttttaactgaaagaggagcttgnctgatctaaaatagttgcatgtancctggtggctaaggagagctca

SEQ ID NO: 1233 - DNA, 781 bp, Homo sapiens
  misc_feature (590)..(590): "n" may be a, t, c, g, other or unknown
  misc_feature (634)..(634): "n" may be a, t, c, g, other or unknown
  misc_feature (690)..(690): "n" may be a, t, c, g, other or unknown
  misc_feature (737)..(737): "n" may be a, t, c, g, other or unknown
  misc_feature (768)..(768): "n" may be a, t, c, g, other or unknown
aaggtcgacagcccggacgtgaagaggtgcctgaatgccctagaggagctgggaaccctgcaggtgacctctcagatcctccagaagaacacagacgtggtggccaccttgaagaagattcgccgttacaaagcgaacaaggacgtaatggagaaggcagcagaagtctatacccggctcaagtcgcgggtcctcggcccaaagatcgaggcggtgcagaaagtgaacaaggctgggatggagaaggagaaggccgaggagaagctggccggggaggagctggccggggaggaggccccccaggagaaggcggaggacaagcccagcaccgatctctcagccccagtgaatggcgaggccacatcacagaagggggagagcgcagaggacaaggagcacgaggagggtcgggactcggaggaggggccaaggtgtggctcctctgaagacctgcacgagtgagtgtcccgggccgtggggtttggactcctgagcggcagcggtgtgacgcgcaccctgggtccgagccgctcctcctgtgccagtccctctgggatgggtcccagggatgtcgtccttactcgggcctnccaccttcacagctgaccccagggccccgcttggctggcacttncggcggcccctacagagaggcagcttccagggctttgaacttgccttgcccctggncttctggggaaagtggcttttttgccgagccttcaaggtgggcccangtaggtaggccccgagcccaagcaccccggnttttttgacgggg

SEQ ID NO: 1234 - DNA, 717 bp, Homo sapiens
  misc_feature (654)..(654): "n" may be a, t, c, g, other or unknown
  misc_feature (711)..(711): "n" may be a, t, c, g, other or unknown
  misc_feature (715)..(715): "n" may be a, t, c, g, other or unknown
catgggtcttctgggtctgttagaataattaccaagtatttggatagttaaaagttgcaacgctagggtcttttatacttgctctaggacatagttgtcaggtatgaaaaatttaccatggcaagatccatttgttgtattaatcactacctttcccttagagttgatttatggttcagagggatattctggaaaatgcttagatcaaacaagaccacattcattcatggagaaagagtggaatgcaggttcgtagtaaagaaaaataatttccagggctcctgggaaaaagctttggtcacttaaatgcccttgggctttctgtaagtaaacatctgcagtcctctctattggttttctagcatatttcacacaaaagcaggggagcagagtagtgttaattaccctgagccaagtcagtattaatctcaggtctccattgttgtttaagattgatggataaagatgtgactgcccagaactacctttgttctcttactggaaagatgtggacttggaggggcaatctggagttaatagtcagaactagattgtatcctccttactgggatgtgagctctgtcacctgagtaaccaatttctttgtaaagggatgtaatctcaaatcttaactttcaagctgccaggcttggnttgcttttatatccccaaatggaacccggaaccttctttattccaatggtacattgngggnaa

SEQ ID NO: 1235 - DNA, 749 bp, Homo sapiens
  misc_feature (523)..(523): "n" may be a, t, c, g, other or unknown
  misc_feature (652)..(652): "n" may be a, t, c, g, other or unknown
  misc_feature (721)..(721): "n" may be a, t, c, g, other or unknown
  misc_feature (725)..(725): "n" may be a, t, c, g, other or unknown
ggcctttttttttttttttttcaaatgcccctttcattatgaaactcttttttaacttttaatttaagttcaggggtatgtgtgcagatttgttacataggtaaacttgtgtcatggggctttgttgtacaggttgtttcatcacccaggtattattttattttcattttagttttttaaatttctttttagaggcggggtctcactgtgttttgcccaggctggtctcgaactcctcctggtctcaagcaatcctctcgcctctgcctccccaagtgttgggattataggcatgagctactgcactcagcccaccatttgttttaaaaagggtggatcctatttgtataaaaagccatgtgcattttctgtgtacttgtctacacattaatttccaggctgggcgtggtggctcacgcttgtaatcccagcactttgggaggccaaggggaggcagatcatgaggttaggagatcgaaaccatcctggctaacacggtgaaaccccgtctctactaaaaatncaaaaacaaaattagcagggtgttgtggcgggcgcctgtagtcccagctactcaggaggctgaggcaggagaatggcatgaacccgggaggtggagcttgcagtgagctgagattgcgccactgccctncagcctggacaacagaatgaggctccgcttaaaggaaaaaaatttctggaatgatgtccaataaatcanaaanagggacttgaagactaatgaggac

SEQ ID NO: 1236 - DNA, 862 bp, Homo sapiens
  misc_feature (723)..(723): "n" may be a, t, c, g, other or unknown
  misc_feature (805)..(805): "n" may be a, t, c, g, other or unknown
  misc_feature (842)..(842): "n" may be a, t, c, g, other or unknown
  misc_feature (845)..(845): "n" may be a, t, c, g, other or unknown
ggggggagaaattacagactctcagactgaggatagttatgacgaagccattaccagtgaaggcaatgtaactgcagaagatagtgaggatgaagatgaagacaaaatttggcccccatgtattagagtaattgtcattagatcacctgtgttgcagataggatcactctttatcattactgctgtaaaccctgctacaattggaagagaaaaggatatggaacatactctccgaatccctgaagttggtgtcagtaagtttcatgcagaaatttattttgaccatgacttacaaagttatgtccttgtggatcaaggcagtcaaaatggcacaattgttaatggaaaacagattcttcagccgaaaactaaatgtgacccttacgtacttgagcatggagatgaagtcaaaattggagaaactgtcttatcctttcacattcatcctggcagtgatacctgtgatggctgtgaaccagggcaggttagagcccaccttcgccttgataagaaagatgaatcttttgttggtccaacactaagtaaggaggaaaaagagttggaaagaagaaaagaattaaagaaaatacgagtaaaatatggtttacagaatacagaatacgaagatgaaaagacattgaagaatccaaaatataaagatagagctggaaaacgtagggagcaggttggaagtgaaggaacttttcaaaagagatgatgctnctgcatctggtcattctgaaattctgatagcaacaaaggtccggaagatgttggagaagatgggttggaagaaaggaaaggnctggggaaggatggtggaggaatgaaaccccatccanttnacttcgggaacacatca

SEQ ID NO: 1237 - DNA, 729 bp, Homo sapiens
  misc_feature (577)..(577): "n" may be a, t, c, g, other or unknown
  misc_feature (604)..(604): "n" may be a, t, c, g, other or unknown
  misc_feature (669)..(669): "n" may be a, t, c, g, other or unknown
  misc_feature (718)..(718): "n" may be a, t, c, g, other or unknown
  misc_feature (727)..(727): "n" may be a, t, c, g, other or unknown
gttttactatgttgttggctattttatcgttgagttgtaagagttctttgtatattctagatacaaatcccttatcaggtatatgacttgcaaatatcttctcccattctgtgtgttcctttttgactttcttgattgtatgccttgaattaaaaaaaatgcctaattttgatgaattccaagtttatcattttttttaattttttcacctgtgcttttggtgtcatctaaggaggttttgcctatgcggtcatgaatatttactcatctgttttcttctaagagtgataatagtttcagctcttatattgagatatatgatatattttgagttagtttgtgtgtgtgtggtgtgaggtaggggttcagcttcattcttttgcatgtggatatccagttgtctcagtatcaattgttgaaaagacatttcccccttggatagtcttggtgctcttgtcaaaaaccaaataactgtaaatggagcaattgtagtttgaatggaatgggtcagcacttggtggcagcaggggtcttggctatgtagtttcataagctcccactcctggagagcctctgntttcctctcaaagccaggtttttctgnctcgctgcgttttggtgcctgaaaggcttgggtggcatggtacctggagtactggtgtcggagcncaaagtgaggagaaaagaccactctactttgtgggaaggccttgggcantttgggcanca

SEQ ID NO: 1238 - DNA, 620 bp, Homo sapiens
  misc_feature (584)..(585): "n" may be a, t, c, g, other or unknown
  misc_feature (589)..(589): "n" may be a, t, c, g, other or unknown
atcaagaccagcctgggcaagtttgagagaccctgtctgtgttagttcattctcatggtgctatgaagaaatacccgagactgagtaatttgtaaagaaaagaggtttaattgatgcacagttccacatggctgagaaggcctgaggaaacttataatcatggtggaaggcacctcttcacagggtggcaggagagagaatgagtggcaagcaaagggggaagccctttataaaaccatcacatctcatgaggactcacttactatcatgagaacagcagggggaaactgcccctgtgattcagttatctccacctggtcccacccttgatacctgaggattattacaattcaaggtaagatttgggtggggatacagaaccaaaccatatcactgttatctacaaaagattttttaaaaagtagccaagtgtggtggtatgtgcctatggtcccagctactctggaagctgaggtgggaagaacttttgagctcaggaggtcgaggctgcagtgagccatgattacaccactgcactctagcctgggtgacagagcgagagaccctgtcccaaaaaaacaaannacanaaaaaaaccccaagctaaaaaatttatatac

SEQ ID NO: 1239 - DNA, 837 bp, Homo sapiens
  misc_feature (704)..(704): "n" may be a, t, c, g, other or unknown
  misc_feature (730)..(730): "n" may be a, t, c, g, other or unknown
  misc_feature (830)..(830): "n" may be a, t, c, g, other or unknown
tctgtttgttacagcttagatacactactctcttctaccagtcattacttccttggccatgttccgttggaactcagggctcctgcttacctcaattcttcacttctgctgaactctgtgttactgctgcctagaaaagggtgtatgtggttaggagtaataggtgagggtgaattcctgggggacatactgagttagctgcgggatcctgatatttggctgagagtctaagaaattgtttcctaggtaacttggtataattactctttggtcatgctaattttaaatgtcagatgaacaaatcaagagtaaattgggaaagttccataggaagcctaagcactcatcttaaccttacttagtcttctcttaactggacttttctagcccaggaagaggttaggatagttgttcttcagagtttggtctacctttaagttttcatgattcaatactcttaagatactttgttttaaaattactgaaagcctgattaaaaggagatgtgagaagaaagaatatttgtagaatggtgtttccagcagtgagtcagaatctaaaatatgcagagaagggaaatcagatgcatcttcaaaatactggatttgatgtgaaagattttctgtttgggtttggtctacagttatccgtttgcaaagaacttcagctgccacctagtgatttccactggagtgccgacttantggctctttcttactcttctcctcangtgaacacattctactcaggtaggtgacttaaaagcttatttaaataacttttacaccagggcattctaaagtagaggaatcatccctttgatttgaganatactat

SEQ ID NO: 1240 - DNA, 770 bp, Homo sapiens
  misc_feature (623)..(623): "n" may be a, t, c, g, other or unknown
  misc_feature (677)..(677): "n" may be a, t, c, g, other or unknown
  misc_feature (720)..(720): "n" may be a, t, c, g, other or unknown
  misc_feature (764)..(764): "n" may be a, t, c, g, other or unknown
aaaaaaaaatgtatttgaggcctgcatgatctcaactggctgtaaatacctttcagatttcctgggttattgcttagtcttctactgttcctttccgtctttatctgaccaattcagagtcctgcttcacaaatgccaaaccattttagtttctgtataatggaggcatttttttcctctttaggtcacatgtctttcacagagatttttgtcatagatgtcttgaaataggaactgtaaaagacattatttttgaacgtttgaacattgctttttattttctcaaaggagtttgcacatgatcaacagatatattcatcaaacccacctacgagatgagaaacccagactcaaaagttgaggggaggagaagtgctctactttgagaagaaacaacagaaattaagctcaaatgtcttataaaatgaatcctgaataatccttttacattcaaacattttgacagtttttgggcatgagaggaggagtgaggagtttatttggagcctaaattatctccaaattgtttgtttgctattaaagggctgaaagagaagtaagcaaaacaaaaataaaattccactggctctccactatggatgagaagttgcacaaaggcctanctgtttcgttggtggagagctacatggctgcccaagttttgcaatagaacttanagaatggccttatatgggaattaaaggatgggaagccaaatgnggttttgaggacttaaaccggacacttccaggtggtgcaaacanggtgcc

SEQ ID NO: 1241 - DNA, 763 bp, Homo sapiens
  misc_feature (641)..(641): "n" may be a, t, c, g, other or unknown
  misc_feature (652)..(652): "n" may be a, t, c, g, other or unknown
  misc_feature (706)..(706): "n" may be a, t, c, g, other or unknown
  misc_feature (752)..(752): "n" may be a, t, c, g, other or unknown
  misc_feature (755)..(755): "n" may be a, t, c, g, other or unknown
attcagccttcaaagggagtgaaattctgatacatgctacaacatggatgaaccttgagaatattacatgaaataagccaggagcaggacacatattttatgattccacatatactagggtacccagaatggtcaaattcatacagacagaaactggaatagtagttaccagggactgtttggtggtgttcggggtgggagtgggtgttaagtttctgtttgggaagatgaaaatgttctggagacgtatagtggtgatagttgcacagaaatgtggatgtacttaaagacactgcattatacttgtaaaatggttaaaatagtaagtttgatgctgcgtatactttaccagggtaaaaacaatgcaagagaaagattgccagtgcatgctgaaaattaagattactaggaggatatttttcactcttgagactaatgacaacaattgaatgttgggaagcacagtatgtgggagtgtgtaagtgggtcttgctagtaggggatgtcactttagcaaaatctgttggaagttgcttatcttttgtgtgtattaacatgaagattttctcagttgaataaaacaagttaaagaatactttctttgttgtaaaacagcatatttatatacatttataaatgcnttaagttctanaaggatcatgagtaaaaatatgaatttaaaaattaaagtcacagatttaggtgntgcacctacctaccttatgggtttttctactacacttacatacctnttnataatctg

SEQ ID NO: 1242 - DNA, 810 bp, Homo sapiens
  misc_feature (753)..(753): "n" may be a, t, c, g, other or unknown
  misc_feature (805)..(805): "n" may be a, t, c, g, other or unknown
  misc_feature (809)..(809): "n" may be a, t, c, g, other or unknown
ggcctttttttttttttttttttctggagacggactctcgctctgttgccaggctgaagtgcagtcatgtgatctcagctcactgcaacctccgcctcccgggttcaagcaattctcctgcctcagcctcttgagtaactgggattacaggcgtgcgccaccacgcccggctaattgttttatttttagtagagatggggtttcaccatgttggccaggatggtctcaaactcctgaccttgtgatccgcccacctcggcctcccaaagtgctgggattacaggcgtgagccaccgtgcctggcctctccaccttttttgcatctgtcaatgcccctagctctctagcagcagctgtgcaaacaccaggagggcccaaaggggtcttggtaagacacttttcagggcactgcggcagtgctatggtcccgtggtcaggagacctgcagcctgtcagtaactgacagtgtgaccttgagcaagatcaactctatggcttgcctcctcttatcaaatggcacaactatttcagcttagaaggttgttgtgaggttacaatgaaaaagcataatgactttttaaaaaatgactcaacttgataaaaatacaaaatactgcctttattcaaaatgaggcagagatgaataaggagggaattttgtcccagttaaatatttattccatttaaactactcaaaagtccagttgccccaataattaataattttcactttcccaaaccaccaagcaaggngcactggcattctcacctgcgggacctatgtttcccattccgatgcctttanttang

SEQ ID NO: 1243 - DNA, 711 bp, Homo sapiens
  misc_feature (698)..(698): "n" may be a, t, c, g, other or unknown
  misc_feature (701)..(701): "n" may be a, t, c, g, other or unknown
  misc_feature (704)..(704): "n" may be a, t, c, g, other or unknown
atctaaaatgcttttgttttaaatggacaaaatttgccaaacacctttttacctttctgcctggaaaaatgttttgatgtgttggctttccacctcctgatttttgtgtgtggctccttcccctaccccctcccgccccgccaaatgttgttgtacactgccttgtctgtttcatttccacgtgtgggttcactgaccacattagctggtagctcctggtattgtatgcttcctatccagaatttgttccatagaaaacctgtgtcttcaacatacttgctttgaaattattttgatctgtatcagcaggaataggttttgagatcctggatattaacttctgggtgccactctctctagaagctaattgactgatttgtggtggaggcgagatgagagtctatacatttgacctatttcacagagcttaccttgcaagctattgaaatgcaaatacagactagcttagagattctaagaattcacacattcagttctttgtttttttctgaaaaataagcattcaaatttcatgcacattctattattcatgtgccttatatttaggttccgcttgtatgtctagataaatcttatcaccattatttaaaatttcatgaatgaaactttgcatctttaatactaacactagcctagaccaatcaaaataatttgaaatgcagcccttaaatgaactnctncgngtgtctg

SEQ ID NO: 1244 - DNA, 628 bp, Homo sapiens
  misc_feature (496)..(496): "n" may be a, t, c, g, other or unknown
  misc_feature (541)..(541): "n" may be a, t, c, g, other or unknown
  misc_feature (588)..(588): "n" may be a, t, c, g, other or unknown
  misc_feature (605)..(605): "n" may be a, t, c, g, other or unknown
ttttagaagaggtgtgtgtgtgtgtgtgtgtgtgtgtgtgtgtgtgtgtgtgtgtgtgtgtgtgtgtgtgttggagttttgctcttgttgccctggctggagtgcaatggcacgatctcagctcgctgcaacctctgcctcctgggttcaagcgattctcctgccttggcctcccgaatagctgggattacaggcatgcgccaccacaccccgctaattttgtatttttaatagaggtagggtttctccatgttggtcaggctggtcaagatagaatagtacttttcaaaatgtggtttcttgaccagcagcagcagcagcagcgtctcctggaaatttattataaatgcagattttaaggccctggtcccatacctactgaattggaaactctagactggggtccagcaatctgtattttaacaagcatgccagatgattctgatgtacactcaaagtttgggaactgctgttaagagaggataatgaaagttangcagaggaaattagatttgatgtgctcataagcagggatccatanaagatttttaatttttattttttaatcatttacttattttccatgtntccaagtcacgaaccanccatgggcacagaccaagaccaa

SEQ ID NO: 1245 - DNA, 689 bp, Homo sapiens
  misc_feature (630)..(630): "n" may be a, t, c, g, other or unknown
  misc_feature (652)..(652): "n" may be a, t, c, g, other or unknown
  misc_feature (686)..(686): "n" may be a, t, c, g, other or unknown
acacccgacgctctggcccacacagacgctactctgtagcatctcaggttccctctggctgcactctggaggaccacactcgttttctttttggctgccagaggcccccgcatccaccgctgagctgggagaaagatggcggcagccgtgcgacaggatttggcccagctcatgaattcgagcggctctcataaagatctggctggcaagtatcgtcagatcctggaaaaagccattcagttatctggagcagaacaactagaagctttgaaagcttttgtggaagcaatggtaaatgagaatgtcagtctcgtgatctcgcggcagttgctgactgatttttgcacacatcttcctaacttgcctgatagcacagccaaagaaatctatcacttcaccttggaaaagatccagcctagagtcatttcatttgaggagcaggttgcttccataagacagcatcttgcatctatatatgagaaagaagaagattggagaaatgcagcccaagtgttggtgggaattcctttggaaacaggacaaaaacagtacaatgtagattataaactggagacttacttgaagattgctaggctatatctggaggatgatgatccagtccaggcagangcttacataaatcgagcatcgntgcttcagaatgaatcaaccaatgaacaattacngat

SEQ ID NO: 1246 - DNA, 845 bp, Homo sapiens
  misc_feature (801)..(801): "n" may be a, t, c, g, other or unknown
  misc_feature (826)..(826): "n" may be a, t, c, g, other or unknown
  misc_feature (829)..(829): "n" may be a, t, c, g, other or unknown
aattatggcgacctccgcgacgtcgccgcacgcgcctggttttccagctgagggtagatgcggttactatgtggaaaagaagaaacggttctgcaggatggtggtggccgcagggaaaagattttgtggtgaacacgctggagccgcggaggaagaagatgctcggaaaagaatcctgtgtcctttagatccaaaacacacagtatatgaagatcaactagcaaagcatttgaaaaaatgtaactcaagagagaaaccaaaacctgatttctatattcaagatattaatgcaggcttaagagatgaaacagaaatacctgaacaattagttccaatttcttctctatctgaagagcagttggaaaagttaattaagaaattgagaaaagcaagtgaaggcttgaattctacacttaaagatcatattatgtcccatccagcattacacgatgcacttaatgaccctaaaaatggcgattctgcaaccaagcacctgaaacagcaggtatgtttaggctatagtaactactaaacatggcctttgttcatttgttaaaactgttttaaatgtaattattaataagattttattttgtttacctttgagggtaccaaatatttccatttcaaaaatatatagaaacatatacaaaaaattgagggcatggatgtgattctgagtaccgtatattaaatatttaaaggcaagagagaaaaattttaagtcaaataccaattatcaatgtaagcatactggcttatgcagaaattaccctgctggtttccatttgaacccaatgngttactctagtttataaaataatcntgngaagtttgcagctttt

SEQ ID NO: 1247 - DNA, 821 bp, Homo sapiens
  misc_feature (755)..(755): "n" may be a, t, c, g, other or unknown
  misc_feature (771)..(771): "n" may be a, t, c, g, other or unknown
  misc_feature (807)..(807): "n" may be a, t, c, g, other or unknown
gtgaaatgaatgacagcaatattataagtcatccggttccaagatggccgaataggaacagctccagtttacagctcccagtgtgagtgacgcagaagacagttgatttctgcatttccaactgacgtaccaggttcatctcactggggcttgttggacagtgggtgcagcccatggagtgtaagccgaagcaggacgaggcatcacctcacctgggaagtgcaagaggtcagggaattccctttcctagccaagggaagcgtgacagatggtacctggaaaattgggacactcccaccctaatactgtgcttttccaactgtcttagcaaacggcacaccaggagattatatcccgcgcctggcttggagggtcccacatccacggagccttgctcactgctagcacagtagtctgagatcaaactgcaaggcagcagtgaggctgggggaggggcatccaccattgctgaggcttgagtaggtaaacaaagcggctgggaagctcgaactgggtggagcccaccacagctcaaggaggcctgcctgcttccgtagactccacctctaggggcagggcatagcagaacaaaaggcaacagaaacttctgcagacttaaacatccctgacagctttgaagagagtagtggttctcccagtacagagtttcagatcttgagaacagacaggcttgcctcttttaaatgggtcccttgacccccaagtagcctaactggagaagacacctccaatangggctgactgatcctnatacagcttgggtgcccctttgaaacaaactttcanaggaaggatcaggc

SEQ ID NO: 1248 - DNA, 696 bp, Homo sapiens
  misc_feature (603)..(603): "n" may be a, t, c, g, other or unknown
  misc_feature (662)..(662): "n" may be a, t, c, g, other or unknown
  misc_feature (673)..(673): "n" may be a, t, c, g, other or unknown
aatcttatgtcgtgccttatatatttttacaaaaagtggtatgtagatacaaatgaataaatgtaaccacttaattattttgaaaatatccataagatttagctgtttttgtatggttgatatgtaagaaatttggtttgttttaaccatttataggtaggaaattatcctaaaaaataagatgcaagattatgtttcggtttcttcctcccaatacatttttatgtccccatttgatgaatttttctaaattccatttgcacacttaaaagttctaaatcattgcatatgttgtattgaatagaatgtgaatttctcagcaagatattaggtcccctctaaatgtaatccaaattgatatcatttctatcgatttctgcaaattaaggtattctctggaaaaattagattatttggatgcttcatgaacaaaataatctgtatcttcatcatatctaagattcttctatgacttccaactggaatattcagaaaatgatcacattacaaatgatcactctagcttccatgccactttcctgaaatgttcttgccagtgagaaatcatcacttcttccttggaatttctaaatattttattgntcaaaggcgtaattctttactaagttgtaaactcattgagataaagaactatagtctgnatatctgttgnctcaaaaagtgttttacacatag

SEQ ID NO: 1249 - DNA, 777 bp, Homo sapiens
  misc_feature (649)..(649): "n" may be a, t, c, g, other or unknown
  misc_feature (764)..(764): "n" may be a, t, c, g, other or unknown
  misc_feature (772)..(772): "n" may be a, t, c, g, other or unknown
  misc_feature (775)..(775): "n" may be a, t, c, g, other or unknown
aatatggttaaaatttgacaagataatcctgaagtttgtaatgacaagtctggagacaatataaatgcctttcagtggggaggacgattttaagtttatttatatgtttactattgaatatgtgcagtctgaaatgaatggtgcatctccatttgtttttcaagatagattaaaaatccaaggacagaagaacattgtgaataataagctcccatttgttggcgatagtaggtggagtgatagaagaggctgtgggtacataaacaggtgatactagtcaagagcaggtcaaatggaaagaatgaagacatgtttggaggctactggaataattccaagtaaaagttgctaaaggacatgtactaggataatgacataatgctttgtaaaaaacaaatctgaaaaaattataggtgaatgtaatgtacacaaagctatctgaacattgcagattatgggaagagaggagtcaaagatgatgattccaggtttcaaatctggtgacaatatgtggttcatttctcatctgccctcccctcctatgtgtactttgctgttccttctcttataagtggggtaatgctaaagttttcttcatcccttgctttccccactctctttcttccacattctctttcttcttcgtggnttcagctgtcatctctttttggatgactccccatttttacctctgggtctgatctctttctcaacctctgggccttcatatcccttgcttgcttgggatggtatcatggtatgancatgggcntangg

SEQ ID NO: 1250 - DNA, 848 bp, Homo sapiens
  misc_feature (739)..(739): "n" may be a, t, c, g, other or unknown
  misc_feature (813)..(813): "n" may be a, t, c, g, other or unknown
attataatgaggattaaagtaaagaacagaccgggcatggcagctcactcctataatcccaggactttgggaggctgaggcagaaggatgacttgagccaggggttcaagaccagccttggcaacatagcaagaccccatctctatttaaaaagataaatataaatatataaagaacacattgcaaagcatgtggcagtagtgagctttcaggaactggtggtgctaatgaataaatagcaccttagtaatgctcattctatctcactcacaaactggacagttcatgcatttgctggggtttcattttgaagtaagaggatggtttgtttctgcttagttttccccagtgactgagaaccctagcaagaaaacgaaacacctgtgcagacacattatacccatggagctgcatttctgtatgtactttttgcaggccattatcagacattacactgccccagaggttaattgtaatctccagagtccattgcacttccacagtggctgggatctttggccactttcccagcctgtttatggggagcctgacctgaagcacatctcctaagtgttttccaagttggcactgagtctctccgacttggaaatgccagcacacagctttggtgtgcaatgatttagctcttatgaaggcgccagtgaaatgcccactcctacccggtgttggacattttggagacctggaaagaagtaagcagtgttattgacaagcacangccctgcaaggggactgtgggaagttaggcatgaatctggcccttggccttaacaaggactggtgaagacactnagcatttcctcatgcatcaaaatggaggccaccct

SEQ ID NO: 1251 - DNA, 749 bp, Homo sapiens
  misc_feature (724)..(724): "n" may be a, t, c, g, other or unknown
  misc_feature (727)..(727): "n" may be a, t, c, g, other or unknown
  misc_feature (739)..(739): "n" may be a, t, c, g, other or unknown
cttgctgcctcttccggctgcggggcgagtagtcgtccgacgtctggccgtgagacgtttcgggagccggagtctctccaccgcagacatgacgaagggccttgttttaggaatctattccaaagaaaaagaagatgatgtgccacagttcacaagtgcaggagagaattttgataaattgttagctggaaagctgagagagactttgaacatatctggaccacctctgaaggcagggaagactcgaaccttttatggtctgcatcaggacttccccagcgtggtgctagttggcctcggcaaaaaggcagctggaatcgacgaacaggaaaactggcatgaaggcaaagaaaacatcagagctgctgttgcagcggggtgcaggcagattcaagacctggagctctcgtctgtggaggtggatccctgtggagacgctcaggctgctgcggagggagcggtgcttggtctctatgaatacgatgacctaaagcaaaaaaagaagatggctgtgtcggcaaagctctatggaagtggggatcaggaggcctggcagaaaggagtcctgtttgcttctgggcagaacttggcacgccaattgatggagacgccagccaatgagatgacgccaaccagatttgccgaaattattgagaagaatctcaaaagtgctagtagtaaaaccgaggtccatatcagacccaagtcttggattgaggaacangcnatgggatcattncttaatgtgg

SEQ ID NO: 1252 - DNA, 792 bp, Homo sapiens
  misc_feature (677)..(677): "n" may be a, t, c, g, other or unknown
  misc_feature (701)..(701): "n" may be a, t, c, g, other or unknown
  misc_feature (770)..(770): "n" may be a, t, c, g, other or unknown
  misc_feature (787)..(787): "n" may be a, t, c, g, other or unknown
cgtggagacatgcaccatcctggtctggtgtggacaaggagcagggcagcggggcaggcagggtgaggatggactccttgaacagtcttgcactgaggagagtgttgactgacatatttggactcttctaccttgtctgtcatggtctaatgcatgtcttttctgggtgtggtttcttttctttttttttttttttcttttttcgagactgagtctcacccaggctggagtgcagtggcgtgatcttggctcactgcaacctccacctcccgggttcaagcgattctcctgcctcagcctcccgagtagctgggaccacaggtgtgtgccaatacacccagctaatttgtgtattttttagtagagatgaggtttcagcatgttggccaggctggtctcaaactcctgacctcagatgatctgcctgccttggcctcccacgtgctgggattacaggcgtgagccacgcgcccagcaggatgtggtttcttgaggatcctctcagggctttggcctctcccagctcctatcccactactattagggtcacagaggaggaggtcaagactgggatttacccatgaaggctctttggatgaaatcagctggatattggctgggtcactttgttaaagaccagaacctggggtgggaacctgtgcctgtttggatgtcanaacccacagccatgggcccctggnccaactttctaaccaagttttggccctgttttgccttggaacacttggctttggggcaaatggtccacnccctatcttggccttgngcttg

SEQ ID NO: 1253 - DNA, 642 bp, Homo sapiens
  misc_feature (626)..(626): "n" may be a, t, c, g, other or unknown
  misc_feature (629)..(629): "n" may be a, t, c, g, other or unknown
  misc_feature (637)..(637): "n" may be a, t, c, g, other or unknown
ccaagtttattcctcctaattatcacacacctccttatctcactgctgagccagaggtaacttaccaccgattaaggccacaggataagtttctggtgttggctactgatgggttgtgggggactatgcataggcaggatgtggttaggattgtgggtgagtacctaactggcatgcatcaccaacagccaatagctgttggtggctacaaggtgactctgggacagatgcatggccttttaacagaaaggagaaccaaaatgtcctcggtatttgaggatcagaacgcagcaacccatctcattcgccacgctgtgggcaacaacgagtttgggactgttgatcatgagcgcctctctaaaatgcttagtcttcctgaagagcttgctcgaatgtacagagatgacattacaatcattgtagttcagttcaattctcatgttgtaggggcgtatcaaaaccaagaatagtgagtggctctttcactggcaattctcaaatgatatacatttaaagggcagattttttaaaaagatactactataataaacatttccagttggtcattctaagcatttacccttttgatactctagctagtcaggtactccaaattgactttgcancanggtggcanggtca

SEQ ID NO: 1254 - DNA, 685 bp, Homo sapiens
  misc_feature (534)..(534): "n" may be a, t, c, g, other or unknown
  misc_feature (554)..(554): "n" may be a, t, c, g, other or unknown
  misc_feature (626)..(626): "n" may be a, t, c, g, other or unknown
  misc_feature (652)..(652): "n" may be a, t, c, g, other or unknown
  misc_feature (666)..(666): "n" may be a, t, c, g, other or unknown
aaagtacatcctttttgtctccattttttccctttcttaaacaaagcaaacatttgtatactcacacactgaaggaaaaaagtgcaagtgttataagataattagaacggttaggataattgccttttatggatacataatgcttcagttgtttactgctaaatgaaatgtaaaagtatatattagactaaggaatagtgtacaaaatagatctaaatacaaaggaaattgtgttctgtctgaaaatttgtagatgggtctaaattaacaagaataaattaagaaggatatatacacactcatttatacccttgtgcgtatctcacatatgtgaacacacacaccaaatacactgaaatgtccatatttagtgccaaaaattgtgatgaaaaaccagtgggattatcctttgtaatagctcattctttaagttgcatttcaataaggcattgctgtgaatccagaggagattgtcaattacagaatttttttcatgatctagtatttgcttggtgcctcagagaaaatggttgntcatctctgcccctcactgntcatgtttgggactattggttggctgcgccagtagagcttattctgataagctcaccaaatttcaggagtancctcctttcaataacttcacacttgngcatgtggcttaantgaacttactggggactca

SEQ ID NO: 1255 - DNA, 752 bp, Homo sapiens
  misc_feature (709)..(709): "n" may be a, t, c, g, other or unknown
  misc_feature (717)..(717): "n" may be a, t, c, g, other or unknown
  misc_feature (735)..(735): "n" may be a, t, c, g, other or unknown
acccgcgcccttggtcccgcctcggagcctcggccccagctccggccccgacacgggagctgctcttccctcgcggaagcggtgccgcctggcccgcggcagcgcagacgccctgccttgccctcaggctggccgggccgcctgtggctggagaaagccccattgtggcctgagtgcgccccgcagccagtcgggatttctctcgcagagagaggcctttgttcgcctcaccccatctgactgccccgtgctctgtcccagcctcatttgctccccaagccccaacctgggttcctgctctggcaacaaggagcaggtggcagcaaggggcgttttcgcgcccctccccctaatcacccaggaaatctctgagcttggccacctgccctgggggaggagacgcgaggcctgcgcaccccactctgcttcatccctggttgctctccccactcctgtggcccctccgccggcgtttgtgctgtgtgacatccctctcctccaccgctgcctggggttgggggcagtcggggcagtcaggccaggccaggccacccctgggtgaagagggcattggggccagaagggtctgactgaccaccttcaaagtttctggtcttagctgtcccgccgagcagaatataaagtgctgaaaccagaacccaaaactgggacgcaagggccaaaaccttgcgcaaggggccaaccgggnaatcgggncaccattgcccccttggnccttgttggggcccttg

SEQ ID NO: 1256 - DNA, 561 bp, Homo sapiens
  misc_feature (552)..(553): "n" may be a, t, c, g, other or unknown
  misc_feature (560)..(560): "n" may be a, t, c, g, other or unknown
gctacagcagaataaaaactgctgtcaaagagctattgccagctatcagtggtggtacaaggacggttttgtgttcatctgaaacccagctgaatttataattatgtaggaaataaacagttaatatggttatataatagaaacagtaccacacattgtaactaaattatactatgtatgcctacactaccattgtaacttttggaataatgattatactatttgccttattgctttttgaagtatgggtattttagtgcatactttgtagacctcaaaacccatgaagggtctcaaagaagctggctggatacaagcctgctgtggatgcctttttactctcatagattgggattacctaaattcaacctattctctgtttacaaactccaactagagcagctatgcgaccttgtgcctttagactcttggtttttcatttctccccgtcccttccccacctttttaaagtaagccacagcttttctgattgaaagagtgaaaggccagtgcatataatgacaaactgatgataaccttatattggcagtnnggggggnc

SEQ ID NO: 1257 - DNA, 776 bp, Homo sapiens
  misc_feature (615)..(615): "n" may be a, t, c, g, other or unknown
  misc_feature (628)..(628): "n" may be a, t, c, g, other or unknown
  misc_feature (725)..(725): "n" may be a, t, c, g, other or unknown
  misc_feature (760)..(760): "n" may be a, t, c, g, other or unknown
  misc_feature (775)..(775): "n" may be a, t, c, g, other or unknown
tttggtagggtaaggataggctttcttgaaacactagcctttagctgaggtattcgcacacagcccctgtctctgcataaggagataataaccccaaatcaaaggactgtcttctgttaattactaaattcccatttttccactttaagttgtgtggctggtaatagcgtccgccttctgatataagtcatagcatgcaacatgcactttgcaagtgcattttgcttgaatattttgcaaagatattctattgaattgagaggcagcaagtatttgacgtaatgattacacttgatcacacaaaaacacttcacagtgccatggctggtcttcatagtagtcagctcttgactttgcttctgttttttttttttttctccccacaagactgttagcttttgctgtggcttcaggagcatttacatgtcttaaaagcttataaataatataaaaggctgactgtgttagtagtgcagtagtcagtgcataatgccaaattggtagtgatgtctgcacgacatgctgacttgaataagttattttcaagttgtctcattaaggtttgaactggggatgggacagagatagcctttatcacatatttctttttaattnttatcttactttnttttttttttaagctaaaggcaaaaagaatgcacatacttattttaatgggattagaaaaatgagttgttccctggtaagcttgacccccagtattntgacaagttttgcagcaacccttaaaaacctgggntttttctcatccccnc

SEQ ID NO: 1258 - DNA, 726 bp, Homo sapiens
  misc_feature (684)..(684): "n" may be a, t, c, g, other or unknown
  misc_feature (701)..(701): "n" may be a, t, c, g, other or unknown
  misc_feature (722)..(722): "n" may be a, t, c, g, other or unknown
agacataagagcaaaactggagtcgctgaccattgagaagtaagcatttttagggaggcaagtgttgatcagaaaggatcttgactacctttgaacttgaaggtcagaatgtttacacaagactcagtagaagtgaagagaaataaagtgagataagttgttcactggagagcaaattttgaaaatagaacaattccaagggatgataagtttaccttgtggccctccgcttgaatagcaggtagagaatacagatcaaagtcttagaatgaaggtcaagagtgtgtgaaaccagagagtttgaaggatcaccaacatgttgtgatggagtgggctacagttcaacacatccctgttgcccatattctttgcactttggtgagttaaccataaataaattcttgtctgatatcctcttaaaatagaatttaccttattttccaaccagattatttaaatgttttgcagaagtgagtattgatttactgaactgttctttaataatcacagctggaaattgcaaaagatcatcaactatgaaactatataaatagaacgagataaagaaatgggaaagtgccttcttcccttagttctctattcagttggtgaagaactgtaataaatcttattgaaatctagagtttttaattaagaaaacagaaagctcatgttaaatttacngataagagttatgcctncctcaatattgccaactttantttg

SEQ ID NO: 1259 - DNA, 773 bp, Homo sapiens
  misc_feature (748)..(748): "n" may be a, t, c, g, other or unknown
  misc_feature (753)..(753): "n" may be a, t, c, g, other or unknown
  misc_feature (766)..(766): "n" may be a, t, c, g, other or unknown
aatgatttcctcagtgattacgtacagagcgagtccctgcgggttaggggccccctctggagccatcctgatggctttgggggccttgcttccattttccattattatgtggactaccggagcgacagcgcagtccaagaccttgcaggatgtctcgccgcaagcaagcgaaaccgagatccctcaaagaccccaactgtaaacttgaagacaagactgaagatggagaggcactagattgtaagaagaggccggaagacggggaggagttggaagacgaagctgtgcacagctgtgacagctgcctccaggtgtttgaatcgctgagcgatatcacagaacacaagattaatcaatgtcaactgacagatggagtggatgttgaagatgatccgacttgctcttggccagcttcctcaccttctagcaaggatcagacttcccctagccatggagaaggttgcgattttggagaggaagaaggtggccctgggcttccatacccgtgtcaattctgtgacaagtcgtttagccgctcagctacctaaagcaccatgagcagagtcacagtgacaaactgcctttcaaatgcacctactgcagtaggctgtcaaacacaagcgcagcccgagatcgcacataaaactccacaccggggacaagaagtaccactgcagtgaatgtgatgctgcgttttccagaaatgatcacttgaagatcccttaaaggacttacacgttcaacaagnccttntaaatggggccanttggtcc

SEQ ID NO: 1260 - DNA, 800 bp, Homo sapiens
  misc_feature (752)..(752): "n" may be a, t, c, g, other or unknown
  misc_feature (765)..(765): "n" may be a, t, c, g, other or unknown
  misc_feature (792)..(792): "n" may be a, t, c, g, other or unknown
aaattgcttattaagcctcaggtttcttcacttacaaaatgaggataataattgcacctggtccacagggtcatgacatggattcagtagaaagctcagcagtgtacctgacttaacagttgttcacactaagatctttaaactttacaatggtgaaaaggcaatatgcattccatagaactcatacaaccattttgttcttaactttcagtaaaatattcaataaatattcaataaactaattcaaaaaattactttattacaaaataggctttgtgttagaggattttgcccaactgcaagctaatggaagtgttctgagcacattcaaggtaggctaggctgagctgtgatgttcagtggattaggtattaaatgcatttttaacttacaataatttcaacttataatgaatttatcaggacttgatcccgccataagtcaaggagcatctgtacaccaactgttggttattatttttcatccccacaagacagatatagttctgcatttctcatgcagattctacaggcctttattctaattttttaatgtgccaattttatcatatttggtttcttcagtctttaatatattcatgtagatgtctgtgaattatagtctatctatgcttgtaggctttaaaatatatttaagtcaatggtgggtagaaattttattttagcttaaaaaattaatcttataaaatgcctgctgacatttcatgtaagaattctttactcaattcatgnttttctcttcttncctgtggagtatatttattgactgcanatggaagc

SEQ ID NO: 1261 - DNA, 768 bp, Homo sapiens
  misc_feature (697)..(697): "n" may be a, t, c, g, other or unknown
  misc_feature (723)..(723): "n" may be a, t, c, g, other or unknown
  misc_feature (738)..(738): "n" may be a, t, c, g, other or unknown
gtcatggactggaagttaagaacttccacacaataacaaaaattatgggccagacacagtggctcacacttgtaatcctagaactttgggaggccaaggtgggaagatcacttgagcccaagagttcaaggctgcagtgagtggtgatggagccatgcactcagcctgggcgacagggtaagaccctgtctcagaattaaaaaaaacaacaacaaaacaacatacataaatacctgatttgtgtactactgagaaaagttcagttcttggggagagtttcagtttttcccatcaagaactgcgtggtattttttgttatttgtgtgtgtgtgcgcgtgtgagacagagtcttgctctgtcatccaggctggagtgcagtgatgtgatcttggctcactgcagccttcaactcctgggttcaagcgattctcgtgcctcagccacctgggtagctgggattacagacgcacaccaccacacccagctaatttttgtatttttagtagagatggggttttccatgttggccaggctggtcccgaactcccgacttttcaagtgatccacccaccttggcttcccaaagtactgggattacaggtgtgagccaccactaccagctgagaactgtgtgttcttatgctccgtgtgctacttatatctcagacaacgaccagattttttaccataccaagtnaaatagtaaggagaagggaaactgtncatatatctttttgncttttaggaaacttttacaaatgggattca

SEQ ID NO: 1262 - DNA, 853 bp, Homo sapiens
  misc_feature (385)..(385): "n" may be a, t, c, g, other or unknown
  misc_feature (561)..(561): "n" may be a, t, c, g, other or unknown
  misc_feature (649)..(649): "n" may be a, t, c, g, other or unknown
  misc_feature (709)..(709): "n" may be a, t, c, g, other or unknown
  misc_feature (779)..(779): "n" may be a, t, c, g, other or unknown
  misc_feature (808)..(808): "n" may be a, t, c, g, other or unknown
  misc_feature (829)..(829): "n" may be a, t, c, g, other or unknown
agccaccgctcccctcccccgcccgacccctgtgcgacccccgcggggcgcggggtctgagccttgcgggcctccgatcccctcctcagcgttcgcgcggccgagcctgcagaaacagagctggggagaaagcgctctggaggccgctgtgcaccccttcctgcagggctcagactggcggtgtgatgtgggtttattgccttggcctgaggcaggtggcggctgcttctctcggagttttcaaagacagggaaagtgatgccgagtggctgaaggtcactgaggacagtgccgggagatacgtgaagattccttcccagggaaggaatctggaattcccacgcatgagtagagggctctagagagacccgcgcgctggcccttnccgaaaccccttggctccagtgcaccatgtgagtccctggccgcgctcggtgtctctccttcggcccagatttggggatgggaattcctaatggagaaatcgctcatttgcatagtcagtaccctcacgcctcctaagtgtagcctcattatcgacacagacgcctgcagagtcgnttctctataatgcaaattttgcacgatatttttgaacaacgtttttgagttatcatagtaaatgaaaaggcaattactagttatttangaagaaggaaatggtttgaagtagagataacttttttacctctggggggaaaaaaaggcnaatgacttcagattccatgggcaggtcaaaatcagaactggtaagatttctgcatatctggggagtatcncattaataatcattttcctgaaaattacnctcttcttaattaaactgganttttgcattaaaaatgtgaagata

SEQ ID NO: 1263 - DNA, 697 bp, Homo sapiens
  misc_feature (665)..(665): "n" may be a, t, c, g, other or unknown
  misc_feature (674)..(674): "n" may be a, t, c, g, other or unknown
  misc_feature (682)..(682): "n" may be a, t, c, g, other or unknown
gaagggagacagggaagtgctgggaggagaagggtgggtccctggcgagggctccacccccgggcctgtgcccacagacctaggtgaagacaggcactccagccttcacgtccaaatgttgcatttcccaagaccactttgacccgccacgcccccattctgtgcctataaaaaccccaagaccctagcaggaagacacacaagctggatgccgagagaaacacattggcgaaggaatacacaggtggatggacgtcgagaggaatgcactggtgtaggagcacactgggatgccagcaggccatcgactggtggaatgacacaaagtttggctggggcagttggagaagagttgggccaccaagcggccagactccaggggaaaaccatttcccttctggctgccccatctgctgagagctgcttccactcaataaaacctcgcactcattctccaagcccacatgtgatcctattcttctggtatgccaaagccaggatacagaaagccctctgtccttgccataaggcaggggtctaattgagctggttaacagaagccgcctatggacggctaaactaaaagagcatcctgtaacatatgcccactggggcttcagctgtaaacatttacccctagacacttgccgtggggtcggcgcctnacagcccgnctgtctgnatgctcccctagagg

SEQ ID NO: 1264 - DNA, 844 bp, Homo sapiens
  misc_feature (622)..(622): "n" may be a, t, c, g, other or unknown
  misc_feature (786)..(786): "n" may be a, t, c, g, other or unknown
  misc_feature (810)..(810): "n" may be a, t, c, g, other or unknown
  misc_feature (825)..(825): "n" may be a, t, c, g, other or unknown
tcttttgaactctcctgtggtcagctgtctgctttccttgctcagcacggtgttgggatggggtttgtaaatttaatttcagataacatcttgtttgtgaaaaaaagaaaactaaagatcagtgtaacaataatagtgaagcatatggaataaaactaaagatcagtgtaacaataatagcgaaacatatggaattgtgaaggaaaataaataggtttagtatacacaagaacatattgctctgatggttttattttattttatatttgttttttctctgactttaaatgctcctaaagacacatttggcatttttgcgccagtagcaaggatgtgcagagatgtattggtggaagaattctagtggttccctattaaaattctataacttgccgtattaccagtaaacgtgagctgccagagcctacaggtaggcaagggctcccagaaggagaggcatgaggaaaccttgccaagaaggcaggggaagccccagtggtcactcccacatggcattcagacggagggtcctccagcatcgtgggctcaagagttgtccaagtgtgtgttcgtgtgtgtgtggtgtgtgtgtgagagagagagagagcacgctagctctcangatggggatgttggggaggaggcctagaactgggtttctcctctgtgtaatctactctctctttatcctcctcccagatcctctcaccctcgggagaagactcttagagaacttggtacaaatgcatattccttagccacccccttctgaattcccggtttcanccaggaattggaaccgggccccangaatgggccattttnaaatcagggatcctttctt

SEQ ID NO: 1265 - DNA, 834 bp, Homo sapiens
  misc_feature (707)..(707): "n" may be a, t, c, g, other or unknown
  misc_feature (742)..(742): "n" may be a, t, c, g, other or unknown
  misc_feature (760)..(760): "n" may be a, t, c, g, other or unknown
  misc_feature (832)..(832): "n" may be a, t, c, g, other or unknown
tttaaagagatcaaactagataaaagtttactttattcttcatgatgtctgataggttgtttgctgatataggtgctgtgtctggttttcctttcatgacttgtacctagtgtagctatttatagtgtatttgacaaacttttccacttgtagactcaggtaggcctgcttgacctcctctggggatatttgttaatgtcttgtcagagttgataaaattttccatgttcatgctttcttttgattctcataataatcttctaaggtaactaaaaaagaatccttattttcacatttgattaaggaagctggtcctaagagattaagtcacttggtcagggtctcttggtgaggtacttaagtgaaattggttttccaggtgctggccttccttttccaaactaatcctactttgcgtgtgacctgaaaaacatttttgtgttacctgtttttgtttgtttaaacatgtacttgtttattagacgaaacagggagcccaaataaaaccagatgtgagctgcttttaaccatccctgaatcgtaatgatccatgtgtgaattatccctttgtagctagtttttaatcccagactgggctcttccagtttttcagcctgctgtcaagtctccccagcccctgacttggttttgtcagagcagattagagagaaattctacagtgcgagaacacgatgtgtatgatttangaagcagaactctttttttttttttttttttgganatcagagttttctttggnttccatttacctgaagtaatgcattggtcatttaaacttaaaagctttcaagaatggggtcatgaacatgtnag

SEQ ID NO: 1266 - DNA, 861 bp, Homo sapiens
  misc_feature (330)..(330): "n" may be a, t, c, g, other or unknown
  misc_feature (628)..(628): "n" may be a, t, c, g, other or unknown
  misc_feature (796)..(796): "n" may be a, t, c, g, other or unknown
agatggtactacgtgtgcatgtgccaccatgcctggctaatttatttttaagatggagtcttgctatgttgcccaggctggttttgagctcctggcctcaagcaatcttcctgagacaggaatcccaaagtgctgggattacaggtgtgagccactgtgcccagccaaatattagaacttttaaattcatttagtatgtaagcttactgccaagcatgaaagaatcactttgaaggccagtaatgttttaaaggtctggaagattctcttgagggctaggaagcattatgtgctaggttcttgaaccaggagaaaaggggtatcactaanaagaagggaaggaatcctggtatgcaaaatagcttgggcgctatccttgcacatttgacaagtttagtgaagtactattgaactgttcagtaaagtatctgttgcctatagataaaatgtcttttgtagatacttatatatctacctacctatagatatctatatatctgtatctatatatcccttaaagctaagctaatttccttaaccttttctctgttgatatttgtttggtagcctttatctgattctagttaataactcgtaccctgtcatttttttaaaaataccctttggntttgtaatgtgttctttcattcttcttcccaattcagttttggtaccgttcctgttacgtaaatctaatctgggtgagcagagactttcttaggattatgcccttggtgaaggcaatcacagggcttaaccctgaaggcgcccatactgactttatcagttattctanggagatcaggtttggggcactaacttaatctaccaactcctaagataattaatttattattggtt

SEQ ID NO: 1267 - DNA, 800 bp, Homo sapiens
  misc_feature (730)..(730): "n" may be a, t, c, g, other or unknown
  misc_feature (747)..(747): "n" may be a, t, c, g, other or unknown
  misc_feature (762)..(762): "n" may be a, t, c, g, other or unknown
ggccttttttttttttttttttgagacagggtcttgttctgtcacccaggcaggagtgcaggaacacaatcacagctcactccagccccaacctcccacctcagcctcccaattagctaagaccacaggtgtccagctaatctggtttttgtttgttgtagatactgggtctccccatgtcacgcaggctggtctcaaactcctgggctcaagtgatcctcccacctcagcctcccaaagcgctgggattataggcatgagtcaccgtgctaggctgaaatcttatttttagtaacattacacaagtctactcaaataaatttgataaacttgaagaaatgataatttttcaaaagaacacaatttattgaccctcaagagagaaagtctaaaacagaccaattatcacaaaagaaacagagaaaagagttaaaagactcctctaccaaaagcaccagatccattgattttcacaggggtaattctgagaaacttttaaaaatagataacatcagctgggcatggtggctcacacctgtaatcccagctactcgggaggctgaggcaggagaatcgctgaaactcaggaggtaaaggttgcagtgagccgagattgcactactgcactccagcctgagtgacagagcgagactctaaaaaaaaaaaagaaaaaaaaaaaaactctggagagataaacaggcagatacaaagaatcacaaccacatcttgngagcaataatctcccanggaaccggtggccanatgggtaagcctaaaatgtaactgggcaaattgctaga

SEQ ID NO: 1268 - DNA, 741 bp, Homo sapiens
  misc_feature (678)..(678): "n" may be a, t, c, g, other or unknown
  misc_feature (701)..(701): "n" may be a, t, c, g, other or unknown
  misc_feature (733)..(733): "n" may be a, t, c, g, other or unknown
agcagtaggcgctggggccgcggcggaccctcgctgccctacctctctcgcgggttagtgcggggtcgggctcggccagtcctggccagctccgggagagcctggcccgaattcctgcctccaccctctttctcgccgcgaaggtgactgttccttttgccccagccctctcagacccgccccggattcccaggcatcgggagacgcggaaaggagtggggtctggtggaggccccgggcgtatcgctctccaggccgccctccgcgggcctgccccggccaccgctttaacgtcggagagaaggaattggggagaaaggtttaagagcctgcgacttcgttgctgaacttttcccccccaagacaggcttccgaaagctgcgccactggagggatccgggacctcagactactcgggtttggccctggcatgtgtgggagcagtttttattagagagaatgctcaatttgcaagttaatttcaagtctccagccacgtcaggaaaaaaacatgaaggaattaaaggaggccaggccgcgcaaagataacaggcgtccagatctggaaatctataagcctggcctttctcggctaaggaacaagcccaaaatcaaggaaccccctgggagtgaggaattcaaagatgaaattgttaatgaccgagattgctctgctgntgaaaatggtacacagcccgttnaagatgtctgcaaggaactgaacaaccaagancagaatgg

SEQ ID NO: 1269 - DNA, 811 bp, Homo sapiens
  misc_feature (656)..(656): "n" may be a, t, c, g, other or unknown
  misc_feature (746)..(746): "n" may be a, t, c, g, other or unknown
  misc_feature (794)..(794): "n" may be a, t, c, g, other or unknown
  misc_feature (801)..(801): "n" may be a, t, c, g, other or unknown
gtgcaatgagatctaaatagaaacagcaaaaagtttaaaagcaggggcatgatattaaggcatagagtttttcttagttttctttttccttgtttgttggtttatgtagagttaagttgttatcaggttaaaataatgggttataagatagtattcgcaagcctcatggtaacctcaagccaaaaacaaacaaacaaacaacaacaaaaaaacacatagtggatacacaaaaaataaaaagcaagaaactaaatcatatccccagagaaaatcaccttcactagtggaggataggaaagaaagaaggaagagaagatcacaaaacaaccagaaaacaaataacaaaatggcaggagtaagtccttacttatcaataataacattgaatgtaaatggactaaactctcccgtcaaaagacagagactggctggatgaaaaaacaagacccattgattgttgcctacaagaaacacacttcacctatatagacacacacaggctgaaaataaagggatggaaaaaaatattccatgccagtggaaaccaaaaaagagcgggagtagttatatttacattacatacaatagatttcaagacaaaatctgtaagaggagccaaagaaggtcactacataatgataaaggagtcagttcancaaggtgatgtaacaatgtaaaatatatatgtacccaacactggagcacctagatatataaagggaatattattagacctaaagagagangccttgatacaataatggctggagaactttaaaccccattttcagcanttggacngatcttccca

SEQ ID NO: 1270 - DNA, 837 bp, Homo sapiens
  misc_feature (798)..(798): "n" may be a, t, c, g, other or unknown
  misc_feature (830)..(830): "n" may be a, t, c, g, other or unknown
  misc_feature (837)..(837): "n" may be a, t, c, g, other or unknown
ggcctttttttttttttttttgtctgagacagagtcttgctctaccacccagtctggagtgcagtggtgcaatctcggctcactgtagcctccgcctcccaggttcaaggattctcctgcctcagcctcccaagtagctgagattacagacgcccaccactaggtccagctaatttttgtatttttgtagaaaaggggcctcaccatgttggccaggctggtctcaaacgcctgacctcaagtaatccacctgcctcagcctcccagagtgctgtaattagagtcatgagccaccacacctggcctaaatgcactcctataagacaatgtggaaggtaggggccaaattccacacaaccagcttagaagacaaacttttacagcaaagagccatcatttggagaaggacatatgtataatggcaaagaggtattaatacgtgaagtacctgtgacattgaggatcgttacctagaattgacattcagtatttacttcacatagctctgtaactgggtctcttgtaaacaggcattttgtcctcccccttccaatactgtgaacccattattatgtcacctttcctcatgacagtcctataaactaggtaaagaacaaacgtctctattcacagacagaacaggggaaacaagataaaaaatacaactttccagtatttaacaaattctgtcaagtctagacaaaaggtatgatgtctaaatgaactgttagtgggctatgttgaatctcaaaattatctttctccttttttttttaagagatgatctcattctggtgnccaagctggaatgcaatggcttaatcatactnactggan

SEQ ID NO: 1271 - DNA, 819 bp, Homo sapiens
  misc_feature (545)..(545): "n" may be a, t, c, g, other or unknown
  misc_feature (616)..(616): "n" may be a, t, c, g, other or unknown
  misc_feature (638)..(638): "n" may be a, t, c, g, other or unknown
  misc_feature (689)..(689): "n" may be a, t, c, g, other or unknown
  misc_feature (784)..(784): "n" may be a, t, c, g, other or unknown
  misc_feature (807)..(807): "n" may be a, t, c, g, other or unknown
  misc_feature (817)..(817): "n" may be a, t, c, g, other or unknown
aaaaaaatgaaaaaaaatttcttatgagagtgaatgttctcacctctaatatgtgtgggtttcaggataagagtataaatggagcctgaatactctatctaaatatctcaaaattatgaattcccccaacaagttgctgaataaactgtgcgttgtctgcctgccttgacaaacataccttcaacatttaaaggtctgggtttaaatgtagaattctgaggctcctcagtgtcccatgctggaatgtggtggccttgggaaaatggaccttagctttaggcctggccctcctctcttcccaagctcttcttcacactgcaagggcctcccagatgatgcatgaagatcctggcccatatattcagctacatccacatccctagcaaaagggaggctaaggccattcctcaggcctagggcactgcccctggagggaagaccagtggaagatgcctggaaaggccctggaagtagcttcaaggccatttcgatagagaattctgggggcctgaaaacctagagccaaggggtggacctgggctcangataggcaagtccccttgatccaaggtatcactgtaggaggaagggcagtcagaggagggccagagctganccttctaatgcacagggcccanagtggagtgaggaacaatgctgggattagacacccaaatctactgaattancgaagtccaagccaagtactggaaacaagggctggcatatcacaagccacttaataagtggtacttttattattaagcccctactgggatggcanccttttaaccccttgaggatgtnaccaatggantt

SEQ ID NO: 1272 - DNA, 745 bp, Homo sapiens
  misc_feature (710)..(710): "n" may be a, t, c, g, other or unknown
  misc_feature (719)..(719): "n" may be a, t, c, g, other or unknown
  misc_feature (725)..(725): "n" may be a, t, c, g, other or unknown
tgaatgctggtaccctcaatttattattcttgtttggatatatccaatttaccttgttgaacattatttactaacagcaatctgttagccactaggaatgtaaagacacatcataatatgaccttctgagggacaaaaattgaggcctatttatctttgtatcccaaatgcctggtgtacagctggttctcataaaatgttgaattgctcccggaccagactttagagtttggttttaaaagaaaagccagagttcagcaacagcgaagggaatttaatgtggagaaagaaacatgaaccaagaggcacagcttagtgttgctgagatcaggtaaagcatccctgtgactggggcataaggtgtggcagggatgagagggcaagaaagagtggcacaaaagtgcttgcaatcacagcagggactatcaagtaagggccttgagtgttgtgccaaacgactgtggaggttgaatttaatctcatggacatctctagactattctactttagagcaactctaacctgtatgaacatcttccagttgctggatcattttctttagggatttttggagggggtggggagaatctcagggaagcattcatatgtcaagcaaagtgacctagacttcagatttacactggaggcttcacggtaccaggtgttgaaatcacacattctttggcacagaagctagcattctcatttgngcatacagnttatgnctcgattattctttcagttg

SEQ ID NO: 1273 - DNA, 787 bp, Homo sapiens
  misc_feature (664)..(664): "n" may be a, t, c, g, other or unknown
  misc_feature (695)..(695): "n" may be a, t, c, g, other or unknown
  misc_feature (705)..(705): "n" may be a, t, c, g, other or unknown
  misc_feature (781)..(781): "n" may be a, t, c, g, other or unknown
atttacagatagattagataatctatctagagatagatagggagagatatctatcaatacatatctctatctagatatagatagatggttttctatatagacctatctatctatatatgtatacatctatatatgtctacacatatctctatacacatatatatatttatatctacatctatatttctacatgtatataggtatgtatatatctacatgtatatatgtatatagatagatatatacataggtatctgtatatatgcatatacatgcctatctatctttatctacatgtattacatagatagggtaattactgataaatcctttggccttctttgtaaatctctgggctaaagacccctccagtattatacatgttctggtctagattgctcactcaccagttctcctcactatctagagaagatccacttagcaggcctccccttaaagaagggcaccttaactggactcactcctcccatagtagactgcacagtacacaagcagaagaggagagctcaataataaagtcaccataaaggataatttttaaatgaataaagaaatcagaaaatccagtattggctagcacatatggctatcggcaagctcaccctacaaaaaaatagtgagaaaacagttcgaatattgccgnttggggcacatattctacaaaaagggaaagntttgaaatgnatatatatttaatttaactctaaaatatttgaaggcaagcccagtggctcaccctataattcagactttgggaggncagggc

SEQ ID NO: 1274 - DNA, 786 bp, Homo sapiens
  misc_feature (602)..(602): "n" may be a, t, c, g, other or unknown
  misc_feature (676)..(676): "n" may be a, t, c, g, other or unknown
  misc_feature (720)..(720): "n" may be a, t, c, g, other or unknown
  misc_feature (748)..(748): "n" may be a, t, c, g, other or unknown
  misc_feature (786)..(786): "n" may be a, t, c, g, other or unknown
attgcaatggaagcttaactttagtttatttctaagcattttttatatctgtggagtaatagaaagctccattactcaactggaaaggaccctaatgacagggcaactgaacagattgcacatgggatagccaaactggactttctttgtttcctctttaaaagtttacaatgcagaccattttttgtcccttccttttgtttcctctgaggggctgttcgccccaggcagggtccatctttctgatctgtccaacctcctttgtgccacacggtgctggtcacagggcttcagtagtgtttgtgttgtgcgctcaccccattccagaacaaatccaagaggccagtcctccataagcacaaatggaattgtgcaaccaccagaaaaacactactgtggcaaactggagaagtgccaatttaattctaactgccacgttctcatgatgtgctccaccaactttttagtatatgagtcactggttttataaggttgtttttaccacagtggtctttttaaaccacctgcccactcccttaacaagagttttataccaattattagtcaacactgataaaaggcttttttagggctttatttgnttgagccttttcagtgaaagaaggaacatttcctatgggctgctcactgccttaaaacagatttctatgacagnttaacagttgggttaaatcctaaaccattggtaatttccactgnctttcatttacaaccaagcaacaccagntaacatagtagcctcatctctatatatctttctctttn

SEQ ID NO: 1275 - DNA, 831 bp, Homo sapiens
  misc_feature (757)..(757): "n" may be a, t, c, g, other or unknown
  misc_feature (797)..(797): "n" may be a, t, c, g, other or unknown
gtgatagaagatggctggcattccttccttcctgagcaagaatttgaactctattcttcagctgtgagttaacttttgagaactgtggattatgagaagtaacccaataccttatttgacttgtgaaaatgatcacttcttttgaagagtaataaggtgaagttgacttatccattcctaatcttaatatatttaaaaggattgaagccatgcagagtatgatctctgatcacaaaggaattagattaataatcagtaatactaagatatctaggaatacccccaagtatttctaaattaaacagaacgcttgtaaataatctgcatgtcaaagaaattagaaaacattttgaagtgagtgataatggttatgtaacatattgaaatttgtggaatacagacagctaaggcagtgtttagagataaacttacagctttaaaatttttactagaaaggaaagtctaaaattattgacctaagcaccaatttaagaagctagaaaaaaaaaagcaaagtaactagaaagaaaaaataataaaaataagagcagaaagcaataaaataactagaataagtaagtttagcaaagttggttgatataagatcggtatacaaaaacgaattgaattggcaacaagcgatctgacaatgaataaaatatttacgaataaatttaacaaaagaaattcaaggctatacctgaaagacataaacattgtggaaaagttgcagagactaattaaagagagatctggnactcaatggagacatatggtaaggtagggtgctgctttgngaagacattgatagagaatttaacttgaggctgg

SEQ ID NO: 1276 - DNA, 705 bp, Homo sapiens
  misc_feature (680)..(680): "n" may be a, t, c, g, other or unknown
  misc_feature (686)..(686): "n" may be a, t, c, g, other or unknown
  misc_feature (699)..(699): "n" may be a, t, c, g, other or unknown
catgtccagaagcaatccacagtttgagaaaccaagtttgggtaagatttctggggtccattgctggtttacagggataatcagacagactatttgaaatctatcaggatgatgatgatttctgtcaggcctgatggggctcagctcatgaatagcatgggggttctgggatcagctccctgggacagggcaggcctggaggggtcacctgtaaaaagttggtaagcaggggcattgtcaccaggcttcctcttccatgtcaatggagtctggaggcagagttggaatccagctctgcacctttttgctgtgcaccctcaggcgggtcagcaacctctctgaacacacacccagtctacaaaatagaagaaaaaccctataaggtggtttttggcaggggagaggacatgggaagagattgaataaattagttgtccatcctagcatagagcccagaacaaggcactgaaaagacttcttaaatttttttgtccaacaacatcttggacagttctcatttatgtcaacatgcctggtcctgattttgttggtcatatttgcatgtcatattttaaaccatgaagcataataaccaactaagtaagaaagccctggcaaaaaagctgagaggtctggtgcaatggatcacgcctgtgatcccagcacgtttggaagccgangtgggncagattgctttgncccaga

SEQ ID NO: 1277 - DNA, 752 bp, Homo sapiens
  misc_feature (417)..(417): "n" may be a, t, c, g, other or unknown
  misc_feature (420)..(420): "n" may be a, t, c, g, other or unknown
  misc_feature (660)..(660): "n" may be a, t, c, g, other or unknown
  misc_feature (723)..(723): "n" may be a, t, c, g, other or unknown
  misc_feature (750)..(750): "n" may be a, t, c, g, other or unknown
atgatgttttgtgtgtgttttaattctcatctatgacattggaataatgacaggacctacctcatagaattgtgaagattaaatgagatattataggtaaactaattagaacaatgtctgacacataataagtgcccttaagtgttaaatgagaatgatgttattgttttgtgttacagaattagtgtatctgtggaaaattggccaaaacaaattctgatggatcttctttattgctgtttaaatatttcagacaaaatgaaatataacctagaatatgaacagtgctagatatgcatacttgaaacaaaaatcatcatggtcatttatatatttctattttactaagatttttttctcttataaaaataaattataccttctaatagtaaggaaattgcctctgccagtttttgntgnttaatttggtttaatttcaaacattaaaatagcacattaattgatcaaggaatctcaattactttcaaatgctgcaaatatactaatatttattcatggcagtcacagcaggggtagagggacaggagacaaccatcttctagaggaagaacttttaaaacaattatattaattccatttataggaaaaagaataattcatagaaaaattaatggtgcagtcctaaaagcatgttccagntactattcccaaaacaatgggtcagattctattggattcattggctattaatcattttggcancttggggctatgctggccctaacaggntt

SEQ ID NO: 1278 - DNA, 810 bp, Homo sapiens
  misc_feature (566)..(566): "n" may be a, t, c, g, other or unknown
  misc_feature (677)..(677): "n" may be a, t, c, g, other or unknown
  misc_feature (763)..(763): "n" may be a, t, c, g, other or unknown
  misc_feature (766)..(766): "n" may be a, t, c, g, other or unknown
  misc_feature (796)..(796): "n" may be a, t, c, g, other or unknown
tgtttttccattcccaagaaaatgcaagattgtgttttggggaagattctcaactgtgagatgacagcgtatgctatgttcctttcattgcaattggtgttttatagcatcctgcccagcctggcccgcatttggccccgtagccatgctgtcctcaggctaggatctggttagttgttccagactcaagttggtccctccttctgctctgtggagaaaaatcacaacctcaaagggataggtttttttttttatggttgctcctgagagtggcatggtccctctagatgtcagcaaatattaaggcaattaaataaggcaaattaattatgggaaacattagcattgatttctgaagacagtcttcttcttgctgagtctagcctcaccccttcttgccttttaggaagagttccatgttcttagacaagcttgttttcggataaaatattagacttttttcttagaaaatccctttgttttaaaattggtaattttttaaaaatcccaatctctggctacatttgagtttgaggaaattctttttcacatctctaaatatgttncaatttgatagtattagtaaataagtaaataaaaatgccttattccacaaatgtttattgagatccttctaatttccagtaccaggaatacacacatcaataggacatggntcttatacttcataaagcatagaaagcaaaaagaactgcagttatctggtcaagtatctgatctctgaaagagaagaaatttccanccngtatagtcaatattatttcaaaaatttggngaatggccattgaa

SEQ ID NO: 1279 - DNA, 764 bp, Homo sapiens
  misc_feature (315)..(315): "n" may be a, t, c, g, other or unknown
  misc_feature (694)..(694): "n" may be a, t, c, g, other or unknown
  misc_feature (723)..(723): "n" may be a, t, c, g, other or unknown
  misc_feature (756)..(756): "n" may be a, t, c, g, other or unknown
cccagctactcaggaggctgaggtgggagaatcatctgagcccaagggggttggggctgcagtgagccgtgatcagaccactgaactccagcctggacaacagagtgagaccctatctcaaaattaagaaaaaacaacacaaatttactttcttagagctctggaggttagaagtctgaagtgggtttcattgggacaaaatgaaggtgtcatcagggcccctctctctccagaggctctaggagagaacccacttcctcgccttttccaacttctaggagccacctgccttccttggttcctggccccttcctncaccttcaaagccagcagggtggcactttcaaatctctctctgaccctggcctcatcacatctcctctctgactctcatcttcctctctctttcctttataaggacccttcagattacactgggcccacccaagtaatccaggataatctctccttctcaaaatctgtaatttagtctcacctgcaaagtccatttttgctatgtaaggtagcatgttcacagattccagggattaggatgcggacatctttagggggccattatctgtctactatatgccttttctcttggtccccttttggttctggtaataatctttgacctataagacaagaataatgagttcacacctaacaatccatggtgagtctttctggngggctctgcttatggacagagcaggcagntttctttttggctggcactgggcatgggactgntcttttga

SEQ ID NO: 1280 - DNA, 758 bp, Homo sapiens
  misc_feature (720)..(720): "n" may be a, t, c, g, other or unknown
  misc_feature (740)..(740): "n" may be a, t, c, g, other or unknown
  misc_feature (755)..(755): "n" may be a, t, c, g, other or unknown
attatcaaggactagcataactgtgattatgtaaaaaaaaaacaaaacaaaacaaaaaaactattatttagtctggtagggaaatacttctatgagtatgttacaattggaagttgtatttgtgcctattttatctagttttagttaattccattgcttcggaagataagtggacgtcatagatccatcgcaagttctcgttttttggattttaaaattttgaccattaagttttctacgatagataaacatgttgtggacatttaaaaccgtaatttaaaactatgagcgaaaaatcttttcaagatggatacattttaattcattcaagtagcatctgattagccaagtcggggaaagattgcagtccgcaaagctggcttgtgataaggttgaggttacattttaagggtttgggtaggtgtgtttcttacagtgcttttatatgttaaggtatcttaagcagacacatggtttaaaagttcagtatttttagtactttttcattggcagaatttggacaagctaccagaattgctaactcctaaaggataaaagtaataataatagtgtgtcccaggcactgcttatttttacatggctcttttatgtctagcttttccaattcaacgttgagtcatgtttgctgaaaatatttttgggtattggttgtcagaaataagctggtagagatgaaacccaatgtgtaaaaagccctgngatgtggagatgagcattgncccaatttggaccgnacc

SEQ ID NO: 1281 - DNA, 705 bp, Homo sapiens
  misc_feature (637)..(637): "n" may be a, t, c, g, other or unknown
  misc_feature (659)..(659): "n" may be a, t, c, g, other or unknown
  misc_feature (690)..(690): "n" may be a, t, c, g, other or unknown
aagttatgctctgtacttactcaaaaaacgtacaatctaattggcaataaacaaaggaatgaccatgtggacctccctaagttagtgagccctggtttgcaaataagtgttgcttacatcctaacacaggtttgcctccgccccacccacacttccttcaggtgccaagtcctgcagcttggcagccccagaggcctgctggccccagcttttcacctccatggcctccttacacaggtgaccgcactggactggccggccatgggggacacacttttgttcttccatcagttggggttgattaattgaaagacaatgacttctcgactgtgcttgtttatcttcttaagtcctcttccccgccggctcccgtccccctgctttctaacctcaggaaacattttcatgatcaattcattctcttgtatcctactttggtaacatgactttttttttttctaccgcttttcagctgagttgtggagtaggcagaactttattatctgacctgggaagctaaccactatgtgatactgttttctgaggaaaatatgttagattccacatggtaacttgacaaacaaacttgaaacatggctgtttgaaagctgagatggtttgtgagaaacattgtgangcaatgtggcgtgaataattgncagatacaccagtaagtacctttgagtttangggaagaagtgatta

SEQ ID NO: 1282 - DNA, 639 bp, Homo sapiens
  misc_feature (553)..(553): "n" may be a, t, c, g, other or unknown
  misc_feature (593)..(593): "n" may be a, t, c, g, other or unknown
  misc_feature (599)..(599): "n" may be a, t, c, g, other or unknown
agtagccgtggcagcagccgcggcggctccgcgagctcgccgggtgggctcagttcagcgcacgccggagccgagcgcagggggcggggaagggacctgctgcagctgcagccgcctgggcgctcctggagcgcgcggtgactcccccggtcggcccgctccatgcagctccgttgcggaagtgtagcggggggaggcggcggccaccgcggcactaagcacgagaggccggggctcggccccctgcagcactaggctctgggagccgcgcgcggcgcgtcccagtggcccgactcgccgtgcgcccggcgcccaccgcagcctgcatgccccgcgctgcgccttgcccggcccccgccgcctcctgctcgcaccgctgcagccgggcgccggagtaatatgctcactcgagtgaaatctgccgtggccaatttcatgggcggcatcatggctggcagctcaggctccgagcacggcggcggcagctgcggaggctcggacctgcccctgcgtttcccctacgggcggccagagttcctggggcttgtctcangacgaggtggagtgcaacgccgaccacatcgccgcccatnctcatnctcaaggagactcggcggcttgcctgggccacttggctac

SEQ ID NO: 1283 - DNA, 790 bp, Homo sapiens
  misc_feature (576)..(576): "n" may be a, t, c, g, other or unknown
  misc_feature (621)..(621): "n" may be a, t, c, g, other or unknown
  misc_feature (687)..(687): "n" may be a, t, c, g, other or unknown
  misc_feature (778)..(778): "n" may be a, t, c, g, other or unknown
  misc_feature (785)..(785): "n" may be a, t, c, g, other or unknown
  misc_feature (789)..(789): "n" may be a, t, c, g, other or unknown
tttgaatacttggatgctaggggatatagaggcactgagagataggtgtcctccaaggatctattctggatctttctctcccttctttaacccttttctcttatctcccttttctttctcctgggtagttctgtagcttccactgtcacctccagtgtgttttcccagctcttaccttcatctggagaccagtcttgagttttcatcctttgggcagctatcttccaccagtatctacaattcagtctgcccaaagcacatcttcttcctatgctactctctttctgtgcttatgggaaaccaccattttctctctggcaacttagcagccaagagaaatggctgagtcttcaaggatgaatgtgacgtggtacccaaggtcatttgatgtttctacccttaacacctgtttgtcacccttcttgcacttgagcaaaactaaactgctggtccctgtacttcccatttttcccatttatttctttcccaatagttccaccaattagaaatgtcctaattcttcccactcccttattcgtcagatacatttttaagtttaggctcaaatgccacctncccagagtttcctctgatacctctttgcagctagaaatgatctgnctttctgggaactcccatagcttcatactcatatctatctatactgcttatggcacttctcactgnctactggaccttttaactctttatatatggctcctccgatgccaagtgtaaactccctgagaatagttaacgaatctttttaagttcccgnattaaanctgnc

SEQ ID NO: 1284 - DNA, 806 bp, Homo sapiens
  misc_feature (694)..(694): "n" may be a, t, c, g, other or unknown
  misc_feature (779)..(779): "n" may be a, t, c, g, other or unknown
  misc_feature (786)..(786): "n" may be a, t, c, g, other or unknown
  misc_feature (799)..(799): "n" may be a, t, c, g, other or unknown
atttagatatggaagctgaggggatgcacagaggcagccagaacctaggtcagggtctcgctcggtgctgaccgcccccggggtcgagtaggcgatgggggagcccggcttcttcgtcacaggagaccgcgccggtggccggagctggtgcctgcggcgggtggggatgagcgccgggtggctgctgctggaaggtgggtgcgaggtgactgtaggacgaggatttggtgtcacataccaactggtatcaaaaatctgccccctgatgatttctcgaaaccactgtgttttgaagcagaatcctgagggccaatggacaattatggacaacaagagtctaaatggtgtttggctgaacagagcgcgtctggaacctttaagggtctattccattcatcagggagactacatccaacttggagtgcctctggaaaataaggagaatgcggagtatgaatatgaagttactgaagaagactgggagacaatatatccttgtctttccccaaagaatgaccaaatgatagaaaaaaataaggaattgagaactaaaaggaaattcagtttggatgaattagcaggtcctggagctgaaggcccctcaaatttgaaatccaaaataaataaagtgtcttgtgaatctggtcagccagtgaaatcacaggggaaaggtgaagtggccagtacacccttntgacaatttggatcctaagttgactgcccttgagccaagtaagaccacaggggcttccatttacccctggctttccccaaagtcncagaggntcatcatgaagcnggaaaag

SEQ ID NO: 1285 - DNA, 883 bp, Homo sapiens
  misc_feature (716)..(716): "n" may be a, t, c, g, other or unknown
  misc_feature (757)..(757): "n" may be a, t, c, g, other or unknown
  misc_feature (840)..(840): "n" may be a, t, c, g, other or unknown
  misc_feature (876)..(876): "n" may be a, t, c, g, other or unknown
  misc_feature (878)..(878): "n" may be a, t, c, g, other or unknown
agtgaattaccacccagtgccactcgatttaggctagatatgctgaaaaacaaagcaaagagatctttaacagagtctttagaaagtattttgtcccggggtaataaagccagaggcctgcaggaacactccatcagtgtggatctggatagctccctgtctagtacattaagtaacaccagcaaagagccatctgtgtgtgaaaaggaggccttgcccatctctgagagctcctttaagctcctcggctcctcggaggacctgtccagtgactcggagagtcatctcccagaagagccagctccgctgtcgccccagcaggccttcaggaggcgagcaaacaccctgagtcacttccccatcgaatgccaggaacctccacaacctgcccgggggtccccgggggtttcgcaaaggaaacttatgaggtatcactcagtgagcacagagacgcctcatgaacgaaaggactttgaatccaaagcaaaccatcttggtgattctggtgggactcctgtgaagacccggaggcattcctggaggcagcagatattcctccgagtagccaccccgcagaaggcgtgcgattcttccagcagatatgaagattattcagagctgggagagcttccccacgatctcctttagaaccagtttgtgaagatgggccctttggccccccaccagaggaaaagaaaaggacatctcgtgagctncgaaagcttgtggcaaaaggctattcttcaacagatactgntgcttaaaatggagaaggaaaatcagaagcttccaagccttttgaaaatggattgcttgaacaagcgccttgaacttcgattntgaagaaattactcctggctttaaagaagtacttcngngtggg

SEQ ID NO: 1286 - DNA, 764 bp, Homo sapiens
  misc_feature (608)..(608): "n" may be a, t, c, g, other or unknown
  misc_feature (728)..(728): "n" may be a, t, c, g, other or unknown
  misc_feature (738)..(738): "n" may be a, t, c, g, other or unknown
  misc_feature (755)..(755): "n" may be a, t, c, g, other or unknown
aaaagatgtctataataaaatttatttataccagtggttctcaaaactgactgataatcagaaaaccctggggctctttcaaaaacaattaacaaaacaattctatttttagacccatgaatacatattttgggggaggaaggaggagggtatagatctgtattttgaaaagttccccaggtctccttgggaaattatatgaacaatcatgtttgggaacaaatgaatcatgttaccactgggaagaagtttgttatacatcctaaccaagaaacctaaatggttcttaagcatctgctagcagaaacagttataattatgaatacctaatgtctgttagattttgctgatccctcacctacctcaggaagaaacaaacccaaaaaagtaagatacggtcttttttatttgtgttaattaaaaaatgctactcctaaaaatatactaactttccacacttataaaggtgtttcttattttaaattcctcaatgagtgcggagaagacaacatagaagcttcttctctttctttctgtcttccttcaactctgtttctcttcttccttttatctttcctttcttttcttctttcctctgactggattgnttataacactttagaaaatttccctgactggaagagggccaatctgaatgagcttttgtctgtcttgggagtagaatgaaagcagattctgagcatggaccctgactttcagaaagactnccatctcctnctcagtgcctactcttncctcagtat

SEQ ID NO: 1287 - DNA, 763 bp, Homo sapiens
  misc_feature (752)..(753): "n" may be a, t, c, g, other or unknown
  misc_feature (761)..(761): "n" may be a, t, c, g, other or unknown
gagagggcccggactaggggcggcgggcaccgcaggagctccgcgcggctgcagcgcgggcgggagcggggacgcgatgtcgccgccgccgcctccttgcgggccggggctgcgcctccggggctgagccgccgccagagccgacagccgagcagccgctgggcgctcccgcggcgcaggaggatgggctgcggcgggagccgggcggatgccatcgagccccgctactacgagagctggacccgggagacagaatccacctggctcacctacaccgactcggacgcgccgcccagcgccgccgccccggacagcggccccgaagcgggcggcctgcactcgggcatgctggaagatggactgccctccaatggtgtgccccgatctacagccccaggtggaatacccaacccagagaagaagacgaactgtgagacccagtgcccaaatccccagagcctcagctcaggccctctgacccagaaacagaatggccttcagaccacagaggctaaaagagatgctaagagaatgcctgcaaaagaagtcaccattaatgtaacagatagcatccaacagatggacagaagtcgaagaatcacaaagaactgtgtcaactagcagagagtccaagcagaagggcagatggacttcttcagtgtccttcacggactggatcccatcaaagaaccttgaagaagtggcttgcccttgctggacctgaattctactgagtccctggcaagaaccgnnttactggnag

SEQ ID NO: 1288 - DNA, 733 bp, Homo sapiens
  misc_feature (700)..(700): "n" may be a, t, c, g, other or unknown
  misc_feature (706)..(706): "n" may be a, t, c, g, other or unknown
  misc_feature (732)..(732): "n" may be a, t, c, g, other or unknown
tgaaaaaaccaaagtgctttatttaatcacccggtctgcggattgtgttgaatcaaggtgtcagtgattctaggtggttctgtctccccctaaactgagacagagcagatacttcaggaaaacgtggaagttggtccgtacttctacaatcctactggcccagcctgacccccatgtgacagctttgagagttttcatgcagttggagacaaacacaggtcaatgacaacaactacagcatgtgatgtgtgctttatgatctaagcactttcagagcctttcaaaaactcagggtctgtgtgtctgggcactgtgaacttgaaagaaagccttcaccctgtccctgataaccttgtgttgtcctcagatgagcccatgtctaaagctcccatggccaaagacagttaccagcttctcacctagccggtcacctctgtctaacttggtatgatcactgacaactttggccaattaatgaagaggtggcctcaaattgttcaggaactcgaaaagcacatgtctgaaggggctaattgtagtgataggaaactataaaagtaaggatgttggattagaagttagctgatcatcaggagatcaagaccagcttggccaacatggtaaaactccatctctactaaacatacaaaaattagctgggtgtggtggtgtgcacctgtagtcccagctacttcaggangctgangcaggagaatggcttgaacctaaaang

SEQ ID NO: 1289 - DNA, 825 bp, Homo sapiens
  misc_feature (708)..(708): "n" may be a, t, c, g, other or unknown
  misc_feature (800)..(800): "n" may be a, t, c, g, other or unknown
  misc_feature (814)..(814): "n" may be a, t, c, g, other or unknown
  misc_feature (820)..(820): "n" may be a, t, c, g, other or unknown
tgggagaattaactccaaaactttgacctgaatcatgtggatttgtcccaagattatgctagatgcaccaagcatggcccaaattggttcttttttaaatcccatgggggaagtgcaggctccttcctgtggtgcctctttatagcctcaccaccatgctaacactgagcatggtgaggaggaggaagctttggctagctaaacatgtttaataaggccataaaaactgagaaagaaaaacattcaactttagctgaagctcctttgatacaaaagtttcattctgtcagaaataagccatagtacagactcagagatagaggcagtttctagagaactcggtcttatcgtgggttctggagcacacctctcagaccagtcaggaacactggggaggtgacagcaggtccccaggggcctgcagggaatctttcagctgcacggattgggatttccctccaaaccaaactgtcctttaaggggcagcctcctcttttactaactccaccctttctcatctctgggacccagcagggacctggagaggccaacagccactgctacctttgtagtcttcaaaatattgaactgcaggtcccaagatgcatttcaggatttaagacaggtgcactaatgataaccattccttcaccaagtagcaacattcttgccagagttcttgggaaacctggttttttctctactctncatctctgctgctctcatgctttaaattgataaaatatggctcaaaaaaagaaagccgccaaagactcttatccttattggggccccatcanttgggcaccccaanccttangtggg

SEQ ID NO: 1290 - DNA, 799 bp, Homo sapiens
  misc_feature (618)..(618): "n" may be a, t, c, g, other or unknown
  misc_feature (734)..(734): "n" may be a, t, c, g, other or unknown
  misc_feature (741)..(741): "n" may be a, t, c, g, other or unknown
  misc_feature (778)..(778): "n" may be a, t, c, g, other or unknown
gcggctgaagggccttttttttttttttttttggtagagagacacaagattattctaaaatgtatatggaaagcaattccaaaaaagaagagtagaggaattgccctccctgatgttgagaaccgtacagctacagcacagcgttatacggctcctggcagacaaccagtcctgctgcagcgaggtggggacaaggccgggagcagctcacttcccagtagaggccatccgatggcgccagggcacggggcagctgccgtcctcatggcccggggtaacgtgggcacagggtttcctcatcccactgtgctctgtgtctcccctgagcccggtgattttacgcacctgacttcgttagtcttctcggcaatgcccagcgtgcagaccaggctcgagaggtgtgtcggtgtgcccagggtcacgcagcttcctggtggccaagccgaggttagaagctagttctggtgggtgcgaaagcccccgatgtcggcagctctgccaccaggcccgcacaagcaggtggtgtaagaggggaggcgttggggccggcagtgctcaagtcaggattgagccgtctatctggaaggtctgttgagggtgtgtgctggtggccgggangtggtggcaaggctgactacctgccattttcctgcagtgcctaagcccaggaaagggagcagcccccggtcaggacccaactgaggacaccccatcctcatggaccttggttccgnttttcgncccccacaaatgggcttccaacataactttccccganggcttctttcttttccaaaca

SEQ ID NO: 1291 - DNA, 781 bp, Homo sapiens
  misc_feature (706)..(706): "n" may be a, t, c, g, other or unknown
  misc_feature (777)..(777): "n" may be a, t, c, g, other or unknown
  misc_feature (781)..(781): "n" may be a, t, c, g, other or unknown
aacaagccgttaagctattctagctccccagacttggggaatgtgtaccatacataaacaaaaattctctgtctaactctgttataattcatagcaatcttctttccagcatatcacttaaatgtagaagaggtactaatgtgtgtcatgaaaatctattctagattcgcagataactctagttcccccgtgccccctttatgatttaaaatcctaccttaatagaggatttttgtcctatgatcaaaatatatttcaaaaacaatgttcttctggcagataaccctacttaatctgaaagcatcagtgattttattatttctaataattaaataataagtaaaagtgactaccactcaatgtggaaaacttggaaaatacaaccacaatttggagaataaaatcaccaaaaagtctcacattcacaatatatcaactgttatttattttatgaatttgtgtatgtacccatatatatgtatgtttgctgtcatattatgtatttggcttgtaacctactttttatcatctgtaagtattctctaatattatttaaactcctttgaaaatatttttaagcctatataaaattgtcataagaatgtccatagccttttaaagatttccctgatgttggatgtttagattggttataatttatcagttataaaaggctataattatattattggtcacaaatttttgnctgcatttttgatgactatcttaagaatagattccagcagtagactattttttaaggatccttaaaaaggngtan

SEQ ID NO: 1292 - DNA, 846 bp, Homo sapiens
ttttcataaggacatcatatatgaattagaataggaatgtttactaactgccctaaaacataaagatggtgctcctgaacgctacaccagttgccccagggcactgtagtgaactcacagggaggcagccggacatttttaaatttcaagggaaacacagtgacatttgccagctaccatgcaaactgccgttattaaattgtttagacccattaggcacttgctttggcctaggtccagaacaattaggtacttcttttggcctagagtttccatgaaaaaaactactgaaacactaaagatgctgggaaccaagaaagtttaagaatctctgtaataagaataagaaatctatacgaggctgggcacggtggctcacggtggtaatcccagcactttgggaggccaacaagggtggatcactggaggtcaggagttcgagaccggcctggccagcatggcagaaccccatctctactaaaaatgcaagggttagccggatgtggtggcgggcgcctacagtcccagctccccaggaggctgaggcaggataatggcttgagcccgggaggtggaggttgcagtgagccaagattgtgccactgcactccaggctgggcaacaagagtgagactttatctcaacaaaaaaaaagaaaaaaactatcaaactgctgtctctgtcaggctccactactctggtgtgcaactgcaagaattacagacagagtgcctcagagaaactgactggccttgaaaacctaaactattcattgataaaaaccgtgagtgatgatatggacacctggaaggaacagtttggggtacagttttaaaatttccagca

SEQ ID NO: 1293 - DNA, 851 bp, Homo sapiens
  misc_feature (720)..(720): "n" may be a, t, c, g, other or unknown
  misc_feature (781)..(781): "n" may be a, t, c, g, other or unknown
  misc_feature (818)..(818): "n" may be a, t, c, g, other or unknown
ctctttccgggacaacatggcgccgtccacgccgctcttgacagtccgaggatcagaaggactgtacatggtgaatggaccaccacattttacagaaagcacagtgtttccaagggaatctgggaagaattgcaaagtctgtatctttagtaaggatgggaccttgtttgcctggggcaatggagaaaaagtaaatattatcagtgtcactaacaagggactactgcactccttcgacctcctgaaggcagtttgccttgaattcccacccaaaaatactgtcctggcaacgtggcagccttacagtacttctaaagatggcacagctgggatacccaacctacaactttatgatgtgaaaactgggacatgtttgaaatctttcatccagaaaaaaatgcaaaattggtgtccatcctggtcagaagatgaaactctttgtgcccgcaatgttaacaatgaagttcacttctttgaaaacaacaattttaacacaattgcaaataaattgcatttgcaaaaaattaatgattttgtattatcacctggaccccaaccatacaaggtggctgtctatgttccaggaagtaaaggtgcaccttcatttgttagattatatcagtaccccaactttgctggacctcatgcagctttagctaataaaagtttctttaaggcagataaagttacaatgctgtggaataaaaaagctactgctgngttggtaatagctagcacagatgttgacaagacaggactttctactatggagaacaaactntacactacattgcaacaaatgggagaaagtgctgtantgcaattaccaaaaaatggcccatttatgatgt

SEQ ID NO: 1294 - DNA, 850 bp, Homo sapiens
  misc_feature (704)..(704): "n" may be a, t, c, g, other or unknown
  misc_feature (810)..(810): "n" may be a, t, c, g, other or unknown
  misc_feature (850)..(850): "n" may be a, t, c, g, other or unknown
ccatgagactcttatctttgaatgtttttccgttgcttccgcctctgtgaacaacagaagtgagaagggggtctgttttgtgcacttatggggtatacttttatttgtgaagggctttgcagccagctttatacatggataatcttataacttgatagataaagatgaaggcccagtgtatcataggtgagaaacttcaatggtacatatggtgcctcataatcattcagaagcagaacattggttcactcctcttaacccacagcatgggttaaagagaccattgccaagaggccttccctcttctagaagggcatcatttgttaggtcctttttccatggtttggaattaaaaaggcaatgactagaaacatatccctcatggtagactctgtagcagattctactgtaaaggctacacaacagatgttaaattctcttgtgaagttatgctaaaaaatagaattggctaaacaggaaagtacctgtgcagatgctggcacttaaggcctatggagaaaacatcaggtgttatagagagtctgttgtagggaattaacgaaaagaccactgagttaagtcaaagaatggtctatttgagtttaggtggtctggtttatggggaccctggctaaggagcatactccaaattcttggtgttaaccctctcagtagtcataagaatagtctccctggtgcactgnattctctcaaaggttttaaatgtttgcatgaagccatctttagaacgtcagatggtctctcttcaactggaatgacaagagctgaaagaaatgtgtgacccacgangacaccgaaaccgatgaatgacatgctgagactggaaatn

SEQ ID NO: 1295 - DNA, 800 bp, Homo sapiens
  misc_feature (681)..(681): "n" may be a, t, c, g, other or unknown
  misc_feature (732)..(732): "n" may be a, t, c, g, other or unknown
  misc_feature (757)..(757): "n" may be a, t, c, g, other or unknown
  misc_feature (797)..(797): "n" may be a, t, c, g, other or unknown
ttatagttattcttttccttatgaaaaacaaaaaggggactgggcgtggtggctaacacctgtaatcccagcacttggggaggctgaggcgggcagatcacaaggtcaggagttcgagaccagactggccaaaaggatgaaaccccatcactctactaaaaatacaaaaaattagccaggtgcggtggggcgcaccagtaatcccaactactagggaggctgaggtaggagaatagcttgaacccgggaggcggaggttgcagtgagccaagatcgagccacggcactctagcccaggtgacagtgtgagactctgtctcagaaaaaaaaaagaaaaacgggatcgagatggtttgcaggattagcaagtgatagagatatattgaagacatagaaagccagtgtggttgctcacacctataatcccagcactgtgggaggccaaggcaggaggatcacttgagtcaatgagttagagaccaacctgggcagcaaagtgagaccccatctctacaaaaaaattttttaaaaatcagccaggtacggtggtgcacacctgtaatcccagctactaaggaggctgaggtaggagaatctcttgaacccgggaggcagaggttgcagtgagccaagatcgagccacggcactctagcccaggtgacagtgtgagactccatctnagaacaaaaagaatacaggatagggatggtttgcaggattatcaagtgatncagatgtactgaagacacagaaagncagtgtggttgctcacatctataatcccacactttgggangcc

SEQ ID NO: 1296 - DNA, 634 bp, Homo sapiens
  misc_feature (620)..(620): "n" may be a, t, c, g, other or unknown
  misc_feature (629)..(629): "n" may be a, t, c, g, other or unknown
  misc_feature (632)..(632): "n" may be a, t, c, g, other or unknown
aacgcgctccttgtcattgtcacactgtggtggcctgggtttgtcctccttgcatgtgccagcagtgattgatgactcacaggggcaattccattgtcccagagcctggagctcctgttgctccggggtcctctttggtgttgaagagaagcactcatcccttcgtcagaagacacacacacacacacacacacacacacacacacacacatacgcacactccatgtaggcttagtaagcccagccagtcagtgcccagtcagccgtcccccttccttgtggctgaaccgcaggaggtgggggtgcatctgctctgcaccactcagccagagatgcaggagcctctgcccagctcagaatagatgatgttttcttattagtggctttatttaaaagccatcccagtcatttcacattttttttttaaagttttgattgacatctatttggtcaacctgtgctccctatggactaaaatagctgactggggcattgtctgggcttattaaacctgcatgttgtgtgtgtgtgtgtgtgtgtgtgtgtgtctgtgtacacgcacgtgtgcacacgcaggacaagcatagcatggaatttgatggagtggatgtggagggaantgaagtggnctncg

SEQ ID NO: 1297 - DNA, 781 bp, Homo sapiens
  misc_feature (716)..(716): "n" may be a, t, c, g, other or unknown
  misc_feature (747)..(747): "n" may be a, t, c, g, other or unknown
  misc_feature (759)..(759): "n" may be a, t, c, g, other or unknown
gagaaacaagttggatgacctaacatcctgttagagactggctggaagaggaacccagaagtagactgcactgtttgaccctcaccggtcggtcgtatgcagagtggttgtgttcttgagctgaggaatgccggccttgttgcctgtttggctttgattacagtatttgtagcagaatgttgctatggagattcatgccaggtacgcagtgggaggtgatctagaagaccgtgtgccagccactcgtaggtaatcactggcgctcagaacatgctgagacaagagttctcgttggtttatttccttccccagctgtgtgagttttcagatttcatcattggaaatgatgtcttacccaatgatacaaaagcagaggaaatgcctttgtagaatttcttccaagggaagaatgaaagtagagaggtgacttagcttagctttgttgtctctagaatacgttacagtgtgtcaagggaaggcttttcaaagtatttgtcaagggattgtgaggaacgtagtccattactttgtcaaagagtttatgtgaaaagtagatatttgaataatttcttatatttcaagcagcgttacagctaatgtttcttttaaatcaaaccttttatctccaaggttaactaatggcacctcgaggttacatctgcagcccagtgtctaggatagtagaggaacatagtgcaaattcatgtttgcatcanaactgggtgtggtggctgacacctgtaaatncagctacttccnaaggctgaagtgggaaggatct

SEQ ID NO: 1298 - DNA, 786 bp, Homo sapiens
  misc_feature (690)..(690): "n" may be a, t, c, g, other or unknown
  misc_feature (699)..(699): "n" may be a, t, c, g, other or unknown
  misc_feature (748)..(748): "n" may be a, t, c, g, other or unknown
aacagaaatgctgttcagtgaataccaatgcactgaatatacaaaaaagcttagttacaaagtaatccttaatggaaatctatattgaaaaatgttgagtataaaagtcaaatatttgtaacatatatccaaggagtattccagagagcagacctatttatgaataattttaaaagtaagcagagaaagtactctgttttaaacactgtatacagtgtttgaatttgaatcattttccacttttatgttctttataatgtttagaaataaaacataggttcttattttacacttgcatccatggagcacaaatcctaccaacacaatcaggcaatgtaagttttccaattagaacaactcaactgctggaattgttaagtaattgaatgatgagtattttgtaagagttcagtaaatacttgaatgagtaattggatattggaaaaggcattaccaggtagttcaaccataactctcatagtattttctaaatctgcaaatatacatgattttcccccaaaatattatacattaagttatttcagaaaatggactagatgcctctccttaaaggtaaggtcataagcacctcttgaagttgagaataatttaaaatcattctgttaaaaatcacagtagtttttattaaaattactatttagtgtttttcgagtgaaaggcattgtgcantgactttgnctaccttatcttatatagtcttaccatagtcctacttggataattttgnaaaatatcgattttatcagtggagaaaactgtgagtta

SEQ ID NO: 1299 - DNA, 836 bp, Homo sapiens
  misc_feature (732)..(732): "n" may be a, t, c, g, other or unknown
  misc_feature (778)..(778): "n" may be a, t, c, g, other or unknown
  misc_feature (832)..(832): "n" may be a, t, c, g, other or unknown
cagcatgttatcctcatttgacatgaaaaaatgtttgatagacctatggggattaagataaattaaaaatgtgtggggtttgatgaaagaaaatctagagtcctagattttaaaaagcagggatactctgtcctttgctataggtataagaatatatattcttataagaataccatcatgaaatgtgtgtcttcattcttacaaaggaagaagtattacagtatcctagcactaatctctctcagcaagtttttattttgttcttttaaaacagatatggcaacttaaaattcatctaagctttaacaagggtctaaatacacccctgccaagtgattgtctgccctacattcatcccatatgcctatttaagtttacatttaaattaattagatgtaaataaaagtaaaaatttagttcctcagtctcaccaactacatttcaaatgctcagtaaccacatgtggccaatggctaccttttaggcagtgcagttttagcacattttcactgcctcagaaagctctcttagatgtgtagtactgactcgtgtctgacttaaataactcaataatccctgtggctttcgatatcctcatcactgagctgcagtctgtcaggaatattttacccactggttctcattctaaccgatggaattatacagaataaatctaattgttcctttccataccagcacttggtaagttattatgtgcccatgagtccttgnctttacagctaagtttctacatttcttcctttattactcacgtgangtgggatggtgggaaccctcaccatttaactatcgggccaaaggtgatatgaanaaat

SEQ ID NO: 1300 - DNA, 782 bp, Homo sapiens
  misc_feature (713)..(713): "n" may be a, t, c, g, other or unknown
  misc_feature (757)..(757): "n" may be a, t, c, g, other or unknown
  misc_feature (771)..(771): "n" may be a, t, c, g, other or unknown
agaaaagatgtgttcatctaattcactattctccaaatacagaatagtttctctatgataaagcactggcatcttatcatgacggagagggtagtagccttgaatgatgttttaactggtaattgcttttatatcaaacacttttcagctgattatgaacaagattcagcctaattttaaagctaaaattaaaaatacgtggggcctcagttttacctataaacatgtaatgaaaaggtgtttttatttttttcctgtggcctctcaaggaagaaatgattctatctttaacacgtttttatttattttatgaatgggcaaatatcctaacaaaaagaaacacacgtcttaccattcatcttgggagagaaggctattgcttgataactaaggaatactatttttgaagcacctttacagtacttgacatgtcagttatgttttcaatgttcagccctatgtcagcctgcaggaatttctcatctgcccatgtctgtctattcatattggtaagtttcagcacagccctctttaaaacttcattgtgttactaatatttaatttttaagttttaaaatctagcacttctgtgctagatcctcgaatcaatttttacattcttttgaaatttatagtaatatttttgcctcatccctatactcaataattgcagtgagctatattatcacttaagtaactttattaccaattgngctatattctaccatcacaaagtattcttttaggcattcttcanatctgcattttcantggggcttcca

SEQ ID NO: 1301 - DNA, 823 bp, Homo sapiens
  misc_feature (752)..(752): "n" may be a, t, c, g, other or unknown
  misc_feature (800)..(800): "n" may be a, t, c, g, other or unknown
  misc_feature (821)..(821): "n" may be a, t, c, g, other or unknown
caaagtatacaaatgttggcagggagcattcattttacaggtaaacatactggcatagaaggattttaggcaacctcatcagggtcacatagctaataaatgtcagaatgggattgaacctgggactgttagattctacgcctcctcattcattcatttattctctcactcattcacatgctctgttatgctgtatggtgttgagtaccatatttcagatattggcacattcggcttgtataaggggagacgcttttttgcagttggacggccattgaagacaagttggtcaccccaagttttctttccagttcttctgaaaaactcactaaagaaaaagaaagcaagaaatacagaaaagtatagaaaaataatccttattcccaccacctagaattaagttgttaacaagatgaaaacttcatactgaaaaaccaccctttctagaggcgatttaccacttattccttgcctttcaaaatatttacttttcaaggtaatctctccttattaatttgaaaaaaaaaatgtttcttttaaatagagattgttaacttggggtctggctaggctgtgaatcctctgatattaaacaaaagattttgttgaaggtgcttataaggctttatttttcttcctttctgctctagccccatatgtgcaggattttcattagatcctcaaagagttctgtgacccccaccctctccttctaccttggtactttgaaacattctcactacagaatttantgggggaatttgggcatttatttggattattaagagttgggaaactgnttctaactaagcagatgatgngg

SEQ ID NO: 1302 - DNA, 794 bp, Homo sapiens
  misc_feature (634)..(634): "n" may be a, t, c, g, other or unknown
  misc_feature (749)..(749): "n" may be a, t, c, g, other or unknown
  misc_feature (760)..(760): "n" may be a, t, c, g, other or unknown
  misc_feature (777)..(777): "n" may be a, t, c, g, other or unknown
gtgtctttactcatttcaaaggcacttcggaaagcaaaagatctttatgattcagtctgctcttttgaacaagtgcccttttgcttgtttttttgttttttttttaaattaatgtattaatgtatattattgactcagccaatgtctaattacccttaaatttttttctgggggagaaaacccatccttcttcttttttttttgaggctttgaattttctatttgtgaatctgtccttttatttgaatataattttttaaattgcatttattttgttttatgatcaagtgaaatttatggaaaaatatactaattaaatcatcctttgttagctttaaatcaaatagattattgtacataataaagtttatagtttatgataaatgtattcttttaaaactatgggatgatccagttcttctctagttgtctggaggacttttgtgtttcaggctattgagtgaatgaattagctaatgaatactttggtttaacttagcaaaggagacacaaaataatctaacatggcactatagcatttattgctaattttagaaggaaaatgattttgatttctgtcatttatatatacaatattttatgaatgggatagtacaaaataatcatttgtaangtccaggatgtgtttctggtttcagaaaaaaaggccatttactccatctatttgatggtatacttggtccttacaggaatctcattttttggatctaaacattttctttgcctancacagtgttgncagaaaagggtctgcantggcttatacctgtaag

SEQ ID NO: 1303 - DNA, 769 bp, Homo sapiens
  misc_feature (715)..(715): "n" may be a, t, c, g, other or unknown
  misc_feature (740)..(740): "n" may be a, t, c, g, other or unknown
  misc_feature (757)..(757): "n" may be a, t, c, g, other or unknown
ggcctttttttttttttttttggatagagtttcactcttcttgcccaggctggagtgcaatggtgcaatcttggctcaccacaaccttcccctactgggttcaagcgattctcctgtttcagcctccccagtagctgggattaaaggcatgtgccaccacgcccggctaattttgtatttttagtagagatgaagtttctccatgttggtcaggctggtcttgaactcctgacttcaggtgatctgcccgcctcagcctcccaaagtgctgggattacaggcgtgagccaccgcgcccggccaagatcctgtatcaaaaagaaaaaaagaagtagcagacacagtgtagtccccgtggaccctgcactggcctcccttggtgtggtcactgttcttcactgtggtgttatgtgtcacagtcacagagccacattgggacactctgcagaccacactaactgaagactgtggctttcccatgcgtgccctttctgttctgggaccccatccagcaaccacactgcatttgtttggttttttgagagagggtctcgctctgttacccagagtgcactggtggaatctcagcttttaatatactttgggttttggaataattttaggtttacagaaaagttgaaggcgaagtacagtgggcttacgctgtaatcccaacactttgggaggccaatgcgggaggattgcttgggcccangaatttgagaccagcctgggcaatntagtgagaccccatctntttaaaaaatcc

SEQ ID NO: 1304 - DNA, 770 bp, Homo sapiens
  misc_feature (714)..(714): "n" may be a, t, c, g, other or unknown
  misc_feature (725)..(725): "n" may be a, t, c, g, other or unknown
  misc_feature (770)..(770): "n" may be a, t, c, g, other or unknown
agcatatgcccagtctttgtgttatgtttctcatggatgaaaagacagtataggccaggtgtggtggcttatgcctgtaatcccagcactttgggaggctgaggtgggcagatcacctgaggtcaggagttcgaggccagcctggcgaaaccgtgtctttactaaagtaatcccaactacttgggaggctaaggcatgagaaacacttgaaactgggaggtggaggttgcagtgagccgagatcacaccactgcactccagccaggggatagagcgagactctgtctcaaaaaaaaaaaaaaaaaaagggaaggattgattgatttactgagagaagtataaggaaacaaaatgccccaagacccttgtccggaaggaagggagggagggaaaggaaaggaaaggaaggaaaggagggagggagcgaaaagacagtaaagacagtatgaacatttactgagagaagtataattatcaggggaacccgcccccaatatttcaacggaggttctattttccataagtgttggccggctgagaaataaagagtacaaagagagaaattttacagcttggccaccaggggtgacatcacgtatcggtaggaccatgatgcccacccgaacctcaaaaccagcaagtttttattaaggatttcaaaaggggaaggcctgtatgaacagggagtaggtacaaagatcacatgcttcaaanggcaaaaagcngaacaaagatcacatgcttctgaggaaacaggcaagggccaagcn

SEQ ID NO: 1305 - DNA, 825 bp, Homo sapiens
  misc_feature (759)..(759): "n" may be a, t, c, g, other or unknown
agcagttgcacaacttccagcaactttctcagccggctactaatgagctgaaagccaggaacatccgaggagaagagaaagcttccagccctcctcccttcaccctggaaatccagacacccccacccccaccctcagatcactttaagataatttctttattcgtttgcccgacagaccatggctccctttggaagaaacttgctaaagactcggcataaaaacagatctccaactaaagacatggattcagaagagaaggaaattgtggtttgggtttgccaagaagagaagcttgtctgtgggctgactaaacgcaccacctctgctgatgtcatccaggctttgcttgaggaacatgaggctacgtttggagagaaacgatttcttctggggaagcccagtgattactgcatcatagagaagtggagaggctccgaaagggttcttcctccactaactagaatcctgaagctttggaaagcgtggggagatgagcagcccaatatgcaatttgttttggttaaagcagatgcttttcttccagttcctttgtggcggacagctgaagccaaattagtgcaaaacacagaaaaattgtgggagctcagcccagcaaactacatgaagactttaccaccagataaacaaaaaagaatagtcaggaaaactttccggaaactggctaaaattaagcaggacacagtttctcatgatcgagataatatggagacattagttcatctgatcatttcccangaccatactattcatcagcaagtcaagagaatgaaagagctggatctggaaattggaaagtgtgaa

SEQ ID NO: 1306 - DNA, 786 bp, Homo sapiens
  misc_feature (726)..(726): "n" may be a, t, c, g, other or unknown
  misc_feature (776)..(776): "n" may be a, t, c, g, other or unknown
  misc_feature (778)..(778): "n" may be a, t, c, g, other or unknown
gatcgggtaggcggctctttgtcgaagctagaggaccggcaggcggcagcagcaactacggcggcggcggcagaacccagcagcgatgtggaggtggagacccacaggagccccggacttcacctgagctacctcagtggtcaccaagagtggcaagataaagaaaaccctgagttgggcgggaccaggatgcctgaccgggacagctatgccaacggtaccgggagcagcggtggaggccctggaggtggtggcagcgaggaggccagtggggcaggggtaggcagtggcggggccagctcagatgccatctgtagagacttcttgaggaatgtgtgcaagcgaggcaagcgttgccgatatcgccacccagacatgagcgaggtgtccaacttgggggtgagcaaaaacgagttcatcttctgccatgacttccagaacaaggagtgtagccgcccaaattgccgtttcatccatggctccaaggaggatgaggatggctataagaagacaggagagcttcccccacggctgaggcagaaagtagcagctggccttggcctttcaccggctgacctaccaaatggcaaggaggaggtccctatctgccgtgactttctcaagggtgactgtcagagaggagccaagtgcaagttccgtcacctgcaacgggattttgagtttgatgctcggggtggaggaagcactggtggggggcttcaacangcttcagtccttcccaggacgacgtcattgatctctatgatatctatgancnttctgaca

SEQ ID NO: 1307 - DNA, 685 bp, Homo sapiens
  misc_feature (597)..(597): "n" may be a, t, c, g, other or unknown
  misc_feature (627)..(627): "n" may be a, t, c, g, other or unknown
  misc_feature (645)..(645): "n" may be a, t, c, g, other or unknown
tactttctgagatgaactgcatttgttcagataggattaatagccaccacacccagtagttttttttttattttttagggatatttgcctccccggaacgctgtgtcactttgtgctgctcctactaacaaagtatgaaaggactgtcctttctgcacatctcagccaactggtgatctaagctcattaaaaaaatattgagtcactatgtcagggcaactttgaatagttggtcttctgtactagtgaagagggcatgatgttttagagtcatgatggaagcagtgacctgcctccaggagtgtctcaggagcatgaggacactgggcacctttctcacagcccaactgggggatcattagctcaccaaaacttcttatatcttccctaatgaactgggctctctgcaaatctttttttttttttttttttttttttgagacagagtctcgctctcttgctctgtcaccctgactggagtgcagtggcgcaatctgggcaagctgtgccccctgggttcatgccattcttctgcctcagcctcctgagtagctgggactacaggcgcctgccaccacgcccagctaatttttttgnaattttttagtacagatggggtttcactgngttagccaggatggctcnactcctgacctcatgatccgcccgcttggccttccaagta

SEQ ID NO: 1308 - DNA, 733 bp, Homo sapiens
  misc_feature (638)..(638): "n" may be a, t, c, g, other or unknown
  misc_feature (674)..(674): "n" may be a, t, c, g, other or unknown
  misc_feature (683)..(683): "n" may be a, t, c, g, other or unknown
tttagattgtccaaatggtttgcaagcatggaagtcacatctccctccttccctcccatcagccctccagctgcctgacctccctggggaatgccagtgttaaagcactcctattgcttcccgagccttagattgttctgtgaagtcaccaaagccgccattctggcctcccttggataaatggggcaaatgagactccgggagaggaatggctttgtctgtaggtgcacagcatgtcagtgacagagccgtgcctggaacccaggtctcctgactgggaggtcccagctctcgccgttgctctaatccaggccaggtcctactgtgctgacagaatgtcggctgttgggcggtagtacccatgctgccctctaaccacaggctgtctgtgtcatgtgactcaatgcacccatcagtggtctgtgatgagtgggtgggaggatattttggctggcctctggcccacttgtccacgtctgtcctggtgtgtcagtggctggcttgtgacctggcatgtccgtggcaggtgtggaaggagagcctctagtgagttcccagagtggacagagcccttcagagccacaggatcccgaggcttccagcttctcagcccaggacacctggtggccatgggcaangtgagcaggacccctgtggaagctggtgtgagccantcagatcanagaacgcagcccccttcccgcccggatgaacatgacacttttgcccccgg

SEQ ID NO: 1309 - DNA, 824 bp, Homo sapiens
  misc_feature (666)..(666): "n" may be a, t, c, g, other or unknown
  misc_feature (783)..(783): "n" may be a, t, c, g, other or unknown
aacttccataaaatgaagcaaaatatgaaaacagctagttgatttatcaataatgtgaaaccctccttctgaatttttttggtaaaaattaccacactgaaaccaaaacttaaccttggcttggactctcagataaattgcttttgtattctttgactacaaagtattctcaaaaagaagaaattatttctgatggtagatcaaactctagccaagaaggtctagataaactagaggactgtataattatctaaagtaattcagggggacttttagaaaaattctttaatttttgttcctgtgtaaaaattattattaatggatggcagcccaaattactattcttcttttaaaatttgtttcaagtgtgtcaccaggcactcataaaattcatttatttgttatataactcaatgacctgaaataataggtgctcattgctttttcatttgatccttaaaaacaattttattctgtctaaaaaaaattctcctgctaaaatccaaatgattacctggctataggaggagtcccattttatgaacatgtatgaaatatttagttggattcagatgaaatgcaacttagagaaaggaatggataccagtagagaagatggaaagagacacaaaaatcagactttgcttacatcaaaattaggtctgntgtctaatcctggtaacctagaggcaagctgaaaatagatggtaaggataaatagatttttaaacacagtatttatatttaacagaatgtcataaaaatgacagaatgccatgaaantcacatgtcaaaactttgattaaaccaaccaggaaatttaa

SEQ ID NO: 1310 - DNA, 746 bp, Homo sapiens
  misc_feature (312)..(312): "n" may be a, t, c, g, other or unknown
  misc_feature (548)..(548): "n" may be a, t, c, g, other or unknown
  misc_feature (685)..(685): "n" may be a, t, c, g, other or unknown
  misc_feature (711)..(711): "n" may be a, t, c, g, other or unknown
  misc_feature (744)..(744): "n" may be a, t, c, g, other or unknown
gaggccaataaacactagatgttttggtgttttattttttcttttctacagacctgttaggttggtgtttcagtccctgctcaccactcccaagctcaagcccagctgcatttcaaaaaactgtaactgctaaactttcgcagcatatataacaggctcagcaaatgtggtccttgggttcaaatttctgtacttcataactttttcttccagcccctagcccagttgttttatactgtgctcttagttgaggcttttttttttttttttttgagacagagttttgctcttgttaccaagctggagtacggnggcacaatctcggctcactgcagcctccacctcccaggttcaagcgattcttctgcctcagcctcccaagtagctgggattacaggcacatgccaccacgcccggctaattttttgtatttctagtagaaatgggggtttcaccatgttagccgggctggtcttgaactcctgaccttaggtgatccacccgccttggcctcccaaagcgctgggattacaggtgttagccaccgngcccagcctgcaagaactgtttatgtcttctgggcttctgttactgcttgaatcaaagcacttgtattggtgatcttttttcagtattgggttttgcttgagagtacattgcttcagagctctttacaaattactgntctaatccacatgactaggcaataangggctccacctttgaatccttaaacatcagtgngg

SEQ ID NO: 1311 - DNA, 756 bp, Homo sapiens
  misc_feature (708)..(708): "n" may be a, t, c, g, other or unknown
  misc_feature (735)..(735): "n" may be a, t, c, g, other or unknown
  misc_feature (751)..(751): "n" may be a, t, c, g, other or unknown
ttttttacatctttcaaatagagatcaatcataatattgttaaaaggctattggttagaagacagtcataatgtgatggactttgtgtgcacacaagtgaacttgatgtaaaaaacttccattttcacattctggtggtatctttaatatcatgacttggagagggacgttagtagatgagaaacataatctatcagaaactcttatagttctctcactacaaatatggcatcagcaaaactcctaattaccagagatgatgctagtgtagaaaaaatccatggacaaggtgagttgcacagtgatttagaagagttttatccaaatatgaggaattttagaaaaccttgattacctattttgctttcactttctgtctcatgtgatcataggagtgatatgacatcaatacacacatttatataagttcaaaagtgtaaaaagtaaaatagaggttcctcttcaaagactttcctcccaatctcattaggaataaatagtaacctctcttagaagcaaaattttttcaaagacctgtgttaacattcttaaatatctgctagccgtaataaagaaatgaatgtactttatgtccttagctcccacaatttaacctaaatatttgccctggcatgcttatactggtccaagcaagcattaggtcatagcctgtcctcttccttatttcaaggtgtttttacctttctncagattccaaaagttacttcctccttnctttggtctcctctgnctttg

SEQ ID NO: 1312 - DNA, 650 bp, Homo sapiens
  misc_feature (614)..(614): "n" may be a, t, c, g, other or unknown
  misc_feature (638)..(638): "n" may be a, t, c, g, other or unknown
  misc_feature (642)..(642): "n" may be a, t, c, g, other or unknown
tagcattcagtaaatttcacaacacctttctgcctccctcttccctctcccctctccccttctccccacctcaccccacctcaccccctccctcttccttcctcttttccttccctcctcctttctttttaccctctcctgcccctgacccggtacctataccacttggattatttacagcaaatcttacagatgtcagtattgtcttgttctgaagctaaaaaggacaatgagttcccgctgacctcggtacaatggatctcgctggagcacaatatgtattttatacaggcagtgaaaagcctacaagtaattgagagagagagaaatgtcactgtagcatttctgttgacactgcactctgcgtgtggagggaagcccggggcctggcggcagaggagcagccgcggccgcgctgtgcacccaggaacctgtccttcaggagggaggcggcggtagaaattaatctgctcagattttccaactaatgaagtattcccaggaccgaaggggccacacagagacgtctgcggcgctgcttcccattcgcgcagatgcacacggattccgggcccagcgctaactcggatgtgttttccagctccgtttattgncttccataatgcttagcgtactgnttgnatatgttg

SEQ ID NO: 1313 - DNA, 685 bp, Homo sapiens
  misc_feature (284)..(284): "n" may be a, t, c, g, other or unknown
  misc_feature (312)..(312): "n" may be a, t, c, g, other or unknown
  misc_feature (398)..(398): "n" may be a, t, c, g, other or unknown
  misc_feature (416)..(416): "n" may be a, t, c, g, other or unknown
  misc_feature (447)..(447): "n" may be a, t, c, g, other or unknown
  misc_feature (551)..(551): "n" may be a, t, c, g, other or unknown
  misc_feature (602)..(602): "n" may be a, t, c, g, other or unknown
  misc_feature (614)..(614): "n" may be a, t, c, g, other or unknown
  misc_feature (679)..(679): "n" may be a, t, c, g, other or unknown
ggcctttttttttttttttttctggccagtcacgtgaagcagtgggagtggaaaaggaacaaagaaatctgtaactggtggtgatcagttactgtaaacaccacttcacctagaccagcctgagtatttttctttcgggtttttttttttttttttttttgctagttgcaaaatgaacatatttattataaaaaagttgaaacatatttgttttttgaggcaggctctcgctctgtcacccaggctgaagtgcagcggcgtgatcatgctattgcagcctcatntcctgggctcaagcaatcctccaacctntcaacctcccaagtcgctgggacctgacctcaggtgcatgccaccatgcccagctaattctttttacttttagtagagacaacttntcaccatgttgcccctanactggtatgaactcctgggctcaagcagttntcccaccctggcctcccaaagtgttgggattacaggtgtgacccaccatgcctggctgaaacttatgttttcttttctcttctttttttttttttttttttganacggagtttcgccatgttggccaggctggtcttgaacccctggctttaggngatccgcccgtnttggcctcccacagtgctgggattacaggcgcaagccccacagccagccatggaaagcattctgntgcttg

SEQ ID NO: 1314 - DNA, 866 bp, Homo sapiens
  misc_feature (651)..(651): "n" may be a, t, c, g, other or unknown
  misc_feature (821)..(821): "n" may be a, t, c, g, other or unknown
  misc_feature (833)..(833): "n" may be a, t, c, g, other or unknown
  misc_feature (858)..(858): "n" may be a, t, c, g, other or unknown
acttttttcatgttctccttgagtgaaggatgaggaaattgaaagcagagtatgcaccttttattaggagattcaaactgcatcctactggattagcctcaaaagtcctaaaatacaaagacatccatctgacagatcactgaggggaggacttgtttttctgttttagaatagtttccgattaaactttttagctcaagaagaaaagaagctagttatttctcacccaggagtggatttgtggtttggcttcaccatggcttcctgccgtgcctggaaccttagggtgctggtggctgtcgtgtgtggactactgactggcatcattttgggactgggcatctggaggattgtgatcaggatccaaagaggaaaatctacttcctcatcaagcacccctacagagttctgcaggaatggtggaacctgggaaaatggcagatgtatttgtacagaagagtggaaaggactgagatgtacaattgctaatttttgtgaaaatagtacctatatgggttttacttttgccagaatcccagtgggcagatatggaccatccttgcaaacatgtggcaaggatactccaaatgcgggcaatccaatggcagtccggttgtgcagtctctctctatatggagagatagaattacnaaaagtgacaataggaaattgcaatgaaaatctggaaaccctggaaaagcaggtagaggatgtcacagcaccacttaataacatttcttctggaagtcccagatttttaccatctggatgcccataaaattaactgctgagaaccatcacttagtgcttcccccaatggnttggaccagatnttcaacactttccagaaatgctttnacctgggg

SEQ ID NO: 1315 - DNA, 830 bp, Homo sapiens
  misc_feature (771)..(771): "n" may be a, t, c, g, other or unknown
  misc_feature (808)..(808): "n" may be a, t, c, g, other or unknown
  misc_feature (827)..(827): "n" may be a, t, c, g, other or unknown
aattttatatgatggtactgtgatctggagagggaatattcatacactaactttctgctattactttaggaatatctctgaagtaaagaagtatggaataaagagataatattatgacttattattttccaagctggatagataagatgaaaagggaaacaaagaatactccaaatgcttctataatgcactttcaaaaatatacatctccagctaaaatttaatgtaaatgcttaatttgcttgattataggtattatgcagttatttacactatactgcgtaagctatagtgctctatagttttagctcatctataatgcattgataatgtaaatgtattcatacttttatcaccacaattatttgaaaaaatcttgcttttgtaaaatgaactgtttagatagaagtatccattacacttggcattgtaagaatgtattgactgcttagaaagggccaaaataaatatccctagatatgcataatttatatatgagattaagttatatgtattatgcgtctataaaacatgtatgtttttgctgtcgcagatttaatgtaagtatagattggtattggtctgtgcctacatgtatgtgctccatgagtacagaatcagggagttgtatataaaggcctcattgatgatagtgggaacaaagctgaaaagagagcaattgagagagaaagagggagaaggaaagagaatagtagtggattaagctagcattggtctatacagatccgctagctgcctgctattggtttncagcatttgaagatgaaacatattcattagctttcanaacgaatggctttaataanggc

SEQ ID NO: 1316 - DNA, 849 bp, Homo sapiens
  misc_feature (703)..(703): "n" may be a, t, c, g, other or unknown
  misc_feature (826)..(826): "n" may be a, t, c, g, other or unknown
  misc_feature (847)..(847): "n" may be a, t, c, g, other or unknown
gaatttacatttaaagattaagcagagtgagaaagagaaatctgccttttgttgtgtggggtgaggaggaggcatctacccctggccttgacgctatctcccatcacctctgctatccagacaggactcaccgaggtgagaataccggagggccttatctttaattgggtttagttttgccagtctgaataggtttaaagagactcgataaagggggaacaatagattatttattgactggacgctgaagcctttagatgaagaagggagagacaaagctgcttaacaacttgattagttcatttttattttaaggtgagactgtctctcttttggtggaaggaagggctagagaactttggtgcaatttgaatgacttaaaatgtcttatttcctctcccgacaaccccctacccttctcagcaccatgcacctccctgatttaacaggagtttcgtttaccccttgcatttaggattgatgaactgagaaaagagggtaaaggctttgggattgatcattaatgtttggttttgtgtgacttgttttaaatgcgtgataaattgatgctgacggtacttgaatgagtaagaaaagcaaatgaagcctacttttaatatggaattagttgactttatagtatggctcaactcagcctagaggagaaaaaaaaaatcactacaagtctgttaggtagatttgnattttggatttgaaccatgaaatcttttggttggactagtttaaaaaaaggagaaaacatgtcttattgactccaagtatttggaaacatggaatatcaactttagaaggtcttaaaatgaanaaaagtggaaaagatggttgntt

SEQ ID NO: 1317 - DNA, 854 bp, Homo sapiens
  misc_feature (799)..(799): "n" may be a, t, c, g, other or unknown
  misc_feature (846)..(846): "n" may be a, t, c, g, other or unknown
  misc_feature (854)..(854): "n" may be a, t, c, g, other or unknown
aatggctggatgcatgtcagtgcataggatttgagtcattagtgtgccacaaaacattttaccaagaaatggtgcgtcatcaaatagttgaattacaatggtagctgtaaacgggacccaatttacaaaagtaaatagtgtccccttttacaagaaagaaaattaaccatgctcattcagattctgaagtttaattagctttaacttgctaaaagaaagaaattgaacaagtaaatagcatgtacttcaccatatatagcaaatcctgaatcactgccattttttatataactgacccacatgggttctttgctttttcttttatctgtttacctcagattttttttttttaataaaggactataatttgattggcttgtaaattcttcccatttctaacatgctataagactttaagcctaatttcctttgagccttaatcctcttgctaattgatgtgactgagttgtctggaatcaacctccttggtgcaaatgactgagactgtgacgttctatggaagcagtttggtccgggaatgaatcctttcattcagcaaacaaatgccatgccagctgagtcctgaaagagcccatgggcacgtaaaggaatatagttgttttacaacatgtcccccaaaattatttgacactcttctcattagcaagtgggactctgccccttccacttggatctgagctctgtaactgcctgccaatagaatatggcagaaatgacgcattggatcaagtttctgggcccagaccttaagaacctagcagcgtccactttctggctncttggatgctcactctttggaacccaacttccatgcctgggatgaancctaaagn

SEQ ID NO: 1318 - DNA, 823 bp, Homo sapiens
  misc_feature (754)..(754): "n" may be a, t, c, g, other or unknown
  misc_feature (789)..(789): "n" may be a, t, c, g, other or unknown
  misc_feature (818)..(818): "n" may be a, t, c, g, other or unknown
taaaatctaggtgtgatgcagttcagaataaataaattcaaatgacataggttgccttgctttgttgtagttttcaaaaatggacacaacagagttcatatttgataatacaaatagcccttgtcggtggcatgatagctttatccatcatttatagtttatgacttgtggttattttaaaacattgaaagaattttgaaaaaagtcataaatgtctgtaacactagcacttttaaggcagataatagacatctaaaatcttcagggcatggctatggctttagaatcatctgaataagttgaaaatatttaagaaatataggtctgttcatccaaagaattaaataatttgcctttgtcacgatggaataaataaaatatcacaggttatttttgttgtggtagatgccttttaacaaaaggcaatccctggagactgttgtagaaaaggacaaagcaaaacgggtgttttggttttgctttattttgattgattgttgtttgttgtcattactttccttgtacaatcacttttccatggtcaccctcttttctgctttatactaattgccctgttgaggtgtttccatgtcaaatgcagctcttgccggaactgaaaatggcagtgccaagggagctgtgcaagtataatcaaagctggaagatttcctccatccacccgcgaccccaaggcttaagcattcccttaggaaccaaagctgactctttgggaaagttatcacagccttattangttacaacccttgaaggtggttttggtggtttganccttaaaaatttgcgaacctggtttgggnaactg

SEQ ID NO: 1319 - DNA, 819 bp, Homo sapiens
  misc_feature (702)..(702): "n" may be a, t, c, g, other or unknown
  misc_feature (759)..(759): "n" may be a, t, c, g, other or unknown
  misc_feature (798)..(798): "n" may be a, t, c, g, other or unknown
  misc_feature (815)..(815): "n" may be a, t, c, g, other or unknown
cggcgccagcggccgcacgccgcggagcaggggctcggaggtcccgggattacggtgctcgagcacgctggtgggaaaggacccgggacttgaacagtgttgtgcggcgccatgcaggtctccagcctcaatgaggtgaagatttacagcctcagctgcggcaagtcccttcctgagtggctttctgataggaagaagagagcgctacagaagaaagatgtagatgtccgtaggagaattgaacttattcaggactttgaaatgcctactgtgtgtaccactattaaggtgtcaaaagatggacagtacattttagcaactggaacatataaacctcgggttcgatgttatgacacctatcaattatccttgaagtttgaaaggtgtttagattcagaagttgtcacctttgaaattttgtctgatgactactcaaagattgtcttcttacataatgatagatacattgaatttcattcgcaatcaggtttttactacaaaaccagaataccaaagtttgggagagatttctcttaccactatccatcctgtgacttgtactttgttggtgcaagttctgaagtttataggttaaacttagaacaaggacgatacctgaatcctctacaaactgatgctgcggagaataatgtttgtgacataaattcagtgcatggcttgtttgccacaggaaccataganggtagagtggaatgctgggacccaagaactcaaaacagagttggcctgttagactgngccttaaacagtgtcacagcagattcagaggttaacagnttaccaacaatctctgntttg

SEQ ID NO: 1320 - DNA, 788 bp, Homo sapiens
  misc_feature (708)..(708): "n" may be a, t, c, g, other or unknown
  misc_feature (711)..(711): "n" may be a, t, c, g, other or unknown
  misc_feature (746)..(746): "n" may be a, t, c, g, other or unknown
cttataatgcatatgtatgtaaatattacaggatttaaggttgaattttttaaaaagaaagttatagtctgtaatttccatttgttataataatgacctttaatcttgtcatttggaaccataaagcatttttatcaggtacctctgttccaagggatttatgtcttagaccatagctgaattgaatgtttgcaaaacactgctataggataaggtggtctttagttttgaacgtgtgaaaggactgcacacttttcagccagggtttgagttactgcccagggtcatcgtttcaaagtaattcgaggagtgatttaacatcagcatttgaaatgtagtcttcatctcctgggatccataaaaaaatgtgaacagggaaatggtggctaagcagagcctgaaataataacttggcaaagaaatgagtttatcaggtcgagtcaaaacatggcatcccctgttacactcaagaaatgctttcttcatgtaaatgtttatacgggcatatataatcacaatgggaacagttaaaaccccctcccttcaaaaaaagaaaatctatatcagttgggtttggttttggttcttcattggctcaaggcagttaactgtctcagtatagcctttggggagatttaacctcattctagccatttttccatcctgaaggccaagaaggactattagaagggtttttgaggggtttcngangtgaaggcccaagacccccataatgacatcattangtattcttgaaaggggttaccagacccacaccgctcgaagtg

SEQ ID NO: 1321 - DNA, 844 bp, Homo sapiens
  misc_feature (414)..(414): "n" may be a, t, c, g, other or unknown
  misc_feature (835)..(835): "n" may be a, t, c, g, other or unknown
  misc_feature (841)..(841): "n" may be a, t, c, g, other or unknown
ttattaaacaatctcatttaacatttaaaagaacaatagtattcactttgcttattgagggtggtactgcagaaagattcagaacataggctctggagtcagactgccaggctttctatcccagcatcttctcttgctcttgcgtgacctggggcagattacttaaatttttttctaccccacatgcctcatttgtaaagtggagttgtagtggtaatacttcatatgattgttggggagattaaataaataatgcatatacagaatttaaagcagtgctgaaacaggaaatatccatgttaaataactgatcattttctttttaaagctcagtttccttttcttctctcaatacttaaaaggtcagaataggtaaatgtaagcaaacaagactgaaaaattaaccagcattgntttattttctaaaatcaggtgggaaagtctgtgtctcatgagaacaaagaacaagattcttattcagtagaaagtgaaaagaaaccagaagttatggctccagtcagttctacacgtttgagcaaacaagtccttcctcatgatagtcttcctgcaaatagccagccatctcggaggggccgctgggggaggaagaacagaaaaacccaggaacgttttggtgataaagattctaaactgctcttggaagagacgtcttcagctcctcaggaacaatatggagaatgtggggagaaatcagaagccacccaggaacaatcactgaaagtgaagaacagctggtggcttctgaggagcagcccagccaggacgggaacctgcctttccagagaagactcatgaggggttgaaccctggcgangacagntaa

SEQ ID NO: 1322 - DNA, 823 bp, Homo sapiens
ttctaatggtagattgaaagtccaaatgcactttttccaggtggcatctttggatcttctgtgtctcttcttttaagaacaatgcaaatgtacttattgattatcaaaaacgaggatttttttaagtattcataacacacatttaacaccttggtgtcctgggccccagagttcctttgaaggcccataccaatattttcaatgtaaaactcagtcttttcagaagaaaatacagtatatgaatgttttacgataacattaattacctgattttcaatacagttatgactgaggaatgatatttctaagggcacattttgaaaactccataaatcgtattgtattaacaccttaatagatacaatagtaaaacttaagaatttttctctgtcatgtgaccctctgttcctgcagttttggggttcattaaaagcacaaataaaacaatttaatctctttgaaataaagtaataaaagtaccttttagaagttttctttttcccttgtgtataaaacttctctatgtttctgtaatgaacacataaatttccatactttttcccttaactggttattttcttaaaagtcagaatttaatatggcgtatttcttttttgcccctcctgccccccccaccaactgatattatccattccataggccacagttatttctctaggcctgcatagcgacattttcatactactttaaaactaagtgggttgtgcacagtatcaaaaaccttctaggtaactctgagcgacttctaactcctccagttggaaccatctatggagaaaatttgtctaatagatgcaggtcc

SEQ ID NO: 1323 - DNA, 825 bp, Homo sapiens
  misc_feature (702)..(702): "n" may be a, t, c, g, other or unknown
  misc_feature (730)..(730): "n" may be a, t, c, g, other or unknown
  misc_feature (816)..(817): "n" may be a, t, c, g, other or unknown
taatatatgtaatatttcttagctaatagcagtgactacaacctgaagcaccctcctctgttcctttagtttatttcagtcatagttgtcttgcaagtcccagcacaaaatccctcttccagaaagcatttccattgatctctcttgtatttgcacttttattgaatctacttacaatcactacccacccaatttagcacttaattgagcttaaattttatcatgtggattaattctcttctcagtttgatttcaaacacattcatttttagtcacaaaatggtgtgagttatgagggatgaaggtaggcaagaatctgacttgaaggagccccacagtttacttggagagtgatcctaatattgaattttcaataagaatgtctatggggggtactatttatgaatgcttttatgtgcttgggcacttatattatctgacaccctagtaatcttgtggtgatcattgccactttaccaatgaggacagctgtaattaataatggttaaggaacttgagggtcacccagcttctcagtgtcagaatcagctacgtttaacgttgctttttttgtgatacaaagtggcaacttaaatgccaaaagcatgttaggtaagacagtcatgggaaatcattgatttttgcaggtcttgaagaattattctcattattttatcatggttaatgaaaaatgcatattgnaataatgcctctattgattaagtagatngaaactggatttgggtaatttaggcttgcatttccctaaggttggaaatggccttccttgacttaatcaggggttgggggataaannaaaaattg

SEQ ID NO: 1324 - DNA, 848 bp, Homo sapiens
  misc_feature (646)..(646): "n" may be a, t, c, g, other or unknown
  misc_feature (760)..(760): "n" may be a, t, c, g, other or unknown
  misc_feature (805)..(805): "n" may be a, t, c, g, other or unknown
  misc_feature (848)..(848): "n" may be a, t, c, g, other or unknown
gtcggtgtctgcgcgctggtgtctgaggcccaggctgaggcctccgctattgctggagcgcaggcggcggagaggatgactgccgctgccattctctcttgagctagcgagccgccgccaccctccaccctcccccggcagggcggagaggagcggccggagtcagcgatggtgcccggcgaggagaaccaactggtcccgaaagaggcaccactggatcataccagtgacaagtcacttctcgacgctaattttgagccaggaaagaagaactttctgcatttgacagataaagatggtgaacaacctcaaatactgctggaggattccagtgctggggaagacagtgttcatgacaggtttataggtccgcttccaagagaaggttctgtgggttctaccagtgattatgtcagccaaagctactcctactcatctattttgaataaatcagaaactggatatgtgggactagtaaaccaagcaatgacttgctatttgaatagccttttgcaaacactttttatgactcctgaatttaggaatgcattatataagtgggaatttgaagaatctgaagaagatccagtgacaagtattccataccaacttcaaaggctttttggtttgttacaaaccagcaaanagagagcaattgaaaccacagatgttcaaggagctttggatgggatagtagtgaagcttggcagcacatgatgtacaagaactatgcagaatcatgtttgatgctttggaacanaaatggaagcaaacagaacaaggctgatcttataaatgagctttntcaaggcaagctgaaggactactgagatgtttggaatggggtn

SEQ ID NO: 1325 - DNA, 853 bp, Homo sapiens
  misc_feature (803)..(803): "n" may be a, t, c, g, other or unknown
  misc_feature (811)..(811): "n" may be a, t, c, g, other or unknown
  misc_feature (813)..(813): "n" may be a, t, c, g, other or unknown
tttacttctcctgaaatgtgacagatattacattaatcagtagagaaagagtgaactcattaataaatgacactgggtcatacctggttaaatggaaaaaaattcattccataacacataattcacagaaagtactcaacagattaaaaatctaaaaatgaagagtagaacttcaaaagaaaatataggagaacatatttatgactttgacataggaaggtttgttaacacatagagtaaaccagaaaggaagagattaagttttaaaacttctgttcaagaaaagacaccatagttataagggaagcacaaatgaatgaagttggaaccatgtaccatatccgaaaattaactcaaaatggatcaaagacaatgtaagatctaaagctataaaactcttggaagaaaacaggtctgaatcttcaatttggcaaaggatgcttagataatgccaaaagcacaagctataaaagaaaaagtagataatttggacttcttcaaaattaaaaaccgtgtttcaaaggacaccatcaagaaagcaaaagacagcctacagaaagggaaaaaatatttgcaaatgatatttctgataagagtagtattcagtgtatataacaaaaagataacccaatttaaaaatgggcaaaggatttgaatagatatttctccaatgaagatatataaatggccaacatggtcattaaaaaatgctcaacatcattagaaattagagaaatgcaatcaaacctctatgaagcctgagccacatagtgagaccctgctttacaaaattagaaatttgnccaggatngngggtgcacctgggctagtactcggggctgagtggaggatg

SEQ ID NO: 1326 - DNA, 842 bp, Homo sapiens
  misc_feature (703)..(703): "n" may be a, t, c, g, other or unknown
  misc_feature (772)..(772): "n" may be a, t, c, g, other or unknown
  misc_feature (774)..(774): "n" may be a, t, c, g, other or unknown
  misc_feature (803)..(803): "n" may be a, t, c, g, other or unknown
ggcctttttttttttttttttttttttttttttgagattgaacatctaatctcatagttgccaagacagtctctggtgtaaaagaaaataccaagcaatagtccttaactttgaagctgtcatggttagcatatattagtatttctagactcagattttagtttaaatttatgtctgtgctatagttacaggatgatttagcaaaattgcccgcaattaggtcatgtgtaacctagtggttagggtgttacttatgatagtcgtgatagccattctaaccctgcttatactgtctgagtgattagcacttcattggtatagtttattttatggctgtataaaagtactttcagcctttttcaagttatgtcacacagaaaatttcgtttttctaggactgtaaatggatgaggcagctgttaactggctataggctctgtcattcctgagggctgagtcaatcaatatttccacccatctataaaccactgttgcacattagtgtgccagtgcacattctttgagaaattgtggatgtatggtatataaggccattcaactactcaaatattaaatgctcaagttaatattctgaggctcttaatcaagagtcttgagggttagacaaatagtagaaactaaggaatcattttcaattgaagttagcatgatattaaatatctttgcctatattggataatgngcaaactgattcatgaaactaaatttaataatactatttttctatttgaaaaaaatggccaagttttcngnatggaaaacttaatggatttcttggttanccaaataatctttgggaatttatgagtaaacccgcccac

SEQ ID NO: 1327 - DNA, 862 bp, Homo sapiens
  misc_feature (643)..(643): "n" may be a, t, c, g, other or unknown
  misc_feature (682)..(682): "n" may be a, t, c, g, other or unknown
  misc_feature (783)..(783): "n" may be a, t, c, g, other or unknown
  misc_feature (795)..(795): "n" may be a, t, c, g, other or unknown
  misc_feature (807)..(807): "n" may be a, t, c, g, other or unknown
tagataggggatagacaaatctcccatgcagaataattccaaacaatttatgtagatatcccactcttaaggaggtatagtataactctctagtccttatgtgtgggttttgtatagtgacatccttccaaagagtacagtatagaaagggggaaaaagaggaactttacagtggaaaaacttgacaaacactactttagctaggtcaaggttaatatcaacagtgataaatcatgttgatagtatgtacccttgatatgatgttatgagaatggtacctttacctttgtggtcttcctcccaacaactcataaaccccgtctaatcatgagaagttagacaaatcccagttgaggagcattccacaaaataccttaccaatattttcctcaaaaccatcaaggccataaataacaagtctgagaaacaataggaaagccagagaaactattacagccacaaggagcattaggagacatgactaaatgtattacggtgttctacagtatgtaaaaagtaaggaaatctgaataaaacaccaattttaattaatgtataatattaatgaaccaatattggtacacttttattaactaaaatccatatttattccgattagtttttacctaatgctgctcattgntttttaatccctattagatggggagcacccacagggcangggattgtgtggtgtttcatttacctaatgtgatgcccaacagtaacggggtactttgggaagtatttcttggagtgactactgggaaagaaagtccttanaagtttataggnctgacttaaacnttccccaattttaaggtggaagaaaaaattggcttaaggggaaggccatatgggg

SEQ ID NO: 1328 - DNA, 744 bp, Homo sapiens
  misc_feature (685)..(685): "n" may be a, t, c, g, other or unknown
  misc_feature (717)..(717): "n" may be a, t, c, g, other or unknown
  misc_feature (741)..(741): "n" may be a, t, c, g, other or unknown
atcgtattttaaacttgagttcagacttagaccttatgagttgaaggtgatttcctgccttactgagtctttctgttatcagacctataatttgtttacactatactcttctgatattattagtagtagccaagattttcttcactcttttcttggaaaattggatagaactgttaaggtacagccttctgggttcttactgtccttgaatcttttcatttcttccttcctccctttcctgttgcacactaatgaagatggacatgaaatggacgtgaaacattaggcaaggcaaggcctgacagatttggctggtaaacaactagtcaactttttgaatttagacagttattaattacttaggcagagaaaaaagtagtccaaggtgccatttctctgtgccccttgtctcacacttgaaaagagtgacaccgaaataaaaggggctagctaacgattgtcccttgaatggtgggacaccctgttgctgaggaatcattgttatactgcagctaagcctgtttagtctgcaaatgtaccctacaaggttgaggaagaaaggtctcatgtttcattagaacctgagaggagatgggaaactctcctgacagaagcatcctggggcaagagagaggtgagtggaaaacgtccatccatatagcaacttctcacaagcctctcttgnccatgttccaggatgattccatggccttctgncaagatagcttgcctgggattcanacc

SEQ ID NO: 1329 - DNA, 865 bp, Homo sapiens
  misc_feature (774)..(774): "n" may be a, t, c, g, other or unknown
  misc_feature (781)..(781): "n" may be a, t, c, g, other or unknown
  misc_feature (858)..(858): "n" may be a, t, c, g, other or unknown
ggcctttttttttttttttttgagacggagtcttgctctgtcgcccaggctggagtgcagtggtgcgatctcagctcactgcaagctccgcctcccaggttcacaccattctcctgcctcagcttcccgagtagctgggactacaggcacccaccaccacgcccggctaatttttttgtgtttttattagagatggggttttaccatgttagccaggatggtctcaatctcctgaccttgtgattcgcccaccttggcctcctaaagtgctgggattacaggcgtgagccaccgtgcccggccgggtgtatcatttttaaacagagctgacaacaacagtaccttccttctagttatgctgttgagaatgaatgtcgcatgtacaaagcacttcgcaacatgcctcacatatagtaagtactcaataaatggcacttatgacatttatcaacatcaaatttttgtgaattaccaattttaaaaagcataaggttcaaaatatcatatagagcatgattattttatatgatgtatcctagtatttgaatagtcatctttgggtgacgggttgtagtgaatttcattctttgattcttacctgtattttctaatatttctttaatgaatgtgatttgcttgtgtagtcagcattttaattagtgggatatgggggatcagtgagcaatttgtcgtaggaacaggagtcaaagcaggggagaaagctttagttctggtttctcaatttctaagtcattcattcaccttaaatcaaanttaaatngacctaagttttttctctggtttgcttaatcttggcctgaacaataatgcctttaaaaactgggaaattggcaaagnggattat

SEQ ID NO: 1330 - DNA, 855 bp, Homo sapiens
  misc_feature (656)..(656): "n" may be a, t, c, g, other or unknown
  misc_feature (696)..(696): "n" may be a, t, c, g, other or unknown
  misc_feature (728)..(728): "n" may be a, t, c, g, other or unknown
  misc_feature (787)..(787): "n" may be a, t, c, g, other or unknown
  misc_feature (843)..(843): "n" may be a, t, c, g, other or unknown
gactttcacatttactagtagggctgagagaggctttagtgaggaaggaatattcagaataaaacggttgagaaagctgagaagaccattgagttttgatcagttgtgaatagagtgcaaagccatggccaagctgtttttggaaacgctggccggcgtgtcttcagtggaaaaagcaaatcaaaatggagcgagagcaaaggggcgtcctcagtcctcgacctacaatcactgtatggaatcggtcctggcagctgaacataggaggtcactggaacaagtgatagtgcagattggctttcaaacatcctcctggcttgagttttatcagctacagtgtgggtcctcttttgaagccttaattcacaacagcagctttttgggggtggggctgggcgggtgttgtcattgttctttcccttcctgtaagtgtcgctagttgctgcctcgtatctcaggtttttctctgtttttgagaaatggacagttttttgaccaggatgtgacttcatgtttcctatggtgacttctaaaaccagcacagaatgatatgactcaacacagaccgacttggttatggggatgatgagccgcacagacctcactagttgtgcacaaataatgtgctatgatggggtgtaaagtgaaggcagaanagggtcagccgcattggtatggtactgggaaagtgctggncaacgatttgagttagttttagatatcattgnaatctttaatcagacattctcaagtttcacacagtagtttttgaggtatgtcacacacnccaaatgtgtaacagttcaccctttccaaaatggggcatgccccaaacatgttaanaaagggaagcct

SEQ ID NO: 1331 - DNA, 826 bp, Homo sapiens
  misc_feature (755)..(755): "n" may be a, t, c, g, other or unknown
  misc_feature (790)..(790): "n" may be a, t, c, g, other or unknown
  misc_feature (819)..(819): "n" may be a, t, c, g, other or unknown
gaattgggtggcggttgactgtagagccgctctctctcactggcacagcgaggttttgctcagcccttgtctcgggaccgcaggtacgtgcctggcgacttcttcgggtggtccccgtccgccctcctcgtccctacccagtttcttgcttccctgccccatctccgccgctccccgcagcctccgccgagcgccatggctcctaggaagggcagtagtcgggtggccaagaccaactccttacggaggcggaagctcgcctcctttctgaaagacttcgaccgtgaagtggaaatacgaatcaagcaaattgagtcagacaggcagaacctcctcaaggaggtggataacctctacaacatcgagatcctgcggctccccaaggctctgcgcgagatgaactggcttgactacttcgcccttggaggaaacaaacaggccctggaagaggcggcaacagctgacctggatatcaccgaaataaacaaactaacagcagaagctattcagacacccctgaaatctgccaaaacacgaaaggtaatacaggtagatgaaatgatagtggaagaggaagaagaagaagaaaatgaacgtaagaatcttcaaactgcaagagtcaaaaggtgtcctccatccaagaagagaactcagtccatacaaggaaaaggaaaagggaaaaggtcaagcccgtgctaacactggtaccccagccgtgggccgaattggagtgtccatggtcaaaccaacttcangcctgacaccaggtttgactcagggtcttcaaganccctgggctgcgtacttcagcagcagganaagcggg

SEQ ID NO: 1332 - DNA, 807 bp, Homo sapiens
  misc_feature (638)..(638): "n" may be a, t, c, g, other or unknown
  misc_feature (667)..(667): "n" may be a, t, c, g, other or unknown
  misc_feature (750)..(750): "n" may be a, t, c, g, other or unknown
  misc_feature (802)..(802): "n" may be a, t, c, g, other or unknown
  misc_feature (807)..(807): "n" may be a, t, c, g, other or unknown
agtgcgccgcgctgcgctgggcgccatggcgctccccggagcccgggctcgcggctgggcggcagcagccagagcggcccagaggcgccgccgcgtggagaacgcaggagggtccccgagtcctgagcctgcgggccggcgcgcggcgctttacgtacactggccttactgcgagaagcgctgcagttactgcaacttcaacaagtacatccctcgccgcctggaggaggctgccatgcagaagtgtctggtgaccgaagctcagacgctgctgcggctcagcggggtgcaacgggtggagtctgtgttctttggtggggggacccccagtctagccagtccccacacggtggctgctgtcctggaggctgtggcacaggcagcccacctgcctgcagacttggaagtcacattggaggctaatcctacttcagctccgggctccagactggcagagttcggggcagcaggggttaacaggttgtctataggcctccagtccctagatgacactgagctccggctgttgggacggacgcactcggcctgcgatgctctgcggacgctggcagaggcccggggcctctttcccgggcgcgtgtctgtagacttgatgctggggctgcccggcacagcangtgggggcccgtggcttgggcagctgcanggaactggtgcaccacttgtgatgaccaaccttttcccttttaccagcttgtccccttggaaccggggcaccggaactctttngcccaagttgccaacggggtgccctttccaagccccttgaccccggaacttngcaan

SEQ ID NO: 1333 - DNA, 814 bp, Homo sapiens
  misc_feature (608)..(608): "n" may be a, t, c, g, other or unknown
  misc_feature (661)..(661): "n" may be a, t, c, g, other or unknown
  misc_feature (773)..(773): "n" may be a, t, c, g, other or unknown
  misc_feature (809)..(809): "n" may be a, t, c, g, other or unknown
  misc_feature (812)..(812): "n" may be a, t, c, g, other or unknown
cttgatgattgggttaagatctggggcgtacatatatatattttgttgttttgttgtttgtttgcaagactattttataggcctattttttatcagaagacatataatatcttttttttttgagtgttcagccattgagccattggtgatcattacctagatccattaattcattaggggttacaaatagtgccattccacctggattcatttatttgttgaaatacttctgtgaggagaaacttgacttcatctgtttggttgattctttctctttattactggttttcagaataaagagttggttatctagcattctccaaagatgaccaatttttttttaatgtcagaaactgcagcctttaaactagttactattttttaatccattgcagttaccattcttattgatgcttaaattgttacatctttggccagtgcaagccttttcaagttggctcccaagtccctttgagacagtctggttattagtctttgatggcttccttactaaccatccttactaggtggtatggcagtaggttccaggggttgttctgtatggattaacttattctcacaagaaccctgtgaaataatacttttgntatccccattttatgggtgaagagaggaacctgagagattgtgacttacctgnatacctctctagaagaagtacagggatgtaaattcaactactcattctagtgctcttttcacttttccaatctgatgcctcttaaaattacttctggttcatttttttaagnaacttggattgactaagcttaaaattcatcctactnagncc

SEQ ID NO: 1334 - DNA, 747 bp, Homo sapiens
  misc_feature (695)..(695): "n" may be a, t, c, g, other or unknown
  misc_feature (737)..(737): "n" may be a, t, c, g, other or unknown
  misc_feature (747)..(747): "n" may be a, t, c, g, other or unknown
agaaaataccaaaatgtactcggcgttatctaaaattgtagaacactatcctttgatctacaagtgccacaaaaaactaaaattagaatcataattcataagcaaagctattatgaagaaaatgtgagtattggcatataaaagaaaactcctgcaatgtaattagctagatgcaggcagaactttacaggagaagccttgtattttcctgtcatggataatgaagtactcatttctggattggatttgaggatgcaactatgtccaaacctggaagatgaatggccattttctcataagccagggctgatggcctgcaaaatgctgaatctacatgaaaataactgatcagttttacttaatgagaaggtcagacctagcatagcaaattggaagttatatataggctcataggttactctggttgatagaagcttgataaatatttgttgaactgtattattgaatgaatgtttaaagtctcatcggaaatgatcaaatcttttctcttctaccagaatgttaataagcagagaaatcgatttgagtttcatttctttttattttccctgcctaccctcttatagaggtgttgatcagtgaaataattaaagaaaagcaataaatgggcagaaaaatccctaacatgctctaccagatatccattgccacaaaatagaccctgcaaaacttantggcttaaaaccatgataattgactatttggcttgatctatngggccgcccn

SEQ ID NO: 1335 - DNA, 705 bp, Homo sapiens
  misc_feature (614)..(614): "n" may be a, t, c, g, other or unknown
  misc_feature (683)..(683): "n" may be a, t, c, g, other or unknown
  misc_feature (699)..(699): "n" may be a, t, c, g, other or unknown
atataaatggattgtgcctgacattgtgtgggaaattgatgagtatatcgattttggtttgtatcatgaacattaaaatactttttttggtcatctcgaggaaagagaaatagtttattgagatagtttcttaacttatgaacctaatatatcacggttttattttaatgatataagtaatagaatatcaatgaaaaaatctgtataaaagaaatacccagtagcccataattttaccacagctgccactaactgtttggagcattttcttttaattatacttactatatgtggttagtatctttttaacttatcgattgagacaggatcttgctctgtcactcaggctgaagtgcggtcttggaatcataactcactgcagccctgaactggctaaagtagtccttccgactctgcctcccaagtagccgggactacatgtgtgtgccaccatgcccgactgattttttaatttcttgtagagatgaagtctcactatgttgcccaggctagtctcaaattccttagctcaaacctctcacctcagcctctcaaagcactgagattacaagtgtgagccactatgcctggcttgagtttttttcttttaattnttttcttttcatgaatactaccacagaatagtattttagttccctttttaaaaattatgtaatcatggngaatattcactttggnattttg

SEQ ID NO: 1336 - DNA, 726 bp, Homo sapiens
  misc_feature (671)..(671): "n" may be a, t, c, g, other or unknown
  misc_feature (711)..(711): "n" may be a, t, c, g, other or unknown
  misc_feature (721)..(721): "n" may be a, t, c, g, other or unknown
atgtgtctatgagaatgtgctgggtcataatcagttgctctgtgaccctggcagggttttttttgtgtttttttgttttcggaagcggtataattctgcagtggtgtgatcatagttcactgcggcttcaaactcctgggctcaagcaatcctcccacctcagaccccaagtacctgggactacaggcacaaaccactatgcccagctaattattttattttttggtagacggggtctcgctatgttgcccaggctggagtgcagtggcatgattatagctcactgcggcctgaaactcctgggctcacacaatcctcctgcgtcatcctcctgagtagctgggaccacactcacgcactgccatgcctggctaattttaaagttttttgtagagatggagtctctctgtgttacgctggccgggaactcctgggctccagcgaccctcctacgtcagcctcccaaagtgtcgggattacaggcgtgagccaccgtgcccagccccctgggcaagtttaacttctctgtgccttggactccccagtgttaaatggggtagtagagggagacagccctccgagagccttcctgccctgtgcctgcccaaagcagcagtgctccgcacgtgttgctggttcttcatctgaactgcgcttctggccgccatggnctccagtcattctgctcactctggtcacacagtcatgaanaactccccgngaaac

SEQ ID NO: 1337 - DNA, 654 bp, Homo sapiens
  misc_feature (648)..(650): "n" may be a, t, c, g, other or unknown
catgctctctgctgatgtttaccttcacatcttctatctccccaggggtttctcacaggctttatgtcagtttcttggatgcatcaccttctccctctcaatttcgcagtatgtgggttgggagaaggttccagttgtccttgtccgttctccattttctcatagctgaaagtttttaatttatcttttatgtaattatatatattcatatcaccatccatcaagctggtttttaaaactgaaaattatttcatatttttaggaagctactcgattgcatgtatgtaaggccagctcattttaatctcatattaagttaatcaagtaaagacctttataaaaaagaagattttgggctgggcacggtggcttatgcctgtaatcccagtactttgggaggccgaggtgggtggatcacgaggtcaggagatcaagaccatcctggctaacatggtgaaaccctgtctctactaaaaatacaaaaaattagccaggtgtggtggcgggcacctgtagtcccagctacttgggaggctgaggcaggagaatggcgtgaacccaggaggcaaagcttgcagtgagccgagatcgcgccactgcactccagcctggggaacagagtgagactccgctcaaaaaataaaaatnnnaaac

SEQ ID NO: 1338 - DNA, 672 bp, Homo sapiens
  misc_feature (647)..(647): "n" may be a, t, c, g, other or unknown
  misc_feature (670)..(670): "n" may be a, t, c, g, other or unknown
  misc_feature (672)..(672): "n" may be a, t, c, g, other or unknown
taagtaccgccctgttgattttgtctttcaaagttattatctgaagattgcacataaaattccttgtatcagtggcacttttattgggtctttgtgtttcttttctaacttttccagtttattcctttgaaattagttgggcccatggtttattaatttcacgaaaaattttcttccccaaagggccaacttttggctttccttctcttccctgacatttgctcacattcttgttacttgtattttcacttttaatttttcttttatctttcatttttttcttatgtaaattttggccaacgcaagcacagcagtgcttctcaaactttaaggtgcacacgaagctccttgggtctagagctcttgttaaaacgcagattctgggctgccgcggtggcccacgcctgtaatcccaacactttgggaggctgtggcgggcggatcacgaggtcaggagatcgagaccatcctggccaacatggtgaaaccccatctctactaaaaatacaaaaattagctgggcatggtggcgcgcacctatagtcccagctactcaggaggctgaggcgggagaatcgcttgaacccaagaggcggaggttgcagtgagctgagatagtgcctctgcactccagcctggtgacagantgagactctgctcaaaaaaaaanan

SEQ ID NO: 1339 - DNA, 706 bp, Homo sapiens
  misc_feature (564)..(564): "n" may be a, t, c, g, other or unknown
  misc_feature (645)..(645): "n" may be a, t, c, g, other or unknown
  misc_feature (658)..(658): "n" may be a, t, c, g, other or unknown
  misc_feature (692)..(692): "n" may be a, t, c, g, other or unknown
gaaaagatctccctgcacactgtagtcactgtatttgtacagcaagggacttgttccccaagcctggagcttttggaactgaatggagcccagaggcaagagtagtgaaatgaggctgacctttgcttctggttttgcttgctacttgccagtatgtgggttccctggaggaacacacaggtgtcttggctttgccactgggcattttgggtgatttcgttaactttgcctgttttgaccagaagagagcctgatcgtgataggaggaggcgggggactgacggggttatacaatcttcacatatatatacactcagtcccatgccttgagtctagaggctggggagagggcccagctgcacgttggttgaggccagcagtacatggcccttgaggctatgctgatagcaacttgtggcacactttgtacttcatactgtgaggaacatgaaataagccagagccaggcctgatcttgaaagaaccctctgtcaagtgggaaggcctgttgcagacatgcatcaactggcccagctggcttatccatggctgtccctgggcctnctgtgaatccagaggaggctgctccagcattgataaggctgggatggggcaggttccacaaggagggaaagctcaccccantgtaaaaaggaangagtgggggataagctatctcatgaataacctgncaaaggccccaaaa

SEQ ID NO: 1340 - DNA, 819 bp, Homo sapiens
  misc_feature (657)..(657): "n" may be a, t, c, g, other or unknown
  misc_feature (694)..(694): "n" may be a, t, c, g, other or unknown
  misc_feature (716)..(716): "n" may be a, t, c, g, other or unknown
  misc_feature (808)..(808): "n" may be a, t, c, g, other or unknown
ttcagaagggcttcgaaaataggcaggtgtctatgacaggtctgtccatagctcaaattatttcaaaaaaattccttgcgttttccttttgttctgccatagaagatgattattttttttctccatgatgttgtcttgcttttctgttagagggctgtcatgtggtgtgctaaacttttagatagccagagattagctatctaaaagtttcagaatgactgaaatagttattttttctttctttctgtttttattatgtgtctttgcaaaggtttgttgagggaaaattaccaaataaagtttgaaatagtattagtacctttaaatgttttctttaaaatatcttaacgatagatagatagatgatagatagatagataggcagatagacatagagatatatggaatgcttcattacgcatactagacacttgttgattttttaaaaggaaatgaatttagaaagcaattttcctcgaaaccagtttttttcttctttggtaaaggataagtcattcttacaactctcaatgatgcaaggtgaaatttatccaattttaagtagggatgctaaataatgtagagaagacacaagcacttgttttggagacagaatatttgccctctgggcccagatgtgccatttaaaattgaggntctttcattcatttattcattcttgcccttggttggnaaagggtattgggaaagatcgnaattaaagataaagtgtaaaagaaagaaaattgccttgaaacaaacaaagtgcacacgggctaaagatactatgtatatgccctgttaaagnctaatttggtc

SEQ ID NO: 1341 - DNA, 818 bp, Homo sapiens
  misc_feature (638)..(638): "n" may be a, t, c, g, other or unknown
  misc_feature (779)..(779): "n" may be a, t, c, g, other or unknown
  misc_feature (791)..(791): "n" may be a, t, c, g, other or unknown
  misc_feature (810)..(810): "n" may be a, t, c, g, other or unknown
gtgaagatgtttcgtatggcaaattcagtaatgctacctcagtatatagttctgtatacgtatttggaccaaagttattagataaaccaaaaatatttcatgaagcatcttctgcttcagagtccatatccagccacccagctatgaatgtatttagaaagatatttggtggaggtggaatttctaccagaggtcaagaggatttgtagggatagcctcaagaatgccagatgagtgtgtcagaaagcctgctcctacctctcgccagctgcgtgactttaggcaagtcacttaagtaccttatttcagtttcctcacctgtaaattgaacaggggttgaatggaataaaaagccctttgcaactctaaaagtcaattaacacacttactaaggtgttttaagtgaccaggaaggaaatcagaactaacctggattgttagcgaagaaaacagaagccaccaacaagcctatctgtcctttgcaattttgctccaagagcctattagcaatttgaattctgagcctctaagaaaacttatgctcaggtggcccctccaagtgttggtgccagagcactcttgccttgtatcctcacctacgccttccatgaactcatagcagtgctgtggcactgcangggtgttttatgcattcacgttaggagcatgagcagaactgcatatgccagcaccacatgggcagcagagacttcccactggcagatggatgataatggagctgcactgggaacaaccaggactgtccagtcaacatgatncagatgaacatnctggcttaagtcactactntttccaag

SEQ ID NO: 1342 - DNA, 761 bp, Homo sapiens
  misc_feature (439)..(439): "n" may be a, t, c, g, other or unknown
  misc_feature (608)..(608): "n" may be a, t, c, g, other or unknown
  misc_feature (617)..(617): "n" may be a, t, c, g, other or unknown
  misc_feature (711)..(711): "n" may be a, t, c, g, other or unknown
  misc_feature (717)..(717): "n" may be a, t, c, g, other or unknown
  misc_feature (726)..(726): "n" may be a, t, c, g, other or unknown
ttcatcctgttgtttttgttatgatacataatgctgctgtgaacattattgtacctgttctttggtgccttgtgcatatatttctattgggaacacaccaaatagtgaaattgttgtagatgtaatgccatgtatgagagttcctgttgttttgtatactctccaaacttagaactgtcagtctctttaattttagccattctggcatgttcacaggagtatcacattgtgggtttaatttgcatttccctgattacttattactaataatcttttcatatgcttattttcttttagaacgtgcctatgcaagtctcttgtccatttttcaactgttttctatttcttatgaatttgtaggagttctttgcagcttctggctatgcatccttcattaattttgtgtgttgcaaatatattcttccattttgtgacttgnctttttagtctcaaaacagaatcttttgatgagaagaatttcttaattttgatgtaacctcatttatcactcttttccttcatggttggcacttgttgtgtcttgtttgacaatgttgcctatcccaaagtcatgaagattttctcttatgttaacttctaaaagttgnatcatttgncttttatatttatatctacataatgcacctggaattgagttatatgaatgctgtgaatttgggaaggcgggttccttttttccacatggatatncaatcnactcagccncatttactgggggaagacatcttttttctaaaggc

SEQ ID NO: 1343 - DNA, 614 bp, Homo sapiens
  misc_feature (544)..(544): "n" may be a, t, c, g, other or unknown
  misc_feature (550)..(550): "n" may be a, t, c, g, other or unknown
  misc_feature (589)..(589): "n" may be a, t, c, g, other or unknown
gatactgttttttgtctcctcatttgttactccatttcctgttctaggatttcttatctttgggatccctaaagaaccaagagcagagagctttgcagtgtattgttttggacaatttaaatcttatgcatatacagtcatgtgctacatataatgtttcagacaatgatggactgcatgtacaatggtagtcccataagattataaatcatatttttattgtgtccttttctttttctttctttctttttttttttttttttttttgaaacaaagtctcgctctgttacccaggctggagtgcagtggcacggtcatggctcattggagcctcgacctcttgggttcaaacagtcctctcactttagcctcccaatagcagggactataggcatgggccactgcatccaaccgattttgtattttttgtagagatgaggtttcaccatgttgcccaggctggtctcaaactcctgggcttaagtgacctgcctgccttgacctcctgaagtgtttttctatggtcagagatgtaaatacttgncattgngctatagttgcctacagtattcagtacagtacatgctgnacatgtttatagcctaggagccgta

SEQ ID NO: 1344 - DNA, 831 bp, Homo sapiens
  misc_feature (720)..(720): "n" may be a, t, c, g, other or unknown
  misc_feature (783)..(783): "n" may be a, t, c, g, other or unknown
  misc_feature (814)..(814): "n" may be a, t, c, g, other or unknown
  misc_feature (821)..(821): "n" may be a, t, c, g, other or unknown
ttgtatatttggattgctgctctaggttgaccctcagctaaagaaaaatgcttccttatttagttttattctgcctgcctgttagtttgaaaggtaccacttgtttgcttcatgcagttttttttttttttttggttaaactcagcctctatatgtgtttatatgctttcatattttcttcaagtcacttctggattggtaattcacgtaccagagtggccgatgccatatttcttgtttattcttttttttcaatttcatggccttccagcagttttctgggaatactttctgccagttcttgtttacttctctgtttatatgcgtcggtattggaatgctagaacgttaaagtacaaaatatagaaaatataaaatttctgttcatacttttacatcttaaactggaaagacatatctcacattttttaaccatttatgtgttaggtgatatgctaagttcattattcatgttacttaatcatttacaacaactctttggcgtatagatgccattttactggtgaggaaactaaggcttacaaggcgatgtagttcttttttaagggtcatacacttagtgaaagtgaggctggaattttaaccctgacagggtgaccctagagtgcagttacccgggtatactctctgaggagtcctgtatgaatcacgtcctgggaatttttcccaagtgaaatgaatgcttctggaagaactcanccaattggcttgaattcctggggaaatttttgggccaaatattggaccagctggaaatatagnaatggggtatcacatgccaaactggacctgncatttancctgaaagtc

SEQ ID NO: 1345 - DNA, 456 bp, Homo sapiens
  misc_feature (439)..(439): "n" may be a, t, c, g, other or unknown
  misc_feature (442)..(442): "n" may be a, t, c, g, other or unknown
  misc_feature (449)..(449): "n" may be a, t, c, g, other or unknown
gaatcttggcccagaatctcactctcccagccccatggaaagatggggaaaagatttcattctgctgatcaaatttgttagaagacattctttagagtctgaaaaaatatatttcattagcagttctctaggtagtggaatttttagtgatgtttactcttttttccttgttctaattttcctctaataaacagaaaaaaagcaagagtaacccaccaaatttggataaagggcttctgcttttcatattctcttcaaccagaacagcttaacttttctccatttatttatttaagtatttattcatatttgaaacaggctggggtgcagtggcatgatctcagctcactgcaacctccacctctcgggtacaagtgattctcctgccttggcctcccaaagtgctgggattataggcgtgagcctccgcacctggacntancttgacnctatgat

SEQ ID NO: 1346 - DNA, 819 bp, Homo sapiens
  misc_feature (763)..(763): "n" may be a, t, c, g, other or unknown
  misc_feature (805)..(805): "n" may be a, t, c, g, other or unknown
  misc_feature (815)..(815): "n" may be a, t, c, g, other or unknown
aatcagataaggagcataacaaatattttaatttatttccttaagacatgtcatgtaattacaagataatgggttgtctagttttacaaatacagggcaagtcattcaaaaggtcacttttttgattgacctcttctcacatctatcactaattttttttaaaagttaatttacattgagctttccctccagaataattatttttctgtatctattgtctatatctttcttaggccttctagaaataggaggactttgcatatgattttgtttatatgcccatttatatgaaaaaataataatgtcactgtgaatctgcacaatgcagagaaaaggccttggattaaatactatttttaccactgaactattgcatgaccacgagcaaattatttaacttttctgagaatcaactcctcaatggtaaaactgaagaaggaaagacaatattatatgtaaaacttctggcataaaataagaatccaatgatattggttctctttaaaaatggaataattttctatatgttcatttggttataagaggaaacagaaataatgtgctttgagttcaatataatctatgtcttaggacttcaagtgaacagtcttaaagtatacattatttacttgatggatgaaatggctacctagatttggtaatacgtattaagatgcatgtttcagaaataaaaaagttactataaaaattgctaatatacttatagggatattttgctgggttaaaggtatgaacctaattnggtaatttgcatttcccccaaaggtaaggaaggagccaattnccttcagaantatt

SEQ ID NO: 1347 - DNA, 839 bp, Homo sapiens
  misc_feature (681)..(681): "n" may be a, t, c, g, other or unknown
  misc_feature (760)..(760): "n" may be a, t, c, g, other or unknown
  misc_feature (834)..(834): "n" may be a, t, c, g, other or unknown
tgtcaccctagggccgcccgcagccgagtgtcgggggcgcagcgttgtaatgtgtgcggacgccggaccaggactcatttcttcaagtggtttcgacttcctattatctggatttgatccatcacttatgtcagatcaactaagcctggtccatcatggttacaaagtgcccagcctggcaccatgcatggtaggtactgcttagattaagttgtatgtgtttcttttcggtgctgtaataaattgccacaaatcaagtggcttaaaacaagaaaaaattattttcagaaatccaaaataaaggtttcagcagatgccatgctccctaccgtggccctggggaaggatctgttccttgctgcttctgggttctggtagctttctgcattctttagacttccttggcttgtggctatatcactccactctctgcttctgcctttatagcaccttctcctctgtatgggtcaaatcggtctctgcatctctcttgtgatggcatttgggaactcaccgggataatccaagataatctcctcatctgaaattccttaacttacctattcagagaccgtttttccagagatagggcagggcatatttttgggagtctcatcagtctaccacacccatggatggattctgcataatattgtggtcagtcattggatcttcatctangcacttgtattaagtccattctcacagtgctataaagaaatgcccaagactgagtaatttataaagaagagaggttaanttggctacagtctgcaggactataggaagcatgctggggaagcctcaggaaacttacaatcatggcaaaagtcnagaaa

SEQ ID NO: 1348 - DNA, 849 bp, Homo sapiens
  misc_feature (677)..(677): "n" may be a, t, c, g, other or unknown
  misc_feature (742)..(742): "n" may be a, t, c, g, other or unknown
  misc_feature (807)..(807): "n" may be a, t, c, g, other or unknown
  misc_feature (822)..(822): "n" may be a, t, c, g, other or unknown
tggcgtaagaggcggcggtggaggcgctacgctggcgtaagaggcggcggtggaggcgctacgctggcgtaagaggcggcggtggaggcgctacgctggcgtaagaggcggcggtggagacgtttcgctggcgtaagaggtggaggtggagacgttacgctggcgggcacgatacaactgcagctgcaataaactggtccttatacctgttgggttctaacccagaagtccggaaaaaagtggatcatgaattggatgacgtgtttgggaagtctgaccgtcccgctacagtagaagacctgaagaaacttcggtatctggaatgtgttattaaggagacccttcgcctttttccttctgttcctttatttgcccgtagtgttagtgaagattgtgaagtggcaggttacagagttctaaaaggcactgaagccgtcatcattccctatgcattgcacagagatccgagatacttccccaaccccgaggagttccagcctgagcggttcttccccgagaatgcacaagggcgccatccatatgcctacgtgcccttctctgctggccccaggaactgtatagtaatttgaaggtcaaaagtttgctgtgatggaagaaaagaccattctttcgtgcatcctgaggcacttttggatagaatccaacccagaaaaganaagagcttggtctagaaggacagttgattcttcgtccaagtaatggcatctggatcaagttgaanaagagaaatgcagatgaacgcttactatattattgggtttgggccctttatcattgagaaaggcnttattttaagagaancttggcatttacaatttacagaatcat

SEQ ID NO: 1349 - DNA, 820 bp, Homo sapiens
  misc_feature (778)..(778): "n" may be a, t, c, g, other or unknown
  misc_feature (785)..(785): "n" may be a, t, c, g, other or unknown
  misc_feature (819)..(819): "n" may be a, t, c, g, other or unknown
agttgtttctacattttctccaccaccgctctggtttcctggaggccttgatcttgcctgcccaggcacccctcaggaaagtcatagccctgtggctggggagggtggagtgttgtgggccatcaggaaataaactggcagtcacaaagttctgaagggcatagccaccccttttctaagaatatttaaaggaaacagggcttggaggatcctaaaattagctggccttccagtcacatccctaaagagcagaggcactgggccttccctcttcctgcccaagcccagggtggaccctgagtgccctcaggcaccacactttccactgcttctctttccctccattggtgccaggggaagggaatgcctcgtgcctggcatgcctgctttagaaggcaggggccacaaaacactttgtgactgcctggcatcctagtgttactgggtacaactgacggtttaggtggccccctggccaagagtgggcccaagactccgactgggccaaccacgcccctctcctggggctctccatgctgggggatggggatggctggagagggtctttctcggctgtggctcttggataagaggcttgggacacttccactgtctcaaccctgtcccattcctgaggtctccactgctagtccattctgggatctgccactacctgccataaatttcctctctgtgtagctagccagattggcttctgcagtttccactaaacttaattggttgaagaaacaaaacccagaagagaaggagatggagncctaaangggaacaaattcactttacatagtcaaccctggng

SEQ ID NO: 1350 - DNA, 809 bp, Homo sapiens
  misc_feature (747)..(747): "n" may be a, t, c, g, other or unknown
  misc_feature (792)..(792): "n" may be a, t, c, g, other or unknown
  misc_feature (800)..(800): "n" may be a, t, c, g, other or unknown
agcaactgtttggcagtcagagtcccacatcctgctcaactgggtcaggtccctcttagaccagctcttgtccatcatttgctgaagtggaccaactagttccccggtagggggtctcccctggcaattcttgatcggcgtttggacatctcagatcgcttccaatgaagatggccttgccttggggtcctgcttgtttcataatcatctaactatgggacaaggttgtgccggcagctctgggggaaggagcacggggctgatcaagccatccaggaaacactggaggacttgtccagccttgaaagaactctagtggtttctgaatctagcccacttggcggtaagcatgatgcaacttctgcaacttctgctggggcttttggggccaggtggctacttatttcttttaggggattgtcaggaggtgaccactctcacggtgaaataccaagtgtcagaggaagtgccatctggtacagtgatcgggaagctgtcccaggaactgggccgggaggagaggcggaggcaagctggggccgccttccaggtgttgcagctgcctcaggcgctccccattcaggtggactctgaggaaggcttgctcagcacaggcaggcggctggatcgagagcagctatgcccgacagtgggatccctgcctgggttcctttgatgtgcttgccacaagggatttggctctgatccatgtggagatccaagtgctggacatcaatgacccaccanccacgggtttccaaaaggcgagcaggaacctggaaatctcttganagcgcctnttttgcgaa

SEQ ID NO: 1351 - DNA, 745 bp, Homo sapiens
  misc_feature (40)..(40): "n" may be a, t, c, g, other or unknown
  misc_feature (698)..(698): "n" may be a, t, c, g, other or unknown
  misc_feature (707)..(707): "n" may be a, t, c, g, other or unknown
  misc_feature (730)..(730): "n" may be a, t, c, g, other or unknown
ggaaggaagataaggtgcctcctgtctgggggataacagngctctcttacctcactcagagtgaatacaggcatggaacaaatgagtatgtgcgagcagggatgcactcaggagaggagcaggcagtggctggactggctgttatgactaggggcggggctcactgccaccctcccacaccagactatcagcagcagcaagagcgtctcctgggcagctgaccccaaaagtgctgagcatgtgctggcagtaaaacaccccaggcttctcattaataaggatgctttctgtttgtgtctcccctgaaacattctcaaagggttttcccttctgttacatcattagctatcccagcagccttcagggtgggaggcacaagatcattcctgttgtacatggggaggaagcaggtctaaggatttgcttggagcctcatagcaaaccagaaacagggctgggctgagaatccagtctctgccacatcccgtgcataggtacagtggcacctgaggtaggaggcatgggagagagtgggatgaacagacctctctccagccctgagatgtccatggtttggctgtttcagcccccagagttgttgggggtccttgtgaagcaactccacacaggtgttgagtggggcacagggtactgtcagcttgttagtaagagggattccttgggcccagataatttgncagcagctncaagagtgggaccccaactctgncttctctcttttaga

SEQ ID NO: 1352 - DNA, 876 bp, Homo sapiens
  misc_feature (720)..(720): "n" may be a, t, c, g, other or unknown
  misc_feature (761)..(761): "n" may be a, t, c, g, other or unknown
  misc_feature (819)..(819): "n" may be a, t, c, g, other or unknown
  misc_feature (870)..(870): "n" may be a, t, c, g, other or unknown
ggtctaagtttcctgcatcagcaacagaatctagtaattgttacaaaactcttgaatagctgggagagatgcaaactctaagctgcctgccctcttaaaacttggtcttttgtattttaaacagttgagttttatgtcatttgtctcaaaattagtcttgggtcattatatatttctatctactgatttatacattcaggatcaggtcttgacatttagtacatttaagatggttatcaggttgtagtcatcaagcacctatttctggctgtggccacccagccagacccatagagggtagaaaatttgtagatgactgtcatggccttactgacctctgaacccctatgtaatacttgagtgaaaaggacttggaggcttaaccagatgactagctgacatacctctggaagaaggcaggcatcggagccctcttccagagcatcagagaagatcaaagagctcagatctcccctccagaaagtttcattcaaacactcatgaccatatcaacacttatatgtcaataatatctctttaagaaaatgcgaatgtcattgctgtactcctctgtgttgcctatggtggttcaattgtgtgagtcaaaactccaagcctttgggtcacttggtcactcatgcctctatcaataaaccctgagcacctgggaggcagcctgacagagggaagaacaaggactttggcatcaacgccttctangtccaaatcccagacaggcaatttgcaaactacagcttggncaagtaatttaacctctctgatcaaggtgcccacttgtaaaactgggacattcacagnatctacctttgaggctgtaatgaaggtaaataagattatgtaaatgcccancctggt

SEQ ID NO: 1353 - DNA, 755 bp, Homo sapiens
  misc_feature (542)..(542): "n" may be a, t, c, g, other or unknown
  misc_feature (636)..(636): "n" may be a, t, c, g, other or unknown
  misc_feature (664)..(664): "n" may be a, t, c, g, other or unknown
  misc_feature (672)..(672): "n" may be a, t, c, g, other or unknown
  misc_feature (746)..(746): "n" may be a, t, c, g, other or unknown
gttccagccccgcgatggcctccgcgggcagcaccgctcggcgggcgggctccggaagctggcactcagaaaggggagaagggagaggtgctcggccgcagccaactccaagtggctccatgcagcaggcgaacaaagtctccttgaaggccacctggactgacgcggagtccaagcagcccaggtgggtagcgggagaaggtgtcccggctgcggggagcgagaacccggcccagcgcctccctggtgggcagggcctggagcgggcgggggcggaggctgcggcccgagaagcccgcagagacaggctggggccagggatcgcctcccgagaggtgcctaggccgtggcccagagtcgcttccccactgccccgcccaccagccaggcgggggccagggatcgcctcccgagaggtgcccgggccgtggcccagagtcgcttccccactgccccgccctccagccagcccctgcccgacctcgcagaccacctcagtgcgcaggcgactgccctcgccaggccgcgccgccctgcctcgntcaccccgcccgcgctgaccccaccccagcaaggagtccgaccagacggcaatcgaccagacggcgatcgggagctactaccagctgttcgcancggctgtgggcaacgtggaatggctgcnattcttgnctgaaccagagcctcagggaaaatcccaccgacgacaaggtaaggtctttaagtgtttggggcaaaagacccangtccctttt

SEQ ID NO: 1354 - DNA, 740 bp, Homo sapiens
  misc_feature (722)..(722): "n" may be a, t, c, g, other or unknown
  misc_feature (725)..(725): "n" may be a, t, c, g, other or unknown
  misc_feature (740)..(740): "n" may be a, t, c, g, other or unknown
ttttttataaggatgaaaatccgttgcagaagattttgccttgagtcccattggctaaaactgggttccatgcctgtgccctagctgcaagggatgctgggaatctgagtatctagcacttcctcctggactgtgggaagctgactctgccagggtgacaatgggtgttcatagacagcttgcccatgtacagtggggaatggaagagtcctgtactctcctcctcaatgcctgtgtctctcccacggctgcaggtcagaggattcccagctcccaaccccgcagctagccaacccagagccaggagacaagagtaatgaacctgaagatgctgggaccagagacccagaccccactccagagggagcctggcagtcagacagcagctctggaagcagagccctggatgaagtggacgagcagctgttccgctccgtggagggccaggccgcctctgacgaggaggaggtggaggaggagaggtggcaggaggagaagaagacgccggcagccgaggccaagacactgctggcccggctctccagctgcagaggcaggtgtgatgaccagacggcggagaagctcatgacttactttggtcacttcggcggtgccaaccatgcccataccctggggggagctggaggcctgcattgccatgctggtggagcagctgaggactcaaggcttgcggtgggaggaccctggggacctctgaggangangcagaattgcagcan

SEQ ID NO: 1355 - DNA, 726 bp, Homo sapiens
  misc_feature (638)..(638): "n" may be a, t, c, g, other or unknown
  misc_feature (709)..(709): "n" may be a, t, c, g, other or unknown
  misc_feature (716)..(716): "n" may be a, t, c, g, other or unknown
tttctgcgggggacgatttcgtcggtggtaggtgggtgtgagcttggcagtacccgggtccgcgtggttggagggtcgaagagagtggtctagaacgccactcaaaggggagggcctaagactaagcccgccttgccctgaagtggtcgggggcggggagggagtggctagagccccgtggggtggtcgccggggtaagaggttggaagtaggtttaaggcagggctgaaagttgattctgggttggaatccctggactggggcaagtaatgggagctctggggatactttggtacttggtacttggtgcttgggtttgaggaatcgaagttctggggagtggacggaaggaaccggcagaaacggagcccaggcttggcctcttggagtgggagtcaaggattgtttaattatccttaaccagcctggttctctttcttgcaagaattttggagtctgtattctttgaagtgtctagacggaactaatgacggaagtcaacttagccccagcaggaaagctggagcgcctacccaaagttggaggaaattcagggtcctgaagtctttgctctccccatctgcatgcaggctgctatcatgaggttgaatcagaacaccttgctgctggggaagaangtggtccttgaccctacacctcggagcatgtgcccaggtatcttttccgcctgacatggggtgcgtatcancacccanagctgtgtaa

SEQ ID NO: 1356 - DNA, 870 bp, Homo sapiens
  misc_feature (744)..(744): "n" may be a, t, c, g, other or unknown
ctacagtttaaattctgatttttctggctacaagtttctaaaataagttgtgcttccttaaagtcctatgaactgaaaactagatgttttatcaggcgctgcctctaaaccccccaaccatcacagaaggaaatctcttcactgctggcattgacaactaataactgagggtgcccggaatccttcaccccatgtctagtgagtctacggaaccagggtaattgagacaatatctgttacaggaatcaactcctggatacatcacacttgagtcaaagcctggaaagctgaggaagcaacccctgagagcccaaaggaacgtcctaaatataatggaaattatttactacgccttgtgggaattgctttactctactatttgcagtaggactatatactatagcaccttcagggtggaatatctgacagggaatctcaattgctgtagcattttgcttaattattatcctcatagcaggaataactgttactaacaaaagataatatgtgggcctttccaaacatgtgcctctgcctctcattaggtagggaatgttgtttctatctcaaccaatcaggcctagtaagagactgctgaaaaacttaaaggtctaaaaagctaagggaataccaaaacaaccagacagattcttggtttgggagcagaatcatagcatgggtcaccccattcctgggccctctcctaataatatgcctaggactaatggtcttaccctgcctaantaacctttttcaaaagatttttagctgacagactcatgaccatttcacacacactacccaaaaacattacagggtatttctgcagtcaatccaagacccaaaactgctggccccttgcacaggaag

SEQ ID NO: 1357 - DNA, 810 bp, Homo sapiens
  misc_feature (704)..(704): "n" may be a, t, c, g, other or unknown
  misc_feature (718)..(718): "n" may be a, t, c, g, other or unknown
  misc_feature (738)..(738): "n" may be a, t, c, g, other or unknown
  misc_feature (808)..(808): "n" may be a, t, c, g, other or unknown
aaatgttagctcttattacaggctacaggaaagaacttttaggaattagttgcagcaattcatggcaactagaactatgtcccattgagctgtcagaagtgtcctgagggatcacaagatcacagagttttattttattctttctgaaaagaaaatctaaggggagtttacccagtctgtatgggagccatgcagatgactcagtttggctctttaaaagaactatttttaaaaatagaagtaggactgctgagaaaaaaatagtactttaaagtatacatgggttggccaggcgcggtggctaacgcctgtaatccctgcactttaggaggccgaggcaggcagatcacgaggtcaggagatcaagaccatcctggctaacacggtaaaaccctgtatctactaaaaatacaaaaaattagccggacgtggtggtgggcacctgtagtcccagctactcgggaggctgaggcagggaatggcgtgaacccaggaggcggagcttgcagtgactgccctccagcctgggtgagagagcgagactccgtttcaaaaaaaaaaaaaaaagaggctacaacccaacggtgttcattctctcctggccatgacagtcagtcttgggtgcgagttcaggctccccagaacttagcagtctacaggcctgacggtttcaaaggaactctagttgttggaaagcaccagangtagaaaaactganaaggggtcttggcatgccanaataaagctgtcccctctaaatatggttacacactggcacctacttggcaaaagagattgaagacttcancc

SEQ ID NO: 1358 - DNA, 783 bp, Homo sapiens
  misc_feature (621)..(621): "n" may be a, t, c, g, other or unknown
  misc_feature (754)..(754): "n" may be a, t, c, g, other or unknown
  misc_feature (759)..(759): "n" may be a, t, c, g, other or unknown
  misc_feature (767)..(767): "n" may be a, t, c, g, other or unknown
aatttcttcaggtactcttttttgagttacttgtctggtcagatttctgtagtccttctagacagtccttctgcagaaaagtataaagtcttcatctgttcattcattcattcagtaataacgtgcccattcctgggctaagcagcgggtgtccagtgaaaaaagggacatgatccaaggactcaaggaactcatagcctagcggggacaaaagatcaaccatccagtaaacatacaagctcatttcccactacagcttctggtcactagtatgaaaggagagaacggggtacattaaaaagagcagtgtggtgaggaggggctatcaggaacccacatagatgatgatttggtcaaagaagctctgtcctaggcagtaacatttaagctaagacctgaaggtggagaagccagccaggagcagtgaggggaagacttcactggggagagggagcggagtgtgctccaggatatttgaggactcaaaagacaggctggaatgtggtggagaaggaggcatgagctctccggagctgagcatcagagttgtgagccatgtagatgtggagtctgtgtgttggtataagtgcagtgggaagcactgaaggtgagtgacatggnctgatttatgctgcacacatgtgaatttcagcaaaacaaaatggtggcagcaaagacagggaagggaaggaattctagttaaatttaggaagaatcaataaggcttgctgagataaagccctaggatccagtngatanctgaatgncttttgaaagtagttt

SEQ ID NO: 1359 - DNA, 771 bp, Homo sapiens
  misc_feature (568)..(568): "n" may be a, t, c, g, other or unknown
  misc_feature (694)..(694): "n" may be a, t, c, g, other or unknown
  misc_feature (730)..(730): "n" may be a, t, c, g, other or unknown
  misc_feature (752)..(752): "n" may be a, t, c, g, other or unknown
acattgtagcaaaatggcgactgtcattcacaaccccctgaaagcgctcggggaccagttctacaaggaagccattgagcactgccggagttacaactcacggctgagtgcagagcgcagcgtgcgtcttcccttcctggactcacagactggggtggcccagaacaactgctacatctggatggagaagaggcaccgaggcccaggccttgccccgggccagctgtatacataccctgcccgctgctggcgcaagaagagacgattgcacccacctgaagatccaaaactgcggctgctggagataaaacctgaagtggagcttcccctgaagaaggatgggttcacctcagagagcaccacgctggaagccttgctccgtggcgagggggttgagaagaaggtggatgccagggaggaggaaagcatccaggaaatacagagggttttggaaaatgatgaaaatgtagaagaagggaatgaagaagaggatttggaagaggatattcccaagcgaaaggacaggactagaggacgggctcgctgccctctcccttccctgcactgnttttcctcccttccctctgccgtgatagatgctaaggagtggggtggaggttggaagtgggaagcaacagtggcgtataggaaaaagaaaatataccccgtgcacattttcaacatgtagttgaanaagcctaaattaggtactagaaaaaaaaaaaggacngaaaccctggctgatatgtganccagaaccttgaaaatttt

SEQ ID NO: 1360 - DNA, 751 bp, Homo sapiens
  misc_feature (665)..(665): "n" may be a, t, c, g, other or unknown
  misc_feature (678)..(678): "n" may be a, t, c, g, other or unknown
  misc_feature (692)..(692): "n" may be a, t, c, g, other or unknown
gcaaagaaatattatagaggtttttttttcattccaagttttaagttgtccttgtgcatgaaatatgcacatgataaaaagggggttgccatcaatgcatattgtcttgaaaagccaagggctctttttcggtttttctctataatgaagactgttagactgaggactctataattatgctcactgaacaaataccttgaaagggaagtaattccaagtcatgtatcaaagattcaatttgacatgtatttactaaatgcctaacatgcctatgcattttgtttattcatttatagtaacaagatatagtgagttcatattctgtgccagcactgtgctcagtattgaaaaattggagtcacaagattcccactttcaagaacttacagtccaatggaggagaaagaagtatgaaaggatcaattgcagggtgacaagagagtgttccaatagtgcagatccagagctgtgattttaaaaagatgatgcaaaccagttatctcttgcttcatggagtggatgggctacaggaaatttgacaataaaacaaagcttaaataaattgcaacatttgtctacaactctactgtaaaattggaaatgcttttccacagaaaaacctctcaaaatgctgaatgcaaaagttgggatcacagaaacattgngcctatttttggnctgctggaaactgnatttttacaaggtaatccctggtttcaatatagttcctgcttgcactggcggtttcttg

SEQ ID NO: 1361 - DNA, 784 bp, Homo sapiens
  misc_feature (739)..(739): "n" may be a, t, c, g, other or unknown
  misc_feature (762)..(762): "n" may be a, t, c, g, other or unknown
  misc_feature (771)..(771): "n" may be a, t, c, g, other or unknown
gttttttttttggatgtggaagccgagacctaaagttggggggtgatctctgaggagatggatcggtacctgctgctggtgatctggggggaaggaaaattcccgtcggcggccagtagggaggcagaacatgggccagaggtgtcgtcgggtgagggtactgagaatcagccggacttcacagcagcaaatgtttatcacctcttgaaaagaagcattagtgcttcaattaatccagaagatagtactttccctgcctgttcagtgggaggtatacctggttccaagaagtggttctttgcagtgcaggcaatatatggattttatcagttttgtagttctgattggcaagagatacattttgatacagaaaaagataaaattgaagatgttcttcaaacgaatatcgaagaatgtttgggtgctgttgagtgttttgaagaagaagacagtaatagcagggaatcattatccttggctgagtatgcttatatggtttttgtattatcattaaaatacttaatattagacagttattttaatccatgagaatgaagattatatattttagcatctttactgaagaaactctagttaattgaaatttttgactctcaatttgggccttttatttgaataaaattctttaaaatgcatgtttcttaagcttacataatgtcaagaatcataaaaagtgatattttaataaacatgttcctttcttgaagataaattctgnctaatatttaatttaatttttgnaacaagggncttgcttgggtca

SEQ ID NO: 1362 - DNA, 752 bp, Homo sapiens
  misc_feature (589)..(589): "n" may be a, t, c, g, other or unknown
  misc_feature (734)..(734): "n" may be a, t, c, g, other or unknown
  misc_feature (740)..(740): "n" may be a, t, c, g, other or unknown
  misc_feature (742)..(742): "n" may be a, t, c, g, other or unknown
aatgtgaaaataaaaggacagagaaaattttccttgtaaatattaaaaaagaaaaatatagttacagtaatatcaaaaaataaattttcagacaaaaagcattactagagattaaaaaaagagacaatgacaaaagaatcaattcatctggaagctcttaatttgtcttgatgtacctaatgacataaccttaaaatgtaaaaagcaaacattgacagaactacaaggagaaatagaaaatacaaaattataataggaaagtttaacatgctttttgtttttttaccaattgacagaacaagcaaacaaaaagtaggatatagacattttaaataaattgctgtacttgaccaaataatgccatgtgtgaaagtagtgagtacacacatgccctcacacagagtacctatcaatagcagaatacatattcttgtaagtgttcatgcaatatttattttaaaatgacgatctatggagccaagaggatttcaaaaggattgtaatcatagatagtgtgtccttagaccacaatgcaattatgttaggaatcaataataaaaactaatatctccctctccctctccgtctncccacggtctccctctccctctctttccacggtctccctctgatgccgagcccgaagctggactgcaatgacgtgatctcggctagctacaccttcaacttccagccggctgccttgggcttccaaagtgccaagaatgcagctntggccngntgcaacccgt

SEQ ID NO: 1363 - DNA, 752 bp, Homo sapiens
  misc_feature (658)..(658): "n" may be a, t, c, g, other or unknown
  misc_feature (721)..(721): "n" may be a, t, c, g, other or unknown
  misc_feature (738)..(738): "n" may be a, t, c, g, other or unknown
tgaaatgagacatcatttgcatatatacatgttagcaaagaggaccaaacattgttggtggcttttgcagaactctgtttatatgaaatggctttagaaactgaaaaaatggagttcattcaaacaagctgggaaacatggtattttcttaggtatatttttctagtagaaatgtaccctgctctggggagtagccctaactctcagatctaggcctaagttcagtaaatatagaattcaccattgcaaaaactgcaggcagtggtatcttaacaggaactgtcttagtccttttgtttagcactgtgtggtaaccttctttaagtagttctgcatcaggtttctattctctttcacattgggcgtggagaagaggtaacatttttagctgcgtggtgtatgactgagggattgattatggtgtgttggtaaatgtttaacaatctagtccccaggtgtagttccaacatgaatatgggttgatgttttcatttatgtgaatgaggacagtgaaattgaaacaagaaatacatatgtcagaatgtcactggtttatcaatggcttctttactgaatactaaaaggctattttctcttttgtgctctgcatgattaactgttacaaaacattttaaaggttactctacattactaatgntttcttcacttcattaagtttaaaccataaagacccaaaaggaccaagaaaccaacagcaatntacagacccttatttgnagtggttgctggct

SEQ ID NO: 1364 - DNA, 840 bp, Homo sapiens
  misc_feature (492)..(492): "n" may be a, t, c, g, other or unknown
  misc_feature (646)..(646): "n" may be a, t, c, g, other or unknown
  misc_feature (771)..(771): "n" may be a, t, c, g, other or unknown
  misc_feature (825)..(825): "n" may be a, t, c, g, other or unknown
  misc_feature (831)..(831): "n" may be a, t, c, g, other or unknown
ctcataatttatttccatgcatctttgctttggatcctagctttattggtgaacatttatgcctttctatagcaatctgggttttcttagccaattgaaatgggcatttattagatcatttaagcatcatatcaatatagtatatttggcgactttatgataagttcttatgatagatgttcaaaactctgctcaggtgacatttttatggatccacatagtttttgtcatatatgaaaagaaagcattgagttgtgcagatggttaaatgtgcattgagttatttctctggaatttgcatgagaatggaccgacttgtagttgtattaacttttctagtgcccaggttagaaagtttgatctgtgtagtttttaaaggcagcatccaaatcacttatattcagaagaaaatggtaacagatttagaagctgtctatattttccccattatccataatacatattattggcaatatggttttcactctttgntgttaacgtatcaacaatgtgcaatagccactaataatcatttgttaatgcatgcttccaagttctgtatttgaaaatctcagacttcatatatggtaagcgatggagtaatttataacttttatgttgaattcttgctactttaaaaaattgngcttctccttttttaaagcatatgacttacttaacagctgatagcagttacctggatttttagtatttttttacatcacaaaaagatttctctgaagtttgcgcaggggctatttgaggcagttncaacttactaataagtaaggtctgaaagtataagttactggctgaatagatagnctcatngaaccaggt

SEQ ID NO: 1365 - DNA, 689 bp, Homo sapiens
  misc_feature (669)..(669): "n" may be a, t, c, g, other or unknown
  misc_feature (682)..(682): "n" may be a, t, c, g, other or unknown
  misc_feature (685)..(685): "n" may be a, t, c, g, other or unknown
tagtacgtggatctctttgtactcttgccctgggcccccaaaatgtaagatgaagggctggttcatagtgccctaggctcccagttttctctgagcttcagaagctctagaactttggagtggcatgtaaacaggcacagtaagtggtaagtataccctaagagtttcgtaccaagtacaaaaggacaagagttttctggagtggttgagaaaggctttcaccaagaaagtgatatttgcactgagtcttaaaggatgagtaggcctttgctaggaagagcaggtcattccaagtgaaaggaacagcatttgcaaaggtatgaagatgtggaaccctgtgtattattggggtgggggcagatgggagggcgtgggttgcaagtgtttgctgatagaggaagcattcattcaagcacccataactatacccatcccatcttccatctctcacaggctctcccctacatcattagttttctgcttttctgtaggtgacacaggccccaggaggctgggaagtcctggctgttgtggtccctgtgcccccctttacctgcctgctccgggacctggtgcctgccaccaactacagcctcagggtgcgctgtgccaatgccttggggccctctccctatgctgactgggtgccctttcagaccaagggtctangtaaggggatgcntanagca

SEQ ID NO: 1366 - DNA, 693 bp, Homo sapiens
  misc_feature (601)..(601): "n" may be a, t, c, g, other or unknown
  misc_feature (659)..(659): "n" may be a, t, c, g, other or unknown
  misc_feature (672)..(672): "n" may be a, t, c, g, other or unknown
acagagctgggtgtgtccctccgagtgccccccgctagggactgtgcaggccggagctaggcagggacagcggggcgaaccgggctgatagagtcggtccctgctcctgtgaggctctcaccgaatccctgctgtttccgggcagctgaagagcgctgggccctcgcgtcgcgggcgtggctgtggccgtgtctcctggtagtctgagcccactgtgcgtgtggatccacgtgggagctgggttccagagcctggtcctgaggaggagccgagccggggcttccccttctcagaatcctgctcttcctccagagagattcccaggagaagagggaacaaccaattcattcctgaaagccaggcctcgggacctgatgacatttgaagatgtggctgtggaattcagccagtgggagtgggggcagctgaaccctgctcagaaggacctctacagggaggtgatgctggagaacttcaggaacttggccattctgggccttctagtatccaaaccatatgtgatctgccagttggaggaagggggtgagcccttcatggtggagagagaaatctcaacaggagcccactcagactggaaganaaggtctaaatccaaggaatcaatgccaagttggggaatttccaaagaagaattattncaggtagtatcantggaaaaacacattcaagatg

SEQ ID NO: 1367 - DNA, 718 bp, Homo sapiens
  misc_feature (625)..(625): "n" may be a, t, c, g, other or unknown
  misc_feature (691)..(691): "n" may be a, t, c, g, other or unknown
  misc_feature (717)..(717): "n" may be a, t, c, g, other or unknown
tgatgctgtttgctgtagggattgacttaaattggagtcagttcttctaggacagtacgctgtgtgtgtgtatgcgcgtgcatgtgtgtgttgcagataagggcattatcattcggtcttcaagctccttttgtccactaaatttttgtgccctaggatcaattactttcactatttttgtgatccaacctttagcttctgacattcatttgtattgaattcctactctagctggcactgtgctacatattgagaatacaatggtacatactatagactaaattccaagagtttatattctacaggtttagagtaagttggaattccagatattgataagtgccctttaaaaaaaaatgaaacaaggtcctgagataaggatggcctgtttagagcaagaagaaaatccagtgtggctggaggagtgtggacaaggcagggagtgggtagaaatgtggtcagtgattggggctagtgccaggtccaggtcttggtgggtctcctggggcacagaaaagagcttgggttttactctaattgccgtggaagccaatagaggcttttaagcagggcatgacacgatctgatttaagttttcaaagaaatcttgttggcagttgtgtancctttctattcgaagcctggtctgtagatggactggcagcatgagcatcatctgtgagctttttangaaggccatttttgggacccactcang

SEQ ID NO: 1368 - DNA, 809 bp, Homo sapiens
  misc_feature (641)..(641): "n" may be a, t, c, g, other or unknown
  misc_feature (760)..(760): "n" may be a, t, c, g, other or unknown
  misc_feature (762)..(762): "n" may be a, t, c, g, other or unknown
  misc_feature (775)..(775): "n" may be a, t, c, g, other or unknown
ggccttttttttttttttttttgagacggagtctcactctgtcacccaggctggagtgcagtggtgcgatgtcggctcactgcaagctccgcctcctgagttcacaccattctcccgcctcagcctcccaagtagctgggactacagaagtatgccaccatgcctggcttggttttttttgttttgttttgttttgtttttgtttttgttttgtgtgtgtgtgtgtgtgtgtttgagatggggtcttgctgtgttgcccaggctggtctctaactcctgacctcaagcgatcctcccttctcagcctccctagtctctgggattgcaggcatgagctcctaagcccagcttcacatttattttcaaaagctctttgctggagggtctgcagagccccaccttggggtatcattgcctgcacttaggagactgtaatgtaaatggtgccttctttatttgccttccaggggcacttccttgatggacacataatcaggtcaactttgacctcttgtccctggttgagtggggaaatcccagagagaggatcacgtggttgtaggaagacaaacttccagataactctttaatagctttaagcttaattcacttaccatcttttttgtgggggtggatggcanatcttggtcattaaatgagtatttattgactttatattaattaagcacctactatatgctaggcactggtttgaactcagatagcccccatgtgtctgggccttggggggaaaaagatntnatccatgaatgcntaattcttcagacaaggaatggtaattggatttt

SEQ ID NO: 1369 - DNA, 834 bp, Homo sapiens
  misc_feature (640)..(640): "n" may be a, t, c, g, other or unknown
  misc_feature (648)..(648): "n" may be a, t, c, g, other or unknown
  misc_feature (738)..(738): "n" may be a, t, c, g, other or unknown
  misc_feature (795)..(795): "n" may be a, t, c, g, other or unknown
  misc_feature (806)..(806): "n" may be a, t, c, g, other or unknown
ttttttaaaattctgacagttttgttgactttgcactctgatgaaagcgtaaaatcctaggatgaaaagctctacctacatatcaaataataaaatagttataccctagaagaagagaaactcactgtctcctgctaaagaaataccttctgtctatgcaacttttctttccccctttctatacctctcttataagggcaaagcatttatagcctctgagttctaagaaaccatgggagcacggtgatctgctggtgagataaccgagataacagggcccatggtccaggtgccaacaccgaggacccttgttcctttatgtgagcccctgcatctggcccactgctgggtttcaaacatagtattattgaacaacctcaaattgctatatttaaatcaactctttatcaactagtcctgaaaattaaggcctacagacatcaacaaaacgagcgacagaagaaaggcatttccaagtgatgtaactgggtgactcatctcacgaaagggcactcggaggcctaccagtagaccacctttctggcttttggcatgccctgacatcagccttgctccctccattaatcatactacgctcacatagaagccaaaacatgtcacgcttctgtttgaaagctgnctttttgntcttagcaacatgtcatgtttgggggaaagttataatatactggccagtggtgtcagtaagtcgggaaggctaaggagctttgatgtcanggctttaccatttaatggttttcaaagtattgggaattctgagaatattgggggcangtgtaaataanatttgcatgcggtcttttttggggatta

SEQ ID NO: 1370 - DNA, 744 bp, Homo sapiens
  misc_feature (676)..(676): "n" may be a, t, c, g, other or unknown
  misc_feature (701)..(701): "n" may be a, t, c, g, other or unknown
  misc_feature (742)..(742): "n" may be a, t, c, g, other or unknown
aacagggaatgaaagctgagtgtagtggctcatgcctgtaatcccagcactttgggaggccaaggcaggcggatcacatgaggccaggagctaaagaccagcctggccaacgtggcgaaatcctgtctctattgaaaatacaaaaattagccaagcgtggtggcacacgcctgtaatcctaactatttgggtggctgaggcttgagaattgcttgaacccaggaggcggaggttgcagtgggccaagattgtgccactgcactccagcctgggtgacagagcaagacctagtctcaaaaaaaaaaaaaaaaggaaatgaaagacatgcaatagatgatttggtttatttctttaaaacctggatattggctctaaagtgtttatttaaataaatcagatttagaattactgatggaaattggccattcttctatgccatgactctaggatgagtgtcgaagaaatagcagtcaactttaattcagtagacagggcaagaagaatcaaagggactcttaaattaaaccctaagtagtagaacatggaatcaggctttaggaggtcaagtaagaggtgggagaggaggaattcagttctaccaatatttgagtgcctactctttaacacactttctaaaccctggcttcaatagtaacaaaaacaatagctttcctgnctttctagaacttacattctagtangggaaacagcaataaagaaaataaaacttgcagcatttcanaa

SEQ ID NO: 1371 - DNA, 587 bp, Homo sapiens
  misc_feature (547)..(547): "n" may be a, t, c, g, other or unknown
  misc_feature (565)..(565): "n" may be a, t, c, g, other or unknown
  misc_feature (571)..(571): "n" may be a, t, c, g, other or unknown
tgtaagtttatagaaataaactgattgttctctcaaaaactggttttgacacaggtttgtatataactggttattcagtaatgataattttcaaagttgtcttagtctatttgcactactacagcaaaataccatagagtaggtagcttataaagaacagatgtttatttctttctttttttttttttttttttgagacaaagtctcactctgttgcacaggctggagtgcaatggtgtgatcttggctcactgtaacccctgcctcccaggttcaagtgattcttctgcctcagcctcctgagtagcttggattacaagtactcaccaccacacccggctaatttttgtatttatagtagagttcgggtttctccatcttggccaggctggttttgaactcctgacctcaagtgatccaccttcctcggcctcccaaagtgctaggattataggcatgagccaccgtacccggccagatgtttatttctaacagttctggtggctggaaagtttaagatcaagatgctggcagattcatatctggngaggatctgtttcatggntcatanatgggccttttcattg

SEQ ID NO: 1372 - DNA, 881 bp, Homo sapiens
  misc_feature (778)..(778): "n" may be a, t, c, g, other or unknown
  misc_feature (821)..(821): "n" may be a, t, c, g, other or unknown
  misc_feature (862)..(862): "n" may be a, t, c, g, other or unknown
tttaaaaattatccttaagtaacagaataggatttaataggaacaaatgaggctctgtacacacattcaggccagggaagtgtgaccagtcccaagagggcagagtatttgaaagaaaaaaaaaattgccatagtgaattcacttccaactcagagtgtgatcttaaactcacggggattctcacttctttatgaaagtttggggttggatgacccctaaggctccttcttagcacttttattctttgcttccaaagtagaatcttcaactcagagagtgctgctgatgagtcgatagtactcattttgggctgggtgggggaggagagtgaaatgtctaggggaagtgggatgtgtcaaagccaggaagagagcctcctgctgtattcagcattaactacatactacgtgaaaaatctaatacggttttggtccccctaattttaaaaaagaatgtgaaaaaatcagtaactgctacctggagtgtgaagggaagtctggtggacagggtgagggaattatttatcatcctgctctttgaagtaagcaccatattaatgtcatgtattacctattaaaaatatataaaatgagaaatacatgaagatattagtgaagaaagaggggaaaaagaagatagcctaaaataaaaagcaaaatgattcagcctggaataataatgctaaataaggggtgatctgataatttagaaccgtattagagtttattaataggaaacacagtatcatgagttccttaatctctggccttttggaangaaaagaaaattggccaaaaataatctgggttaagggcatggngatgatgaaacttcaggacatgctacagttttaaagggggntcttaagaaaaaaaatcct

SEQ ID NO: 1373 - DNA, 799 bp, Homo sapiens
  misc_feature (728)..(728): "n" may be a, t, c, g, other or unknown
  misc_feature (756)..(756): "n" may be a, t, c, g, other or unknown
  misc_feature (773)..(773): "n" may be a, t, c, g, other or unknown
attttgttgaccccaacacagaagatgtagcagttcctgaacagggaaatgcacatattggatcatttgtatcattctttaagggaaaagaaaaatgttctgaaaaatctcggaaaaatgaagaattaggagatgaaaaaagacttgagaaagaacagttactggcagaggaagaggatgatgatttgaaggaagtaactgatttgaggaaaatagctgctcagttattgcagcaagaacagaagaacaggattcttaatcattcaacttctgtgatgagaaacaagccaaaacaaactgtggaatgtgaaaagagtgtctcagcagatgaagttaattcaccattatcacccctcacctggcagcccttagaaaatcagaaggatcaaatagatgaacaaccgtggccagaatctcaccctataatctggcagagtgaagaaaggaggcggagcaaacagattagaaaagaatatttcaagtataaatcaatgaggaagagttcaagtggcaatgaaaatgatgagcaagacagtgataatgctaatatgtcaacacaatctccagtatcatctgaggaatatgacagaactgatggtttttcacacagtccctttggcttgaagcctagatcagcttttagcccgctcatctcgccaagaatatggggcagcagatccaggatttccatgagaagaaagatggacatttacggaagagcgagagcnaatccacacttcgcaacatcttgaatcnaggtaaaagtattttgnctgatgcattggagctgcctgatgga

SEQ ID NO: 1374 - DNA, 558 bp, Homo sapiens
  misc_feature (473)..(473): "n" may be a, t, c, g, other or unknown
  misc_feature (543)..(543): "n" may be a, t, c, g, other or unknown
  misc_feature (557)..(557): "n" may be a, t, c, g, other or unknown
aaggtggactagacaaagttgtatctagacccttatcatatatgtgatttgcaaatattttgattgtgtgggttgtctttttacttttttaatagcgacctttgcagcacaaattctcattttgatgaagtcaaatgtatctaactttcatttggctgcttatgctttcagtgtcatctaggaaccatagcctaatcgaaggtcattaggatttgcacctttgttttcttctaatgattttataacattggctcttatttaggtctctgatacatctgctgtgaatttttatgtatggtacgaagtgggacgggggaggggtgtcccactttaatcttttgcacatggatgtccagttgttccagcaccatttgttgaaaaaactattctttcctcatgaactgtcgtcttgcctctgttgttgaaaatcagttgactgtaaatgtatggatttacttcagaactgttaattntattccattgagctatatctattatgctagtaccatacagtcttgatgactgcatctttgtaatatgttntgagattggaaagng

SEQ ID NO: 1375 - DNA, 831 bp, Homo sapiens
  misc_feature (605)..(605): "n" may be a, t, c, g, other or unknown
  misc_feature (668)..(668): "n" may be a, t, c, g, other or unknown
  misc_feature (773)..(773): "n" may be a, t, c, g, other or unknown
  misc_feature (812)..(812): "n" may be a, t, c, g, other or unknown
  misc_feature (827)..(827): "n" may be a, t, c, g, other or unknown
tattgaggcactggcccagggaactgagccttgggcctgtcctaaagctccataggtgactgcactgcagcccacatggagagctgcagctctaacacagggattttgagaggcctcagtgccatttaagtggcacttccaggacacccatcctgagctcccacaaagggcgccaccttcccaagaacgtctaattgtcattggaacagccagtgtcaggcagcttctgctcaggctgatgtggcgtctgacccttggtgggttgccagacattccttcctgtttctgccatgggaagttggcactgggaatggtatggagcccccacttctaccctgagccttgggtgtctgctgcttccaggtgaaaaatggacatttctgatactgcccagccactacggcaccacaacccatgctcatagtctccagggatgtgtagaacggcaatggcaggacagcaaacaactggcgatttccccaggtcccacgctcttgcggagtgagtatgttgggtccctgtccccagtgtgttccagccttacccaggtgcacagagtaccctggggccagcacagggcttgtccagtgatgctcctggtgttnacaaaatggctccagagatacctgcattttgaaaagcctgccgagccagcaagtgtagggcangacccggatttctttggcaaatctgaaggtgaaaagggccacttgcctgctgagtaaaaactgcctttacctggccagtgtatgcaacttgagagaaaatgacanctgcatggggcgctctggtgggactgggaaatctgatcnttccgggagctgganatag

SEQ ID NO: 1376 - DNA, 743 bp, Homo sapiens
  misc_feature (297)..(297): "n" may be a, t, c, g, other or unknown
  misc_feature (705)..(705): "n" may be a, t, c, g, other or unknown
  misc_feature (737)..(737): "n" may be a, t, c, g, other or unknown
  misc_feature (740)..(740): "n" may be a, t, c, g, other or unknown
gggggaggttgcagtgagccaagatcgtgccatcgcactccagcctgggcgacagaggaagactccatctcaaaaaaaaaaaaaaaaaaaataccaagactgtaataaagtgggtggtctctagaacccagacctttacttgggtgaattttcaagggcattttcatcaggataacttatgatagcttcattttttaccaagataatcgtcttgaagtatggaaattcccagctttcctctggtcagtgaatgcatattaatcccattgatgctggtgcagttattatttgccttanagttgagcaatagtattgaaattttccattgtatgtaatataaatactattttttatgtttggaataaaataacactttgggatatcaatttagtttcttcattatttgaccttttatctcttgaaagtgaactgtacctcaaagaaaaaagagtatatataattctggtgcttttcactgggatgaaaaaatagaggtgttcttgaggtcttgccctttatccatagcgagtgattgaggcttctcgactgatcaaggcaactccagtcctaagttctaactccagaatatgtaggattcctcaggactagactgagcagactgctataaacgtgactccagaaggttctcctaagaatttagataatgatttaccactattcatacactcgagttgaagaccttangctactagaaatccccaatctgtgagctgganaancta

SEQ ID NO: 1377 - DNA, 782 bp, Homo sapiens
  misc_feature (716)..(716): "n" may be a, t, c, g, other or unknown
  misc_feature (727)..(727): "n" may be a, t, c, g, other or unknown
  misc_feature (756)..(756): "n" may be a, t, c, g, other or unknown
caaacatggcaaaaactatctgataacagccaggcatatagaaagcacaatctaatatatgagtctgaattttactgtgtcccttgctgaaaaaaattcagccattaaaataaccaaaaaattcataatcaagaaatatgtttctgtcatgaatagttgttttttactttagagtgtaaagcatgagatgattatttggagtggataattattaactaatactgacttggggtggattatttggggtggattattgttaactaatactgagttcttgctctgacaatcaagaatttcaaatacacattagcaccacagaaattaccaaagttgaggaaatatatgttacgtgaaatgtatctttgaaattttaataagtgtgtgaacttaacttccttacacatatttgctataattttgacctaagcatattttctactaaggcatgatgctgttaactgacatgatagtatactgtaaaacatggctgtataattagccaaatgtatgaaaaataaacactactttactgacaagtgtaattaaaggaaattggtaaattaagtacattgtaattatattgtaagtagttaatattaaaaatagtcattcttcagctgggcgtggtggctcacgcctgtaatcccagcactttgggaggccaaggcaggtggatcacgaggtaaggagatcgacaccatcctggctaacacggngaaacccccgngtctctactaaaaaaatgcccgggccgtnaagggaaggccccctggtagtcccca

SEQ ID NO: 1378 - DNA, 781 bp, Homo sapiens
  misc_feature (697)..(697): "n" may be a, t, c, g, other or unknown
  misc_feature (718)..(718): "n" may be a, t, c, g, other or unknown
  misc_feature (731)..(731): "n" may be a, t, c, g, other or unknown
atgccgggagttgcagtaccctcaggaaggtagcgtcttgatctgcgtggcgtggttctgtgccttgggaagagatgaatgggaagcggccagcggagcccggcccagcccgggtgggaaaaaagggaaagaaggaggtgatggcggagttttcggacgctgttacggaagaaaccttgaaaaagcaggtggctgaggcctggagccgcaggacgccgttcggtcacgaagtcattgtcatggacatggacccttttcttcactgtgtgatcccaaacttcatccaaagccaagacttcttagaagggcttcagaaggaactgatgaacttggacttccatgagaagtataatgatttatataagttccagcagtctgatgatttgaagaagagaagagagcctcacatctccactttaaggaaaattctgtttgaagatttccggtcctggctttctgatatttctaaaattgacctggaatcaaccattgacatgtcctgtgctaaatatgaattcactgatgccctgctgtgccatgatgatgagctggaagggcgccggattgccttcatcctgtacctggttcctccctgggacaggagcatgggtggtaccctggacctgtacagcattgatgaacactttcagccgaagcagattgtcaagtctcttatcccttcgtggaacaaactggntttctttgaagtatctcctgngtcctttcaccangtgtctgaaatggctatcttgaaagaaaaagtcacgttttggcctattaa

SEQ ID NO: 1379 - DNA, 711 bp, Homo sapiens
  misc_feature (676)..(676): "n" may be a, t, c, g, other or unknown
  misc_feature (687)..(687): "n" may be a, t, c, g, other or unknown
  misc_feature (706)..(706): "n" may be a, t, c, g, other or unknown
tgttaaaagggttctatcaaccctggattttaatttttcaaatgtatgacatagtttcttttgttgtttatggaaaagctgagcaacttggtaacgaatgtgaatatgtttggaagcccaatccagctcatgtagatgcatatttgtttccatgatcatttgaaattctatggagtcaccactgctgattcaaacctggccaggcttcctgattctaatctcatcccagggtgaattgaggttagctgctggagggaatgttcagttcagttgaatgtaaatctagcgccaagccacatgtgagctgagtgtgccaggatgccaagtgataaatcgaggaaagaaagatcacatgaggctgacatcttagcactgacacatggccctcttctgcagaaatactgggcaaagagttgtgagtcagctacaaggaagatagggctttccactgaaaaaggcagtgttcaaaggactcattcgtcaggaaaaagaattcccatgtcaatgagagctgaatgtgagctacactcatctttggataggtatttgatgaatactcgtattcttggagtgactttccaacatttaactaagaccattcagccttcacaacccatttgacttaaagggcaaaagtgcctatctgcaattttgatgatcagacattgccttcttncccttctactnctgctagatccattctagnctctg

SEQ ID NO: 1380 - DNA, 740 bp, Homo sapiens
  misc_feature (681)..(681): "n" may be a, t, c, g, other or unknown
  misc_feature (699)..(699): "n" may be a, t, c, g, other or unknown
  misc_feature (725)..(725): "n" may be a, t, c, g, other or unknown
ttctgtctggcggcggcagcatggcggcgggggcggctgaggcagctgtagcggccgtggaggaggtcggctcagccgggcactttgaggagctgctgcgcctcaaagccaagtccctccttgtggtccatttctgggcaccatgggctccacagtgtgcacagatgaacgaagttatggcagagttagctaaagaactccctcaagtttcatttgtgaggttggaagctgaaggtgttcctgaagtatctgaaaaatatgaaattagctctgttcccacttttctgtttttcaagaattctcagaaaatcgaccgattagatggtgcacatgccccagagttgaccaaaaaagttcagcgacatgcatctagtggctccttcctatccagcgctaatgaacatcttaaagaagatctcaaccttcgcttgaagaaattgactcatgctgccccctgcatgctgtttatgaaaggaactcctcaagaaccacgctgtggtttcagcaagcagatggtggaaattcttcacaaacataatattcagtttagcagttttgatatcttctcagatgaagaggttcgacagggactcaaagcctattccagttggcctacctatcctcagctctatgtttctggagagctcataggaggacttgatataattaaggagctagaancatctgaagaactagatncaatttgtccaaagcttccaaattanaggaaaggctcaaag

SEQ ID NO: 1381 - DNA, 708 bp, Homo sapiens
  misc_feature (523)..(523): "n" may be a, t, c, g, other or unknown
  misc_feature (644)..(644): "n" may be a, t, c, g, other or unknown
  misc_feature (665)..(665): "n" may be a, t, c, g, other or unknown
  misc_feature (705)..(705): "n" may be a, t, c, g, other or unknown
aaagtcgtgtctttcgtgagctggtggaaacaccggagcgcccgctcctggaaagccccgttctcatagcgctcatggccaaacgctccccgcttggcagcatccgccagctgtaactggaggaacaggaccaggtcgggtttgggaaggcccacgtctggctgtttacaccaatctagggaaaaattctgccaagaaagaacccaacagttaaagcttagtgtagtctaggtttttgtttcgaaagtcgtaaaaacaggaaaaaatgaggggacatttggtgaggtaccaagatgtgagactgtttatattgtggctcgtttaatttttagaacctcaaacgtgtcggtttctccagtgtcacctttgtttttcctttgtaaacagacaagtggacagaaaagtaggtagatagaacggctgccagtccccgccacccacagcccaggccccatggaggccctcccagcgcagctacaggcctgctggccaggagcaaacagtctatgtacagaacccctgnagacccccggcctagaacgcctgcagcacagagcagctgggtccggacacaggcacgaggtccttggcagtgtcttttctgccacacacacgccagggtctcctcttccgtggaagagcangaagaagacaggcacttctanagcctgttatgtgccagcctagtctcatcactggcccttnttg

SEQ ID NO: 1382 - DNA, 670 bp, Homo sapiens
  misc_feature (618)..(618): "n" may be a, t, c, g, other or unknown
  misc_feature (623)..(623): "n" may be a, t, c, g, other or unknown
  misc_feature (656)..(656): "n" may be a, t, c, g, other or unknown
ttgcagatggccgtctccctcgctggagcggccagaaaaaggcgctggaaaaagtgaatttcgtaaccagaagccgaagccggagaaccaaggtgatgttatgtgggaaccgaagcctggggtttgtgtacgttgagttgcgatgtttttttctttcgttcctcgtggacttataaaaccacctggagcctgtactgtgtagttgagtacctgaataatcgctgataagattttggctgggcccacaggaacggctggccgatatggtgccacccaggtgttcctaattcattgcttttgctaaagggtccccaaagcgaagctgttgcggattacgtcttttgtaaaaggatgagtattaagaaaatgcctagggcgacgcagaaccttgtaagcctgcgggtggctgaaagtcactgacggaatgaggaatagggtgaggtgggaataggtagtcatgatatacaagagtggaccctgataatggggtgaggtatggggaaaggagctatccgacatgtccttagctctagtctgtcagtaaagatattttgaaagattatcaattcctgtttgtcagatgctaaaatattagacgacacagcccttactggttangttgngttaccttttaattggtaactcctgcgttgtantctggttttacccg

SEQ ID NO: 1383 - DNA, 773 bp, Homo sapiens
  misc_feature (540)..(540): "n" may be a, t, c, g, other or unknown
  misc_feature (691)..(691): "n" may be a, t, c, g, other or unknown
  misc_feature (699)..(699): "n" may be a, t, c, g, other or unknown
  misc_feature (753)..(753): "n" may be a, t, c, g, other or unknown
attttagatcaagtcaccattgtctcttttccgtagtaatctccctagctggtattcctgcttccactgttggactgcctacaatccaggctcttcacagcagccagagagacctttacataacacgaatctgatgattatgtcagttctttatttaaagccctccaatcacttcccatcatacttagaataaaattcaaactgtactctgatcatacctgccaatctttcagactttatctctaaccattctccttgcccattacatttctgcacataattttttttgtttcttgaaccaactggtctttcttcctggaatactcttcctcttagtttttataagattaggtacttcttttaactcagatctcagcttcactgactcatccttagagattggacttactctcacatttctctttttttcgttctctacttggcaataatctgataaaacatctgatcttatttattggttggttggctcatttttctgtctcccaaaacctccatgacagaagaactttgtctgactgntttcttctctagtccctgtgcctctaaccattttttaatgaatttattgtgataaaaatacataacataaaatttaccactttaaccattttgaagtgcacagttctgtggcattaactgcattcacgttggtgggcaatgatcataagcncccatctntagaactttttcatctttccaaactggaaactttggaccccattgaacaaatancttcccaatccttcccaagg

SEQ ID NO: 1384 - DNA, 689 bp, Homo sapiens
  misc_feature (668)..(668): "n" may be a, t, c, g, other or unknown
  misc_feature (672)..(672): "n" may be a, t, c, g, other or unknown
  misc_feature (689)..(689): "n" may be a, t, c, g, other or unknown
ttaggatctttttcttttaactactttttttttggtgtcgtatacaaacagcctctggttctaattactttttctaataagtcaagcagaatgcttgattaaagttttttccatttactattccacagtttaatatagatcttagttattttcttttcccatttaggacacgtgttttagtaatatagactgcatgcattgatccctttagaaattttactgatgatttatatttatagccacagatgtctatattcaaacaaagtttatttttctatgataaaaataatacaagtgtcctaaagaaaatttggaatatataggtaaaagaagaaaaaaaaaaaaaaaaaaaaaagaaaatagatgactgcttgaagaatttagtaagagaactttaagctatagaaaaagagttgaatggacataactagaaaatgtaacaactgaaattagaatttaatagatggcttttaaaggaggttaacatggctgaagagaagattagtgaattggaagatagaacaatagatgttatcaagactacttcatctgatgagtcatagtgaaaaattagaatacatacaaggaaatccaatgagaaattcacatgcaataatagatggaagaatcatagacatgataattggaaagaggctttaaaataaacntacntatttaaaggagatgcn

SEQ ID NO: 1385 - DNA, 638 bp, Homo sapiens
  misc_feature (589)..(589): "n" may be a, t, c, g, other or unknown
  misc_feature (599)..(599): "n" may be a, t, c, g, other or unknown
  misc_feature (629)..(629): "n" may be a, t, c, g, other or unknown
ctccgagcactttgttttcacttcctgacccgtctcagaagctcaagtggttgaatgttttagcctcagaatctttttccccaagccttctcaggtggagccccgctgtaccagacaccacagcacagctctgtgaggctgtgtctcttcactctgtttctggggctgctgaggcccctgggaagccctggagcttgccagagcagagcgagaaagtctctggtcctgtttaaatgcctccgcgttttatctgtgagcgccaggctggagccactccctgtcttctcacagtgcccctgcaagttgcagcctcagttttccagtggctcgtggggtagcaggtgctgcgtcatatggtttgggacctctgtggctgcttccagcctgctaatagaacctctttccaccactgccttcatctttggggtggcacccctgagtgctcaggcctgagggcgctcctgtgtcctcactcgggacaggcagcctccactctgggagctcccatccctcgggatgcccaggagaggccatactttcagggtggcatggtgaattcaggggttaggatgggtaggtggtctttcancccttctacnttggggttggtttacagaacacctgtctgnctgtgccag

SEQ ID NO: 1386 - DNA, 719 bp, Homo sapiens
  misc_feature (624)..(624): "n" may be a, t, c, g, other or unknown
  misc_feature (703)..(703): "n" may be a, t, c, g, other or unknown
  misc_feature (705)..(705): "n" may be a, t, c, g, other or unknown
cctttgtcattctagctgcctgctgcctccgcagcgtccccccagctctccctgtgctaactgcctgcaccttggacagagcgggtgcgcaaatcagaaggattagttgggacctgccttggcgaccccatggcatcccccagaaccgtaactattgtggccctctcagtggccctgggactcttctttgttttcatggggactatcaagctgacccccaggctcagcaaggatgcctacagtgagatgaaacgtgcttacaagagctatgttcgagccctccctctgctgaagaaaatggggatcaattccattctcctccgaaaaagcattggtgcccttgaagtggcctgtggcatcgtcatgacccttgtgcctgggcgtcccaaagatgtggccaacttcttcctactgttgctggtgttggctgtgctcttcttccaccagctggtcggtgatcctctcaaacgctacgcccatgctctggtgtttggaatcctgctcacttgccgcctgctgattgctcgcaagcccgaagaccggtcttctgagaagaagcctttgccagggaatgctgaggagcaaccctccttatatgagaaggcccctcagggcaaagtgaangtgtcatagaaaagtggaagtgcaaagagtggacctttcaggcaagttgcgtccatgacaccaggaagatgtcaagtgngnggtttttcatttga

SEQ ID NO: 1387 - DNA, 731 bp, Homo sapiens
  misc_feature (640)..(640): "n" may be a, t, c, g, other or unknown
  misc_feature (683)..(683): "n" may be a, t, c, g, other or unknown
  misc_feature (720)..(720): "n" may be a, t, c, g, other or unknown
agaacagggacgcaaagttgagtaattagcaaggagaccagttagaaggccactgcagtaatctaagagagacaactctagcttggaccggtgtcatggtgatggggatagtggaaaggagttgaattctagatatattttgattgcatccacaggatttgctgataggtagcatgtggaatgtgagagagtggccaagagtgactccaaagtttttggcaagtgggcaggtgaatatatggatttggagctcaagggagcaatccagcctagagatacaaatttggaagttgtcacagtgcagatggtacttaaaatcatgagaccagatgagatcaccaaggaaatgcaaatagatagaaaagagaagaagaccaaagcctaagccctggggccctccaatgttaaaaggttgaaagatgaggcagaactagcaaaggacactgagaaataaataatgagatataaagagaaacaagattagtaagtatgcatcatgtgccagacaccatgctccagacaaaggatgcaaagacaaacacaaccccgtcctcatcatcctcatgctctaatgcagcagtcaggtactacaccttgaaataccattgtgattggttcagggataggtgtaaaatgtcangggacagtgagaccacaaccttgtacttctgtgaatgattacncacacacacacaatcagccatacttgcctcttctgantgattcttttt

SEQ ID NO: 1388 - DNA, 809 bp, Homo sapiens
  misc_feature (608)..(608): "n" may be a, t, c, g, other or unknown
  misc_feature (638)..(638): "n" may be a, t, c, g, other or unknown
  misc_feature (721)..(721): "n" may be a, t, c, g, other or unknown
  misc_feature (774)..(774): "n" may be a, t, c, g, other or unknown
  misc_feature (806)..(806): "n" may be a, t, c, g, other or unknown
acttttttcattcccgttgttatggaggtaggctctctaggaatctgggagtagtagctggggggcaagagcaaataaagagctcgagcttctgtggtctctggggagatgttcccgggaagcctgtctagagggcggagggcagctgttgagatggcgtggctccccggctcctgcgcccgcgtggctttcgcggcgggcgctgcggcccggtattggacagcctggcagggcagcgcggggccgaatccggctgccgtggctgaggctcatggatcactcttttgtggtagggccacatctgccagagcctggagtctgcgaaggccgggacccggttccccggcccacagtgggggtgtgcaaacccgagagaactggattgcgtacccactgcagagtgctgaagacggggtagccacgaggttgcaaattcgtgaagaaccagcctgggcaacatagcaagacccctttatctataaaaataataataactaggtaccattgtgaaaaataataactagggattgattatagtatctttactctgtattcacaaatatctgtattcctggacatatttaatcctttgatttacctctgactangtttgtcattgtaatccctgggctgcttangaggataccatttggtttgatgaaaaagctggaatgataatagctcaaactcttttgagcatttagtacatgcttggcactgntctatatggcttaagtattcactcttggatttaaccatcaacactcttatganggaaatatccccaatttactttttgcgccaancta

SEQ ID NO: 1389 - DNA, 835 bp, Homo sapiens
  misc_feature (748)..(748): "n" may be a, t, c, g, other or unknown
  misc_feature (775)..(775): "n" may be a, t, c, g, other or unknown
  misc_feature (794)..(794): "n" may be a, t, c, g, other or unknown
taacgatgttgtgctcagggtagtaattgagaggtattttacaccagatttaagcctgtgcttttatcttcaaagatatgctacttaaaattgggggaaagtgtacagaatggaactgtatggatatggatttttagaatagtgcacacacctcaagtgtgtatttatttcattaatttcccccaaactgagtacctcctatgtgttaggcactggacaaaacagtaaacaaaatagtaaacaaaagaataaaaatccctgccatcatgaagttccactttggggatggggtgagaagacattgatacaaaaattaaggtacagtctttcctgtccctcggcatctgtgggagattggttccaggacctcccttggataccaaagtcctcaaatgctcaagtccctgatataaaatggtgtagtgtttgcagataacctatgcacatcctcctatctttagttcaactctgcattatttataatgcgcaatacaacttaaatgctgtataaatagttgttatggtgtattgtttagggaataatgacaaaaaagagtctatacatgttcagtactgacttttttttccttccccgaatattttttcatccatgattggttgaatacaaggacgaagaacccatgggtaggaagggccaactgtgtaccgtcaagtggcggaaagtgctagagaaaaaaaccaaagcagtgcaggggtatagggaatgccaagagatgggagtggtggncatagaaaagatgatattaacttggangcctacggtgataaagaanggtgcccttggaaggactgcctgaaccctgaacagccatct

SEQ ID NO: 1390 - DNA, 438 bp, Homo sapiens
  misc_feature (258)..(258): "n" may be a, t, c, g, other or unknown
  misc_feature (358)..(358): "n" may be a, t, c, g, other or unknown
  misc_feature (406)..(406): "n" may be a, t, c, g, other or unknown
  misc_feature (408)..(408): "n" may be a, t, c, g, other or unknown
ggcctttttttttttttttttagtagagacggggtttcaccgtgttagccaggatggtctcaaactcctgacctcaggtgatccacctacctcggcctcccaaagtgttgggattacaggcgtgagctactgcgcccagccaactatacatttttgaagccctcctgatcacttccttggttactctcatctttgtttgaagttcaatatattactttttttttttttttttttttttttggagacagagtctcactntgtcccccaggttggagtgcagtgagccatgattgggccactgcacgccagcctgggcaacagagtgagcccctgtttcaggaaaagaaactgagagggnaggagtaaaggaatttcctaagctactgccatgtgtcaggcccactgntnggcaatttatatcatttagctcttgaatga

SEQ ID NO: 1391 - DNA, 881 bp, Homo sapiens
  misc_feature (646)..(646): "n" may be a, t, c, g, other or unknown
  misc_feature (745)..(745): "n" may be a, t, c, g, other or unknown
  misc_feature (757)..(757): "n" may be a, t, c, g, other or unknown
  misc_feature (858)..(858): "n" may be a, t, c, g, other or unknown
  misc_feature (876)..(876): "n" may be a, t, c, g, other or unknown
gtcttgctttatttcaggaatgcctctggctcaggcagtagccattcttcagaagcactgtcgcatcatcaaaaacgtccaggttctctacagtgaacagtctcctctaagccatgacctcattcttaacctgactcaggacgggatcaaactaatgtttgatgctttcaatcagagacttaaggtgatcgaagtatgtgatttgactaaagtaaagttaaaatattgtggcgtgcattttaattctcaggccatagctcctaccattgaacagattgaccagtcttttggcgcaacccatcctggaggtaagccaagtccatctgattcctctggtcatcagtggcagttcatagcaataaacctgcccggtagtgccatcccaccccacttcctggagtcaggctcccataggattgtggggttggtacttgggtgtgaaggaaacatcctcccccttgttttcaacctagtaggccagtttagaaacaagccacagggaaggtgttgtcagtcattactccctgccaggctggtttatgttagccatttcagatgccagtcaaccatgttattttcttctcccccacccccaacagtgtacaactccgctgagcagctcttcatctcaacttcagaggactgnctttctcttttcagttagactcatggactgaggcttcaaagtatgagcccaattttgcccatggcctggcttctcttcagatccccatggagcaactgnaaaacgaatgtncatctacagtggcaacaagcctgcaggataccaagtaagtttaaggagccttgagttcttgctaaggcctgggctggctgggagaaagaacccagccttgntcatctgggctggcccanggttc

SEQ ID NO: 1392 - DNA, 798 bp, Homo sapiens
  misc_feature (730)..(730): "n" may be a, t, c, g, other or unknown
  misc_feature (771)..(771): "n" may be a, t, c, g, other or unknown
  misc_feature (778)..(778): "n" may be a, t, c, g, other or unknown
tgttaaaagggttttaaataagtctctttttcaatggtgtaagtatgagatttgtgaagccctttccagatgcatgtgtgtttgcttatgtttaaaaaatcacttgagtgcaaacatttaaacacattttataaaactggcgggccaggcacggtggctcatgcctgtggtcccagcactttgggaggccgaggcgggtggatcacgaggtcaggagtttgagaccagcctgaccaacgtggtgaaaccccgtctctactgggggaaaaaaaaaattagccaggcgtggtggtgggtgcctgtagtcccagctactcgggaggctgaggcaggagaatcacttgaacccaggaggcggaggttgcaatgagccgagatcatgccattgtgctccggcctgggtgacaaagcgagactctttctcaaaaaaacaaaaacaaaaacaaacagacaaacaaacaaaactggcatggcattggacagtgacacataagaagctgatgtcatctttgccacttagagaaggcaaaatatcttgttagataacccctcttaaatgctctgcttggctagtactttttgggcttggtcagtgattagagtttaagttgtaaatggtattcataatttcttgtctctgtctcatcccaaacagattagaaaatctttgatttttgttggtaaggagctagcatcttattaatacaaagccttgtgcataaattatttncagtaattatttaatgcctaatgtgcatgctttgtgctgantgcttanggataaaaagaggaattaag

SEQ ID NO: 1393 - DNA, 787 bp, Homo sapiens
  misc_feature (689)..(689): "n" may be a, t, c, g, other or unknown
  misc_feature (734)..(734): "n" may be a, t, c, g, other or unknown
  misc_feature (750)..(750): "n" may be a, t, c, g, other or unknown
tgaagatatgtgtcatatttctttcaatggataattttaagtgatattaaattatgtcaatagtttgaatagcaatagcaaccattgagctaaaattatgcaacaaatagttgcttgttaacctaagatatttcaacatttttgaaagattagtaataaaacatgccatatttaaaaagccttaatgtgaatcttctctccactgtagttcaggggacactcaggatgctagagtaatgctataaaaaaagccactcagacaggtgcagtggctcacacatgtaatcccacctactcagaagactgaggccggaggatcacttgaagccaggagctcaagaacagcctgggcaaaatagcaataccctcctctctaaatatatataaatatatatatatagataattagttgggcatggtaatgtgccggtagccccagctactcgggaggctgaggtggaaagatggcccaggaatttgaggctacagtaaactatctcactgcactccagcctgagcgacagaatgagactccatcttttaaaaaaaaaggcactgaaatgaccccatcaaatccaaccagctatgccaggctctatttccatcctatttctgaggagtttttgtccttgctgggtttcctttggcttcatacccagattctgcttgccctatataacatggatggnctgtctgtcctttgtcagtacctgctcaagatgccacttgcccanagctagagcccacgangcaaggggcatctcttctcttcactgggtcaaaggta

SEQ ID NO: 1394 - DNA, 866 bp, Homo sapiens
  misc_feature (704)..(704): "n" may be a, t, c, g, other or unknown
  misc_feature (799)..(799): "n" may be a, t, c, g, other or unknown
  misc_feature (802)..(802): "n" may be a, t, c, g, other or unknown
  misc_feature (864)..(864): "n" may be a, t, c, g, other or unknown
attattaataagacgatgatcatgctaattaagctactttattagagtttgatggattttgtgccagaaattatggtggggtctttgaaatatatagagtattttctcttagagcaagtcgtctagcatcattgaaaactttactgaaaactcttcattactcataacattgctcgtctgtttcaaaatgacacgatagtcactttcacagaaacataatagtatgcaattcaaatgtttaatttgctgctgcaaaagaattcacaatagaattctcaatgtggggttaattacatagtaatgaaagagtaaacctattgggaaaatgctctaagtaacattgctctgtttcctactgataaagacgtgcacgcctgatttattttttatgctgggaaattcagaagtaagagaaaaccttgaaaaggtatgcacatgaataataaagttttttatcatttgtcaacatgatgagaaaatgatgaacgtggataattattatattacaaaggctataatcacaaaatagtaatgtataagaatatagcattctattatacacaggagaacatgatacattaaaatcattgataacataatctaaggaaagacatcgctaatcagaacaaaaaaaggaagaagtaatagagcaggcactcaaaattgtgtccatgttttctacaaataatcttcaccctctctgnctatgagtatagtggtatattgctaggtatggtatggttactccatatatgtcaaagacttcactgggggaattggaccatgaggacccttgggnccnaggaaggggaacatccacactggggcctgttgtggggttggggggatgggggaagggaagcntt

SEQ ID NO: 1395 - DNA, 817 bp, Homo sapiens
  misc_feature (776)..(776): "n" may be a, t, c, g, other or unknown
  misc_feature (790)..(790): "n" may be a, t, c, g, other or unknown
  misc_feature (807)..(807): "n" may be a, t, c, g, other or unknown
aaacaaattgcgaaaagatgctagttctcaagactgctatgatattccacgagcatttccaagtgatagatctagttcacttgaaggcttccataaccactttaaagtcaaaaatgtgttgacagtgggaagtgtttcaagtgaagaactggatgaaaattacgtcccaatgaatcccaattcaccaccacgacaacattccagcagttttacagaaccaattcaggaagcaaattatgtgccaatgactccaggaacatttgatttttcctcatttggaatgcaagttcctcctcctgctcatatgggcttcaggtccagcccaaaaacccctcccagaaggccagttcctgttgcagactgtgaaccaccccccgtggataggaacctcaagccagacagaaaaggtcaaagtcctaaaattttaagactcaaaccccatggtttagagcgaactgattcacaaaccataggtgactttgctacaagaagaaaggtcaagccagcgcctttagaaataaaacctttgccagaatgggaagaattacaagccccagttagatctcccatcactaggagttttgctcgagactcttccaggtttcccatgtccccccgaccagattcagtgcatagcacaacttcaagcagtgactcacacgacagtgaagagaattatgttcccatgaacccaaacctgtccagtgaagacccaaatctctttggcaggtaacagtcttgatggaggaagcaaccctatggatccaagccccaanggaggaccaaacanggtgggaatacctttanatcttcggac

SEQ ID NO: 1396 - DNA, 764 bp, Homo sapiens
  misc_feature (675)..(675): "n" may be a, t, c, g, other or unknown
  misc_feature (688)..(688): "n" may be a, t, c, g, other or unknown
  misc_feature (690)..(690): "n" may be a, t, c, g, other or unknown
aatattgtatccgtgccatggctggggaccacagcttgcccgctacaccaaggaaggcttcctgcacttgggtgccctggggaccaccacactcctccctgacacccgctgcctggtggacaactccaagagtcggctgccccagctcctggactgcgacaaggtcaagagcagcctgtacaagcgctggaacttcatccagaatggagccatcatgaacaagggcacgggacgctgcctggaggtggagaaccggggcctggctggcatcgacctcatcctccgcagctgcacaggtcagaggtggaccattaagaactccatcaagtagagggagggagctggggcactggagcctggcccccaggacatggctgctccccccaacatctggaccagctgccctggcggagagacagcaaggggccggcaggtgctcgatgggccccccagggcttctccagggcagcacagggaccccggatgaagactctgtcccccctcaggcattcagctgcccacaagtttcctgcaccctggaaaagccccccacccttcctctgggaaactgacagctgtcttccacagcctctgatgtggacctggtactgaggagcaagactgtccagttctcctccacatctccatcccagaatcaggatctgggactggcanggtccccttctgngnctcatctcttgcagcaacagctggttgaacttcaagccatcaacacggtggggaaggcaaccggggggctttaa

SEQ ID NO: 1397 - DNA, 774 bp, Homo sapiens
  misc_feature (757)..(757): "n" may be a, t, c, g, other or unknown
  misc_feature (764)..(764): "n" may be a, t, c, g, other or unknown
  misc_feature (769)..(769): "n" may be a, t, c, g, other or unknown
acactgaaatgacattaggatctaaaataatttgctgtcaattgtacatttgcatgagtacgtatgtttggctcattactggtttaccccttgagtgaatgcctgtttatgatgactgagagcatattcatgtgtgatctgcgtgtttctggaatatgctttatacgtaatgaaatctgtttgctgggaattcctgattcttgttatataagaagaacaacctatttcgctcccagaaaaaaaagatcaaagagctttcagaaactttgagaacttggctatttagaaaaagtgataatgggtcagtttctcagactgtagccattgaaaattagatgcagagaattcagagatttcttcttaatggaagtaataagctgtaagaattgagagatcacaatggagtgttaaaactgactgtgtctaagttgggtgtaagggtttcctgggtttttttatatacatgctctccccagaatacagtaaaccacagttttagaactaaacacatctgtaaaactaaatatagcatggaaaatccaatttgaataagtcatgctttcctagaatttaaaaataaaaaagtcttcctctggaaagagaagtcacacagacaatcatgtgccctataaaagtgagtgtttataggactaaaaaacttttaacaactttttaaggaaatatttttggtcttatacaaaaacatgtaaatattgctttattactttcattttctgaccctgctgtaaactactgnaaccctnacatnctcaa

SEQ ID NO: 1398 - DNA, 804 bp, Homo sapiens
  misc_feature (743)..(743): "n" may be a, t, c, g, other or unknown
  misc_feature (789)..(789): "n" may be a, t, c, g, other or unknown
  misc_feature (798)..(798): "n" may be a, t, c, g, other or unknown
caaacatgcacacattgtcaaaaaacttctgaaaaggtggactaatgatggatattaaaacataatgcaaagatataataaataagatcgtttgatactctaagaactgatgtataaacagagtctagaaatgaactcagaatacaaaaagaaatgtagtctgtgctaaaggtgataggaaatgaagaaaaaatatttttaaggccaggcacagtggcttacgcctgtaattccagcactttgggaggcgggggcaggcagatcacgaggtcaggagttcgagaccagcctggccaacatagtgaaagcccgtctcaaaaaaaaaaaaagaaaaatatgctggttgtcaatgcacttttattgtagaaataatgccaatctgttatttaaattgaaaacagtacagaagcatatttaagagcaaggcgaaagtcatcttttctccttcctatatcatttctgcctccatccccctctgcatagatgacctctatcaacaggtaatgtgtctccttccagacccttttggtatactttcagggatgtacatctatgcctggccaggaaagaattttttaacagcacatatcagcactactttatcagtcttctatataacacctcactgaagcataaatgtccatcaaacagggaagaaacgctctcattatattgaatgatcagagaatgatctttgtaccctcaagtattttaagtggcttgcaaatgacatgtttggtatncccttggtccactcctgatacctgaccccagatgagaaggactcanttagtgcantggata

SEQ ID NO: 1399 - DNA, 847 bp, Homo sapiens
  misc_feature (702)..(702): "n" may be a, t, c, g, other or unknown
  misc_feature (755)..(755): "n" may be a, t, c, g, other or unknown
  misc_feature (803)..(803): "n" may be a, t, c, g, other or unknown
  misc_feature (822)..(822): "n" may be a, t, c, g, other or unknown
atcgcttctcggccttttggctaagatcaagtgtagtatctgttcttatcagtttaatatctgatacgtcctctatccgaggacaatatattaaatggatttttggaaataggagatggaataggagcttgctccgtccactccacgcatcgacctggtattgcagtacttccaggaacggtgcaccccaaagtacagtacgggtggctggcaagatggccgaataggaagagctccagtctacagctcccgcagagatcaacgcagaaggtgggtgatttctgcatttccagctgaggtatctggctcatctcatcgggactggttagacagggggtgcagcccatagagggcaagccaaggcagggtggggcattgtttcaccagggaagtgccagggattggggaactccctcccctagccaggggaagccaagaggaactgtgccctgaggaatggtgcactctagcctagatacgatgcttttcccatggtcttcacaacccacagacccggagatttcctcaggtgcctaccccaccagggccctgggtttcaagcacaaaacaggaagccatttgtgcagacaccaagttagctgcaggagtttttttcataccccagtggtgcctggaatgccagtggacagatctgtcattcccctggaaagggggctgaagccagggagcccagtggtctanctcaacggatcccaccactacagagcccagtaagctaacattcattggcttgnaattcttgctgctacatacagtctgaaatcgccctgggacccctaacntggtagggggaaggcgtcnccattctgagcttgaatactggttt

SEQ ID NO: 1400 - DNA, 782 bp, Homo sapiens
  misc_feature (689)..(689): "n" may be a, t, c, g, other or unknown
  misc_feature (751)..(751): "n" may be a, t, c, g, other or unknown
  misc_feature (778)..(778): "n" may be a, t, c, g, other or unknown
catgtagaaaggggtggacctttcccacaagagccacatttcttcccttggagaattgaagcaaatatgcagtacgtaagtgaatagcagcatgagaaagaaaataatttgcaatgatctcctatagttagtgagcaaagaaaattgtcagttttttttaaagtagctcttattgacaacctatcttaaactgaatactgaaaaaaagtctatgaaagttttataatttcagtatgttttaacattcatgcgtgaaataactgtaaagtacactgtaataattttggtcttgctcaaatcaagaattttttagtaaccatgttattttacagacaatattgaggcataacaaaataaagggtgctggaagcattcattccttacccctctcttttaagaatacgaagatggcattgatgttcttttgttatttttgtctgtgaaagaaaaataattaaagaatgttctatgacaaagaataccattgtaaaaataagattatagaaaaggttatttaatatactattatctcacatctccttgatactattttaatgtttactgcaaaaaatcatattcctattaaatatggaaattaggtgatacatgttatacaaatttatggtttagttttaggtgatatgagtaacatttatttgtcatcgccataattcatttgctgtcattgncattttattgtacaagttaaatcttggtatatatttttaaaatcagccaatgtaaacaaagntcaaagtcatgaagagaatcttttganggcc

SEQ ID NO: 1401 - DNA, 810 bp, Homo sapiens
  misc_feature (679)..(679): "n" may be a, t, c, g, other or unknown
  misc_feature (723)..(723): "n" may be a, t, c, g, other or unknown
  misc_feature (776)..(776): "n" may be a, t, c, g, other or unknown
  misc_feature (789)..(789): "n" may be a, t, c, g, other or unknown
attaccaggcacgcgcaggaaacatggcggcggcgggtgttgtgagcgggaagattatatatgaacaagaaggagtatatattcactcatcttgtggaaagaccaatgaccaagacggcttgatttcaggaatattacgtgttttagaaaaggatgccgaagtaatagtggactggggaccattggatgatgcattagattcctctagtattctctatgctagaaaggactccagttcagttgtagaatggactcaggccccaaaagaaagaggtcatcgaggatcagaacatctgaacagttacgaagcagaatgggacatggttaatacagtttcatttaaaaggaaaccacataccaatggagatgctccaagtcatagaaatgggaaaagcaaatggtcattcctgttcagtttgacagacctgaaatcaatcaagcaaaacaaagagggtatgggctggtcctatttggtattctgtctaaaggatgacgtcgttctccctgctctacactttcatcaaggagatagcaaactactgattgaatctcttgaaaaatatgtggtattgtgtgaatctccacaggataaaagaacacttcttgtgaattgtcagaataagagtctttcacagtcttttgaaaatcttcttgatgagccagcatatgggttaatacnaaaaattaaaaaggcccttatacggcaactatgataggattttncaagtcacaaactacatttttgcagtttgagaagcacgatccctttacacatnaacgaccaccttnagaaatggcagattttcttag

SEQ ID NO: 1402 - DNA, 842 bp, Homo sapiens
  misc_feature (782)..(782): "n" may be a, t, c, g, other or unknown
  misc_feature (795)..(795): "n" may be a, t, c, g, other or unknown
  misc_feature (811)..(811): "n" may be a, t, c, g, other or unknown
agtgacgattaattaaatagatatatacgtttgtcaaatcctcaagcaaaacactaagacccaggcacatagaccaatggaacagaatagagaacccagaaataaagccaaatacagccaactgatctttgacaaagcaaacaaaaacataaagtgggaaaaggacacccttctcaacaaatggtgctgggataactagcaagccacatgtagaagaatgaaattggatccacatcactcaccttatacaaaaatcaactcaacatatatcagagacttaaatctaagacctaaaatcataaaaattctagaagataacattggaaaaacttctggacattggcctaggcaaagactttatgaccaataatccaaaagtgaatgcaacaaagataaatagatggaacttagtcaaattaaaaagtttctgcacagcaaaagaaataacagagtaaacagacaacccagagagtaggagaaaatattcgcaaactatgcatctggcaaaggactaatatccagaatctacaaggaactcaaacagatcaggaagaaaaaaaaacaaaaacaaaaacaaataatcccatcaaaaagtgggctaaggacatgaatagacaattatcaaaagaagataatgataataaaataaatggttggccgggcgcggtggctcacacctgtaatcccagcattttgggaggccaaggcaggtggatcacgaggtcaggagagtgagaccattctggctaacacagtgaaaccccgtctctactaaaaatacnaaaaaaattagcntgggcgtggtgggcangtgcctgtagtccccagctactggggaagct

SEQ ID NO: 1403 - DNA, 844 bp, Homo sapiens
  misc_feature (800)..(800): "n" may be a, t, c, g, other or unknown
  misc_feature (824)..(824): "n" may be a, t, c, g, other or unknown
  misc_feature (828)..(828): "n" may be a, t, c, g, other or unknown
taatgtggtaccatatattctttcttttaaggaccttaagaatctgggaagaattagccacactctaatttaggaacagagatggatgaatccacctatggacatttactggtatgagtcactggggaagttcactaagtcactatttaagatgatccagaacaggtgtctacagctgccttaagaatgagtactatggtggtgatgaaaatgttcctctcagatgtccaactgcagggggtgggtatgaaattgccagatggccccagctggtgtgctctggaatccttggcgccaaggccatgctgccaggggcttctccaggctggtgatcaaatgtagtgaggatcctaaggcaggcccattcctggaagacatgggactctcccgataggtgagtttggctcaaggactcctcatggtcctgaaagaaactctctgagacctgtacttcagtggaagcctgtctttcctttgctgtctccttcccaagggttaaacctacattgcagtctaatggtggctctcccggccttctctggctccctcgacattttctctcacaggcatttcctttaataaatctctcgcatatctgatcctgtcttggcttttgcttcttggaggacccagaataacacaagtactgtcataattatatctcctcactttaaatctctcaagtgtaattactaaaattgtgttgtagtgggaaagtaaaaagcaagggttactaactttgagaagtatctatgaaaaccactcacccattaaagtttcattctttaagtaccatttantaataaccttttaatttccaattngtanccatgggcctaatctt

SEQ ID NO: 1404 - DNA, 740 bp, Homo sapiens
  misc_feature (669)..(669): "n" may be a, t, c, g, other or unknown
  misc_feature (713)..(713): "n" may be a, t, c, g, other or unknown
  misc_feature (721)..(721): "n" may be a, t, c, g, other or unknown
aatgctacaggcttggggcacagtggctgctgtctcagcctcgcaccacatgcaactcccctgaagacgttccttccacccacgattggactggaaggatccaggaccagggtttgtctcctgggcttaaaatgctatcaagtaaatgtctcaaaaataatgctttcctcaccctacattctcttctccttcattcctgtttttattaagtagaggaatgtttagaatccaggactgcatgttaatgagttggaggtgaggtgcttttggaattctccagtgttaactttggaatccagcaccctttgggatgagagtgtggtgggtgagcctttatggttagcagcccagcaaccctcacgaaaaatgaaggccacaggggctctgcttcgatggttacagctagcagctgaagcaggtcttttctggtagtgtagtggctctgaagcatttggccggaggttggaatgagattttggtatagagagaggcctcaaacttttgtacctctgtgctttatctccactgtaatttttatttctttgtacatttttggtatgaccacttgatattgcagcgaacgctgcacttgccttcttaatctagcttcgatcttttcaaagaaatgaaaattttgatggtcatatcgtgggcatacacttacagatnagaattaagacgtatgatagacctgagaagctgcattttatganggtagctngagaaaataaattttttgg

SEQ ID NO: 1405 - DNA, 496 bp, Homo sapiens
  misc_feature (474)..(474): "n" may be a, t, c, g, other or unknown
  misc_feature (478)..(478): "n" may be a, t, c, g, other or unknown
  misc_feature (493)..(493): "n" may be a, t, c, g, other or unknown
ggccttttttttttttttttttttggcggcggacggacagggtcttgctctgttgcccaggctggagtgcactggcgcaatcacagctcaccacagccacaaactcctggactctggtaatccttccaccttagcctccggagtagctgggactacaggcacgtgccacaatggctggctaatcctttaatttttgccgatacaagatctcgctgtttctcgggtcgacaatttcttttcttttttttttttgagacgaagtctcgctctgtcgcccaggctggagcgtagtggcgcgatctcggctcactgcaagctccgcctcctgggttcacgccattctcccgcctcagcctcctgagtagctgggactacaggtgcctgccaccatgcctggctagtttttttttttggatttttagtagagacggggtttcaccatgttagccaggatggtctcaatctcctgacctnaggngatccacccgctcancct

SEQ ID NO: 1406 - DNA, 732 bp, Homo sapiens
  misc_feature (667)..(667): "n" may be a, t, c, g, other or unknown
  misc_feature (723)..(723): "n" may be a, t, c, g, other or unknown
  misc_feature (732)..(732): "n" may be a, t, c, g, other or unknown
cgcatggtgcgccgcacccactgtcccgcacccactgtccggcactgcccagtgagatgaacccggtacctcagttggaaatgcagaaatcacccatcttctgcgacactcatgctgggagctatagactggagctgttcctattcggccatcttggctccaccctcatgagacttattcacaatcatgagaacagcacaggaaatacccgccttcatgattcagtcacctcccacggggttccttctgcgacacgtggggattattacagttcaaggtgatatttgggttcagacacagagccaaaccatatcagctaggaaatgaccgtagagatgaaaagatattgatgatataaataatttcaataaatatatagggttggtttgatcagcttgaattttaattgttgaagatcacaaaggttacagacagcatttttgagagttaaagtgacatttttcagagattaccatgaacagtaacaactgtgaatagccaaaattaagctgaaacataagatttgtgttgggttctaagatagttagtgctgcaaagtcatgttgaggtgatgatctcagggatttttaggtgtatcctctgtgtatcttcaggcctgcctcttacttcgtggttccctaattgccattcatcctgcctgtatcanggaccactttacccgtcttctctgaagttcttgggtattttatctgaagtttggtnttttttttn

SEQ ID NO: 1407 - DNA, 695 bp, Homo sapiens
  misc_feature (684)..(684): "n" may be a, t, c, g, other or unknown
  misc_feature (689)..(689): "n" may be a, t, c, g, other or unknown
  misc_feature (691)..(691): "n" may be a, t, c, g, other or unknown
agcagagtccggctgcctggggcgggcggcgcgtgtctgcagctgctccgggtagcccgctaggcgcgccgtccccagccccgccgccggccctcggtgcgcccggccgcctgcacccccaggagcagctgctgtgaataaacacagaagtggagctgggggactgattagaagcctcattcagtgcacctgggccccagcaggcccagccaggcgtggaggaagaggcattgaggactttccttacctgtttttccagctcacccactgccagcagagaatgctgtccagtttcaacgagtggttttggcaggacaggttctggttaccacccaatgtcacgtggacagagctagaagaccgggatggccgtgtctacccccacccccaggacttgttggcagccctgcccctggcgctggtcctcctggccatgcgccttgcctttgagagattcattggcctgcccctgagccggtggctgggtgtgagggatcagaccaggaggcaagtgaagcccaacgccacgctggagaaacacttcctcacggaagggcacaggcccaaggagccccagctgtctctcctggccgccagtgtggcctcacgctgcagcagacccagcgatggttccggagacgccggaaccaggatcgaccccagctgaccaagaagttctgtgangccancntgga

SEQ ID NO: 1408 - DNA, 793 bp, Homo sapiens
  misc_feature (37)..(37): "n" may be a, t, c, g, other or unknown
  misc_feature (53)..(53): "n" may be a, t, c, g, other or unknown
  misc_feature (423)..(423): "n" may be a, t, c, g, other or unknown
  misc_feature (576)..(576): "n" may be a, t, c, g, other or unknown
  misc_feature (669)..(669): "n" may be a, t, c, g, other or unknown
  misc_feature (708)..(708): "n" may be a, t, c, g, other or unknown
  misc_feature (754)..(754): "n" may be a, t, c, g, other or unknown
  misc_feature (775)..(775): "n" may be a, t, c, g, other or unknown
cttgtctgctataaattaccagagataaacatgtcantagcatgattttttgntagtaaaacttttagatgattgtgcatttaaatcttaataaaatctttggatttctgagtcaaagaatgtgtaatttcaaatacaagaaattaacatttcttaattgacttctgagacagcagtgcacaataatgaaaacaggttaagattcaaagggtagggttggagaaagaagaattaggaaatgtggagaaagtttggtggatgataaaaagtctctattatgttacacttagctgtacttgattttgttctttaaatacctacaccgtccttgggaaacaaattatttaacatattgtgataggctgaataatgtgctgcccaaagtaactctgtcctaattcctagaatctgtgactatgttgntacatggcaaaagggactttgcagatttgattatgttatggaccttgagatggggagaatattctggattgtttgggtggacccaatgtgatatggtttggaagtgtgtcctggcctaaatctcctgttgaattgtaatccccagtgttagangaggggtttggtgggagttgagtggatcatgggggcaaattttcttcttgctggtctcctaatagtgagcgagctctcatgaaacctggttgnttaaaactgtgtggcaccttccccttctctctcttcctncttctcttggccatgtaagatgtgcctgcttccctttgccttcttncatgactgtgaaattcctgangccttcacaggcatgctt

SEQ ID NO: 1409 - DNA, 859 bp, Homo sapiens
  misc_feature (715)..(715): "n" may be a, t, c, g, other or unknown
  misc_feature (757)..(757): "n" may be a, t, c, g, other or unknown
ctgctagcttgaagtacaagaaaatattagtattctactatttatcttgcattaaaacactttaacattgaaaacgtgggactaatcaaaacaatacagttttttcttggttgctggctgacttgacccaagtcactgctcaaactctgttttcataatatgatggttttggtgtactcttcagaagacaaatgtctgacttgcgggaaaaaaacaaacgtttagccatttgcaaacaaattgtctctttgcaattgtctaatatatgcacagcagccagtagaattcccctttttatttttttttccccgcagaccatcttgattcaaaacatctatcgtaatccccaaaacagtgcacagacggctgacggctcacactgtaagtcccacagttggagaaatttttttaaaacaatggtgttaaagagcccactcttaattgagacaaataatgttggcttctgagctgctgacatagagctgttgcaaacaggacaaggtgctggaactccttggcgcacacagcaagaacttgatacttggccacgttcaggaggcttatcccttctagggagggtcactggcccggccacctccattgattgacatttgtcatgagagcaggtccgtccatgtgaaacggatttcaacattttgagccattcattggtctttacagtgactgaacccctggcctttattaagttctttgngtaaaattaaaactcttaggaatattaaggaatcaataaggnaagttgcccagtaagtgtgggtttatttcaccattataattttcctccagaagtggagattcatgatatgtaacaatggattctctaatacagaattttttc

SEQ ID NO: 1410 - DNA, 754 bp, Homo sapiens
  misc_feature (700)..(700): "n" may be a, t, c, g, other or unknown
  misc_feature (731)..(731): "n" may be a, t, c, g, other or unknown
  misc_feature (748)..(748): "n" may be a, t, c, g, other or unknown
tattctgccttctggaaaattgccttaactttaacttcaaacatttgttgatttttttttttttcagttcttattctctggtcttattggttcctctgcataaggatgcagtcttttatctttacagtttctttgacattttcctctgtcccatcattctctgtttctcaccacttctgtttcattttggtctcaatctttaatattggagacattcctcaaatgcatgaagatcctcagtggtcatttatatttaaaagatgtgaaaagctgaccgaaagctctgggtgtgaagtcagagctcttgtctattggtaaactatgctgtaggaaatcttcatatcacaatttttctttaggttagttttgttttctctagttttgaatcctttccagaggaaatctatagtcttctctgtgggggctgcttatgttttagagaaatactgaagaaagggactttgggtctctttagagttgcacataatcttctggttttagtcatatctacttctgtatctattgaagtccaaagcatcttgagtttagtttttccagaaattatgccttctgatttctgcatgattgggaagtcactgagtacaccaactggagttggagacctggaattccagtagttccaggaacctcctagtcctgaacttaatggggtttcatgagaattgactggcttctttangcccttaaatttaacattcctcacctctggngagggttttgggttggnggttgg

SEQ ID NO: 1411 - DNA, 860 bp, Homo sapiens
  misc_feature (838)..(838): "n" may be a, t, c, g, other or unknown
  misc_feature (853)..(853): "n" may be a, t, c, g, other or unknown
aaaaattgtaatttgaaaggttttaggatgctaaaatggagcaaacagtctctgttatgcctgggtatttggtttgctttatttgtgatagaacatggaaatattttaaaactaagatttgttgaaaaccccttattattaatattgttgtgttaaatgtataactattgaactgtcagtgaaatatgacacattttatccagtgacattttaaatgaatctcattgtaggggaagcctgtgggaacaccagatgctggcgcttatttccgtgtgcttgcagagcatggagtagctgccttgtttacagcaccaactgcaattagagcaatccgtcaacaggaccctggggcagctttggggaagcagtactctctgacaaggttcaaaacattatttgtggctggagaacgatgtgatgtagagaccctggaatggtccaaaaatgtcttcagagtacctgtcttagaccattggtggcaaactggtaagcattttcctagcatgtacataaatagtaaagaaatgttccaaaaagctgcaaggattggaggaaacttttgagctacgaccagcagatcagacacaaactcgggattcgagtggttcaggtttcagtaaaaataagcaatttttttattggtgtgttattaataatgtcttcataagtgacattgatgccaccattctcttggtccctaggtataaagcactaaagacctctttatcttctcttctttggttcttatatctggtaagttactaagtctcagattttcttttgaagtgtctgtgggtcattcaccttcagtattccccttgcctttgagctctggcanctgcattatctctgnccgaatt

SEQ ID NO: 1412 - DNA, 729 bp, Homo sapiens
  misc_feature (527)..(527): "n" may be a, t, c, g, other or unknown
  misc_feature (669)..(669): "n" may be a, t, c, g, other or unknown
  misc_feature (691)..(691): "n" may be a, t, c, g, other or unknown
  misc_feature (694)..(694): "n" may be a, t, c, g, other or unknown
cggtttccatttcagtttgtcttagagtttccatgtctctgcctacagtgggcatcagtttttgaatgtcgtgtagttttttccattaaagcccttagcacattaattatagttactaaattctcacagtgatgattccaaaatctctgccatatatgagtctggttttgatgcccgcgttgtcttttcagactctgttttttgcctttagcatgccttgtaattttttttttttttttgataagctggatgtgacataaggggtaaaaagaactgagataaacaggcctttagtgtggcctagaggcctatctggctaggagttaggctgtgtttactgtttgatgtagctttggtgtcagagattaaaatttcctctcgtgtaactgcttttgtctcctttgttgtctttgggtttccctaataactccttcataagtaggttccgaggcttgtagttatttaagctgtaagtccctgttattacacaggagccctattgatgtggtgtgtgtgtgtgtaaaagngttctataatcttatgattagctcttagtgagcctgtgtctttggactgtgaccttcatgagtgctttttagctcctgcaacctttacctcccaatacttaagtgagaaagtaggaaggctgggaggcggctggagttttgnatttctcttcccacaagttggntantttggtggataacaaactggaatgggaaacctcgg

SEQ ID NO: 1413 - DNA, 742 bp, Homo sapiens
  misc_feature (690)..(690): "n" may be a, t, c, g, other or unknown
  misc_feature (737)..(737): "n" may be a, t, c, g, other or unknown
  misc_feature (739)..(739): "n" may be a, t, c, g, other or unknown
gtttccgctggcggcggcggcggcggcggtgccggagcgcgagcagagcggagacccccaggtcttgcgggcgcggaatatcctggaaccttcttttgtttgtcagcagccaaggtgtttccaggaagttcagagagaacagaatttaagaagtgcaacatggccaggggctgcctctgctgcttgaagtacatgatgttcctcttcaatttgatattctggctctgtggctgtgggctgctgggagtgggcatctggctctccgtgtcccaaggcaactttgccaccttctcccccagcttcccttcgttgtctgcagccaacctggtcattgccataggcaccattgtcatggtgacgggcttcctcggctgcctgggggccatcaaggaaaacaagtgcctcctcctcagctttttcatcgtcctgttggtcatcctcctagcagagctgatcttactcatcctcttctttgtctacatggacaaggtgaacgagaacgccaagaaggacctgaaggaaggcctgctgctgtaccacaccgagaacaacgtggggctgaagaacgcctggaacatcatccaggctgagatgcgatgctgtggtgtcactgactacacagactggtacccaatgctgggggagaacacgggtcccgaccgctgctgcatggagaactcccaaggctgngggcgcaacgccaccacgcctttgtggagaacggctgctatgaaaangngaa

SEQ ID NO: 1414 - DNA, 836 bp, Homo sapiens
  misc_feature (723)..(723): "n" may be a, t, c, g, other or unknown
  misc_feature (754)..(754): "n" may be a, t, c, g, other or unknown
  misc_feature (827)..(827): "n" may be a, t, c, g, other or unknown
  misc_feature (835)..(835): "n" may be a, t, c, g, other or unknown
cggagggggcgggctaacattcaggtttcttcattctcacagatcaaaattggatacctcattatttttattttcatgtctaaaatcatgactggggccaagtatgtcttcaaatgtttattggccattcttaaaaataatgcaaactgccaatttatatccttcacttgtttttctattaagctcattttttcctcttgatttgcagtagctctttgtgtacaaaggattttttttggcctgtcatttgtactgttgatattttctcctagtagacaatttgtattttgagtttgaataaaatttttgctttgtagaatatttaagtttttgcagtcaagtttatgagtatttttatttttggcttttggttttgtatcatatttagaaagggcatctctggtccaaaattatgaaaatattcttcactgttttcaaggagtttataggttaattattatatttaaatcactgattcatctggaatttattttgggagtgggaattgaggtaggggaaccaactttaagtacattaatattttgatgaatcattgtagagaagaaaaattaaagccttcctaatggtagttaaaaaaaaaaaagaatttgaagattcttggaagcagagtttgatttcctgatatattctctggttagcttcaggaatactgactaatctattaatattagaatcaaaataaataataatttagaagtttangcctggaggatttcttatttgagaaaatggngatgaaagtgctattacccctcatttatatcctaacttgcatgaccactaggggaatataatttaaccctggnacagaccnt

SEQ ID NO: 1415 - DNA, 844 bp, Homo sapiens
  misc_feature (693)..(693): "n" may be a, t, c, g, other or unknown
  misc_feature (787)..(787): "n" may be a, t, c, g, other or unknown
  misc_feature (805)..(805): "n" may be a, t, c, g, other or unknown
  misc_feature (808)..(808): "n" may be a, t, c, g, other or unknown
ttgatacttattttggggcccctgtgatgaggcactatcttggctacccggtggctgtaacatggacctgccaaaaagaacctcatagtttagtggggaagacatacccaagaggacaatttagaactctgtgcaaagtaaagtattctagttttgcacaagatttcgaaggcaaaacttggcagattttgtcaatactaattaggtgaatcctttaaaacttcatagacaggagtaatggtttgttttgcggttttgttttgttttttatacatcgtttgatggcagatcattctgaaagtcgttgttgtgtatcattgcatgtctggtgtcatgagataggcagaactgtggggtagtagattaattttctatggtatggtgtgtgactgttcttcaaagacagcttctttctgcctcccttatctctggtccttaagatggcaataaactctggggcctaagataactccagttcttctctggggctatcaacactgtctttggtttctaatactgcagtcatgaccagttttctgtatccttttcacttactgttacccactttgccttgtcttcaccctgtcaaaacaccggtctccctttcagcagtcagtctcattcccttttgactttacagtctcttatttggcaatctcatccagtttcttgcccacagttactgctatcctnccccagaccttgaacatcagtcttacaggtatccttttcataggaaaacagaaattaaagacttttaacttacttggtcgtggattctggaaanggaaacaggataaattangcntagtaaattgaaggatgggtaagtcctacttatagc

SEQ ID NO: 1416 - DNA, 787 bp, Homo sapiens
  misc_feature (718)..(718): "n" may be a, t, c, g, other or unknown
  misc_feature (758)..(758): "n" may be a, t, c, g, other or unknown
  misc_feature (762)..(762): "n" may be a, t, c, g, other or unknown
agttttgctccgaaagacttaccgaggagggagcttgcggtgcgttctgggaaagttgctgggccagctcctttgtttccagtctgagcgttgcgttcggtttcccgagggtcttctgaggcaccgcggctgcgggcttctgagttcccggctctccgcagggaagcctcctcttcgtacctcgttttttggctcgtggggggtcctcccaccgctggccgacgcagccagcatgtccggggtgcgcgcagtgcggatcagcatcgaatcggcctgcgagaagcaggtccatggggtgggcctggatggcaccgagacgtacctgcccccgctgtccatgtcgcagaatctggcgcgtctggcccagcggatagacttcagccagggttcgggctccgaggagggggaggcggcggggaccgagggggacgcgcaggactggccgggcgccgggtccagcgcagaccaggacgacgaggaaggagtggtaaaatttcagccttccctttggccttgggactcagtgaggaacaatttgagaagtgccctgacagagatgtgtgttctctatgatgttctcagtattgttagggataaaaaatttatgactcttgatcctgtctctcaggatgcacttcttcaaaacaggtatttgtggactttaattgaataataaaattttatttattaaatcccaggaccctttttttggctttgngcttggtggtccattttcctttctttgcaaaaattaagtncccnatgaagaattaaaggacttaactgg

SEQ ID NO: 1417 - DNA, 802 bp, Homo sapiens
  misc_feature (624)..(624): "n" may be a, t, c, g, other or unknown
  misc_feature (745)..(745): "n" may be a, t, c, g, other or unknown
  misc_feature (763)..(763): "n" may be a, t, c, g, other or unknown
  misc_feature (787)..(787): "n" may be a, t, c, g, other or unknown
ttttttaaaaccagtaacaaaggagaatagtatccttaacaggataaaattatctatgtcatgtcaacagaaggaatcatactgaattgtgaaatattggaatcatctcccctaagatcaggaagaaaacaaagatggctgctatcaccattattatttaatgttcttctagaagttttggacaatgtcatattatatgacttagaaataagaattataactatctgaaaggaagaaatgaaattatcactatttggaaatgatagaattatctacctagacaaaaggtttaattaaaaaacatttggaattaataagaaaatttagcagaagatctagttaaaagataaacatcccaaagccaaaaattgtgttatataatcatctccaataagaagctgtgacagaaaaaagatctcattcaggagagcaataaaaaacagaatatctagaaataaccttaaaataatttgacagtaatttgatggaaagacctactgtgaagtgggtgttctgaattatgagagttatatgaataggaaggaatggcatctaatggtatcaccccttaaatatttctgtcaaatcataacctagaagttatctcttactcttctttcatgnttcatatctaatcatccctaagttccccgagtccccttttcattagcatgcaaattaattcctatcctaccctatggttccttcaattttagacctttattatttctaacctagactttgnaacctctttactcccagncttttccaatcatctatcccttcntaccactactggcca

SEQ ID NO: 1418 - DNA, 766 bp, Homo sapiens
  misc_feature (676)..(676): "n" may be a, t, c, g, other or unknown
  misc_feature (678)..(678): "n" may be a, t, c, g, other or unknown
  misc_feature (746)..(746): "n" may be a, t, c, g, other or unknown
aatagggtacgagacaagtttgagtgtcgttgcactcacgtggtgagctgcatgtgtcgtgggctgagtgctagtattggtctgtgatggattgggatcagacccttgtccatgaccataaaatcttgagcaatattgcagcaagccaaatggcaaagatgactatgtgccccaagaccacacttttttttcctatagtttttttaagagagacacggcctcgctctgttgcccaggctggtcttgaactcctaggctcaagcaatcctcccatctcggcttcccagagtgctgggattacaagcataagccactgtgccaagcctccctaaatgtttaaatcttgtcattgccaccattctgcaagatttacctttgaatctagaaaagaacttggagtctttctactaggcctatccccacaccacttcccatcatagaggtgaagaacctgaggccgggacacaccacaggactctcagaatgacacagccagtcagattttcctggcacaaaacccagtgttctttcaaagccaccattcttttcctgtaactaatgcaaaagcaaatcttagcccatgacagggaatcacagattccaaatgagtgccctcagaatgactggtttccttgaaagcagctgtttcataaacatgactttgcgggggcagctnangccttccatgcagtggagtctgctggtcttggggctgctctgttaagcaaaggatgggaaccaaaggnctgacattttaatattagcc

SEQ ID NO: 1419 - DNA, 845 bp, Homo sapiens
  misc_feature (706)..(706): "n" may be a, t, c, g, other or unknown
  misc_feature (814)..(814): "n" may be a, t, c, g, other or unknown
  misc_feature (841)..(841): "n" may be a, t, c, g, other or unknown
  misc_feature (843)..(843): "n" may be a, t, c, g, other or unknown
gttttcaaagaccctctataacttatttcatgaggaccctgaagaagaatcattatatcaagccattgctgttgtaaccagccttttactcaggatggaagaagttggaaggaaactacatagccctacatcatcagccaaaggattctctggtactgtctgtggttctggaggacccagtgaggaaaaaacagggagccacttggagaaagatccttgttcctttagggaggaacctcagtggtcatttgcatttgaacagattcttgcatcgctgttgaatgaaccagcattggtgaggttttttgagaaacccatagatgtaaaagccaagctggaaaatgcaagaatttctcagttaaggtctagaaccaagatgtaaatccctaggaattgcctatcatagacaagtttactaacattcctgtagctgtcagtttgattcctgtgagtagggctcagggatttatcttgttaccaatgtgtctgaaggccaaaatatatatccagaagcacaatgcatcattcctttgttgttgataatgggctttgttagcactttttaaaacaaacaaacaaacaaaacaaaaaagcaaaccacatttgttatctcaaattttgatgatattctcaaatacaaatatacttttttatatttcacaatatatgcaatatcaggggaatatgctaaatggtaccaccaganggcacaagcatatcacttttagtaaggaaattactaagctggggttgctatttacatatgaattactggattattttgaaaaagacggggttatggccttggtggtantgaagcttgaaatggcatggctatcgntnaa

SEQ ID NO: 1420 - DNA, 851 bp, Homo sapiens
  misc_feature (713)..(713): "n" may be a, t, c, g, other or unknown
  misc_feature (724)..(724): "n" may be a, t, c, g, other or unknown
  misc_feature (733)..(733): "n" may be a, t, c, g, other or unknown
  misc_feature (825)..(825): "n" may be a, t, c, g, other or unknown
  misc_feature (829)..(829): "n" may be a, t, c, g, other or unknown
tttatgcatcatggtttgatatatgcttgaaatatttactaaattagatattgctgcatgtggtccatcccacatataaatggaaaagagaaacttaacatagttcataaattaaaatatttggtttcagctgtattcatattgaaaccataaaagaatcagaattactgtgggtttatgattgtcaggttaccaccatcactacaaattttctgataacaacatattagtattctgataaggtttgtggcttctttgcaaggatatttgaatactactcaacacactacataatggttaactattgttgtctttattttaaggaaggcatgaatattgttagatttgcccctaagtaattgagtgatcatttttatatacaagaaaatcagagtagaatgcaaaatttggaacaggaactcaataatacttataaataagttgattcaaagaaatgtttcaatttcttgacattgaattcatgatgttttgcttttaacatgtgatttttaaaaaatactgttatgtgtacaggggaaggctaacctgagactttcccttcatgcgtattcttcctgtgcactgcaaaaggaaactgtgtgactgctttccttcctgactggccatcacatagggttactggcagatgccaggaatccaaggactaaaggaataaagggtggtgttatagtacctgcgctaagagatactgncaaactcagangcacccctnctcctcatgcttaaccctaaaatggtttagaactcttatggataatggttggattaagggagatctgggaaatgggattggaatttaaccantganccctggggatgctactgccaaa

SEQ ID NO: 1421 - DNA, 736 bp, Homo sapiens
  misc_feature (607)..(607): "n" may be a, t, c, g, other or unknown
  misc_feature (672)..(672): "n" may be a, t, c, g, other or unknown
  misc_feature (678)..(678): "n" may be a, t, c, g, other or unknown
  misc_feature (727)..(727): "n" may be a, t, c, g, other or unknown
gtaccagccccaaaccctgccagcagtatgggggaggatgcatttctccacaccttgctgaaggatggggacttggcagagttcagtgatgttttagggttggaacattgattcctttctctctctcttttttcccttttctccttgtgcctctcttcctgtgggtgcctgagaaaatactcagcctgtatgactgtggcctgagtcgagaaggagtgctagctctgagaagaaaaggtttatttccactctcatgtgactatccatctatccatctctccatccatcagcccattggacaatatgtacccagttcctatatccagctagctactgtaccaggtgccaggcatttcgggaagaataagacagacaaggttgtcgtcctcatccttctgctctaccaggaacaagtgaagtgataggaagagcttttcctcaaatagctctgagttgtcccaagtccagcctccagatcagagaccgtggttagggccctggaggatgcccacagcacctcccatgtttgcatgctaactggaggctgcctcttcaggtgtgaggaggcaactgtgcaggtggggcaaggctgcctttcatccccctnctttcttctccagggatctggtatgctgagtttgcttttgaaatggaggtcctggccagaggtancctggnaaatacaggtcttaatctaaaaaaacaaaacttaatgggggaaagagtnttggggaaa

SEQ ID NO: 1422 - DNA, 700 bp, Homo sapiens
  misc_feature (655)..(655): "n" may be a, t, c, g, other or unknown
  misc_feature (677)..(677): "n" may be a, t, c, g, other or unknown
  misc_feature (690)..(690): "n" may be a, t, c, g, other or unknown
aaaaaatacaagctaagcaacttgtcctctgttgtttcctaccactaagtttgcattagaagagactggcagtcaaacacacaagaagaaacacaagtattggcaatttaacagaaacaaatggtagtgtatcatggacatctaaggtttgtagggctaaatcataccctcttctagtaagtcctgaaaaaaatgtatttaaaacatatgttgaagaaaatagcttttagaggggcagataataggctttggacttagaaattttataaaaatccattgtgcattctttaggcttctagtcctattcagtttttgctatgagctatgatttgtttgtggaagcaaagtaaaggcagcctatttcttaccgcctccacttcggctgggtcataccagacgttgatgtagggatgctgtaaggcgtcgtccactgatattctttttgctgggtcaatcactagcatctttgacaacaagtccctggcttggctggctgaaacaataaatgagaaaaacaattagtaagattttgatttcagtaaggaaatttgtcagagaggaaatttaagaaaacaaagtatggaatagtatcttccttccaaacatcaggtaaatcccttgatgtgatggaaaagaaaatgcattttacacctgnttctttgggctctaagcctaangcttcattctgangctcttccaa

SEQ ID NO: 1423 - DNA, 695 bp, Homo sapiens
  misc_feature (664)..(664): "n" may be a, t, c, g, other or unknown
  misc_feature (674)..(675): "n" may be a, t, c, g, other or unknown
tggaaaacttatcttatcataccatccataaccctcaaagacaggttttgtggaggaggagcagtactgctgagttcacttttagttgtgctcattcctgggcttcttggataggaagggaaggctgacaggccaggttctgtctcaagcccatataagagttgagttgcaattgtagttgaagaaggtgaagctcagagaagtttagtgacctacccaacatcacacagctgcactttaaaaccagttctttatctgtgtgactccacagctgtcaggctaacaaaggactgcacatcaagtcacctatccggttttcttgtggcatttgaagggagttaagatagattgtgacattgaaacaaaggtaggcttctcatttagtgtatttgcccagaaaaatgaggacacaatacttgtgttttcttggtggcccattttactccctcttacaaacatatggctaaggtcttgaaaagttgggtgtgtctcagttgagcctttcagagattacttatcctgccccattcacctctcccctgtggtttcagtcctccaggactgtggggaccagtacccctcacccccgtgactggttatactcaccgttgagagagagggggcaggactccttcgggccaggctaatccaaactattctctangtgggtgtannggggtaaggggactgctgta

SEQ ID NO: 1424 - DNA, 811 bp, Homo sapiens
  misc_feature (593)..(593): "n" may be a, t, c, g, other or unknown
  misc_feature (666)..(666): "n" may be a, t, c, g, other or unknown
  misc_feature (677)..(677): "n" may be a, t, c, g, other or unknown
  misc_feature (766)..(766): "n" may be a, t, c, g, other or unknown
  misc_feature (786)..(786): "n" may be a, t, c, g, other or unknown
  misc_feature (809)..(809): "n" may be a, t, c, g, other or unknown
ctaataaatctggtcagttttaaaatttcttattgaatcagttttagtaatatgtctttataagaatttgttccttttgtctaattttttagtataacattgattattattcccttataataatatttttgagatctgttctttatttctgatttggggattttgtatcttccctttttcttggtcagtctaggtaaaggcttatggattttatctttttaagatcccagcttttagttagttttattgattttctccattattctcatttaattaatttctgctctgatctttattattccattccttcttcttactttggctgtaattcacttttcattttcttggttcttaaggtggaagcttagatgattgatttgaaacctcttttctaatataggcatttaaagctatacatttcctgctaagcagttttttagcttcacaccataaattgcgatgtgttatgattttgttttcatttagtttaaatatattctaatgtctttcatgattgtttctttgactcttgggttatttaaatgtgttcttaaattccaaatattgaagatttcccaatttcttcctgttgntgatttttaattctgttatgattggagatcatactttgagtggcttcagtccgctgaatttattcagacttgntcttatgtggnctcacatatagtctgttctgccagtggtctctatggccttaaaaagtcatgtattcacctggtactaggacagtgtgctggaaatgcanggcaattgggtgatagttgncaaatcggctttgcttctatcantg

SEQ ID NO: 1425 - DNA, 872 bp, Homo sapiens
  misc_feature (106)..(106): "n" may be a, t, c, g, other or unknown
  misc_feature (157)..(157): "n" may be a, t, c, g, other or unknown
  misc_feature (182)..(182): "n" may be a, t, c, g, other or unknown
  misc_feature (349)..(349): "n" may be a, t, c, g, other or unknown
  misc_feature (451)..(451): "n" may be a, t, c, g, other or unknown
  misc_feature (470)..(470): "n" may be a, t, c, g, other or unknown
  misc_feature (549)..(549): "n" may be a, t, c, g, other or unknown
  misc_feature (861)..(861): "n" may be a, t, c, g, other or unknown
  misc_feature (870)..(870): "n" may be a, t, c, g, other or unknown
aacttagacgatttctcagaactggtgttctcttgtacacagtttgggaatgactgcttggtacacttgttgttatttctgaaaattgatattaaaataataattnatgtactaccacttgaattcttttatcagttaatccttcttccttcttgcngatagtggagggctaagaaaagcangaagtcatgaatgattgagaaacaaataaatgccacttatctcattcctcccctgggaaaaaagaacagctttgaaatttactgtatctgtcaccaatggagaaattgatagtattgagtatatttaaaagaaaagctattagcaagatcagttaggactgcctgantgaatttccaactgttttccccatactaatgctaagccattgctagaattccttctatgtggcagtgaaaacgtaaaatgatgtcttcccattacaaatcanatgaggacaagtgagtagntattgtaggaagccagcttcgggattaatatgagggaaagtttgcaaacatagaagaacggacattgttaaaagatgtnacagagtagattaaatgctatgactgtatgatccaaaaccaggcaaccatatccatggctataaaatattccaattggaagggaacttaggataatagtggatggatttcagcttttataccaagtccaatcaattgtagaagctttctgagtgctatgtttgagggaaatccatatctcagtgggaatgaatagcatgatcaattagcaaaagatcctatttttaggaattggagatttggcagcatagggatcacctacttgccatcttgaattaagttcaattgggcattttgcaagtcggctggtggngatgcacanaa

SEQ ID NO: 1426 - DNA, 795 bp, Homo sapiens
  misc_feature (672)..(672): "n" may be a, t, c, g, other or unknown
  misc_feature (710)..(710): "n" may be a, t, c, g, other or unknown
  misc_feature (712)..(712): "n" may be a, t, c, g, other or unknown
  misc_feature (789)..(789): "n" may be a, t, c, g, other or unknown
gatcaagatgatggatatgccaattacccctatctgattactatacattatatgtattgaaacattattatgtaccccataaatatgtagagagcagtcaagggagctggcgagtacttttcccactggttattgtatatactgtgtctctaaaagctgactggtctctcccaccagctcactttctacttgagacataccatattgcagtgaggctagaatactgggaaggggaatgacagtcctttagaaaagagggtggaaccagtgtaaggaaatgtggaggaggcagaatttcactttggactcttcactcctccttttcttcattatttatcttcttccttagacaggtaattcttactcagctgtggtctaaggccctgtgtacactgagtttatagagcttctggactggtttgttattctccccatcccactccttgcttcaaatatcattccattaaaagcaggtcatctgattaaatcctgaattgtcttgttatttttttcttactcagtttagaaaagtagcaagcacaatctggtttgtcagaaaagagagggttgagagctaaagttaagtatcaggaaacgtgtgaaaaagtaagtttcatcctaggatttataaaggatgaagatcaagagctggttaggaagagttaacattgnaaacaatcatttgaaggcaattcaagcttctggtgcanangagttattattaaatatagttgtgtaaaaggaggcatggatattcacccctttagtggccataccgggattaaaatnttcccg

SEQ ID NO: 1427 - DNA, 791 bp, Homo sapiens
  misc_feature (736)..(736): "n" may be a, t, c, g, other or unknown
  misc_feature (740)..(740): "n" may be a, t, c, g, other or unknown
  misc_feature (783)..(783): "n" may be a, t, c, g, other or unknown
tgctgattaacattctcttaacaaggcacttaatctattatataattcagtgcacttaatctatgaagcagtattcacggggctttcttttgtttctcaaggccagggatgctgtcttgtacatctttgcactctccaacagtgctacatttaacaggtactagctgcactctttgaatgatgaggtggttggtgaaccattttcagctagctaagtcaattatggtgagttgcacaagatgcccatgttacaaagaataaatgctagaaaaatgatttatatatggacaaattactgaccaagacaatgtccttgtttgtacaatggacattgttcaggcagagctcatgggttgcattcacagaaagggctcattggctggtttaaacagaacccaagaagagaggggtcaatgaaggcaggactggtgaaggaaggctgtgtccagggccttatagggatgaaaggggatgagacagtggacctatggactgtgaattctgagttccagtctttgcctcttgaaatttagtgtcacttttgagtcctgtcccctccaggaagcttttcctgatccctgaaccagttaactaacctcctatgaccccatagccctgtgttgggacctttatcctggtgtgctcctgcatggccatttggttcttcctgatccgcctctagatctaagtcatgtctgtgagggctgcgctttttctggggtcatccatgtgactnccanactgccttgcacttcaagccacttggacaaatgcctgtcgaantagacgtt

SEQ ID NO: 1428 - DNA, 836 bp, Homo sapiens
  misc_feature (751)..(751): "n" may be a, t, c, g, other or unknown
  misc_feature (772)..(772): "n" may be a, t, c, g, other or unknown
  misc_feature (832)..(832): "n" may be a, t, c, g, other or unknown
tttctctgacactggacatggtcatataaaatcaggtatagaaccttttcaaagacttcaaatggattaatctcagaaaatttaggtggaatttttggatttcagattatttacttccttgtagttataattgacttggattagtaggtgcacacaatgatttttatctgttaaggtaaaagataatttttaatgtgacaaaattttctttaaaaattttaattggaaagtaaaacatttcctttaatctacatgacatacttcatccttaagctccttgagagcagagagaccctatcttatcatctctccattggtaccacataacccacaccattcctatttattgataccaataatcctttcaatgtaactagtaggcttttgagtatatgcacaaaactgtaactctactaataagctcttctgcctatgagacattatcgctttggatcatccttatttccataacagtttgttccattctgccattacaatgccaggatgtaaagctccaggggtgcaggaatctttcttttttgtttactactctatctccagcatctagaacattgtctggcacaggtaaccactcagtatttgttgaatgtatgaatacattttttttaagacacaatgacaaaatggctgcagagactgcttttgttgtatgggatgaagacctcagatttagtggcagaaaatctcaatgactgtcccagcttgctatgaatttactgggtcatcttangtgtgcccttaatctctctgngcttttcttatatatgaaatgattatgttagatctgaggcatggataaacttcatcaccnttaa

SEQ ID NO: 1429 - DNA, 811 bp, Homo sapiens
  misc_feature (735)..(735): "n" may be a, t, c, g, other or unknown
  misc_feature (746)..(746): "n" may be a, t, c, g, other or unknown
  misc_feature (804)..(804): "n" may be a, t, c, g, other or unknown
aaataaagaagaaaaagaaaaagaaacaccgagaagacatgcgaggaagacgccttaaaatgtacaataaggaagtacaaaccgtctgtgctggcctgacccgcatcagtaaagaaattctcacccaaggacaaataaatagcacttcaggacttaataaggagtccttcaggtatctgaaagatgaacagctgtgccgattaaatttgggtatgcaagaatatcgggtaccccagggagtacaaacaccttttatgactcaccaggaacattctattcgtagaaatttcttaaaaacaggtactaaatttagcaactttattcatgaggaacaccagtccaatggtggtgctcttgtccttcatgcttacatggatgaactctcatttttgtctccaatggagatggagagattttctgaggagtttcttgctttgacattcagtgaaaatgagaaaaatgctgcttactatgctttagcaatagtgcatggagcggctgcttatctcccagacttcttggactactttgcttttaatttccccaacactccagtgaaaatggaaattctgggcaagaaagatattgaaacaaccaccatttcaaattttcacactcaggtcaacaggacatactgctgtggcacctaccgagcaggtcctatgcggcagataagtctcgttggagcagtagatgaagaagtgggtgattatttcccagagttccttgatatgntagaagaatcncatttctggaaaatgactttgcctggggtcactttctagccctccgacttcagtgtangtcccca

SEQ ID NO: 1430 - DNA, 846 bp, Homo sapiens
  misc_feature (781)..(781): "n" may be a, t, c, g, other or unknown
  misc_feature (830)..(830): "n" may be a, t, c, g, other or unknown
  misc_feature (834)..(834): "n" may be a, t, c, g, other or unknown
taatgtggaatttctctgcttactgccttgtacttttgatccagctgaactaaactaactcaaatgtgtcatggtgttttcttcattttgcctgcttaactcatgtctttccagccttaaactcaatgctcttccctttgggaagagttttctgaccctccatctcttcccgtggctgatcacagcgtttattggacagggctctgcttgtcattttcacatgtgtgtccacctctggactgtcgctctagggtacagagcagcctctaccccagtgctggacaacactctgcccacacagatgggtgctccctgcgtcctgagtggactttcctgaaagagaaactgagtctggccttctcttgtttacaatttgccttcacctctgctctgaatgctcttggaggtctctagcccttctgtggtttgttgtcttttcccctcagtcttgctgcagcatctgccactgttaaacaccttcctgaaattctctcctccctgatggcctgtgacatgacacttcctttgctcttccctagcatatgtaaactctcctgtttctctccttcactggctcctccaaacccttagagatgggtcttcccacagttttgtttccaaacttctctctctgccctctcaccttctgtggcttcacctgtcacttgtgtgcagacaaatgcttcgtagtctgtgtgtgtaacctgaatccctcttctgagcctacgtgtgtgtccagcagcctgattgacatcatcacctgaatgcaagtcccagcatnctaagaaccacacattccaaaagtcagctgatcacgggtcacacactanttcnggccctaaataa

SEQ ID NO: 1431 - DNA, 856 bp, Homo sapiens
  misc_feature (855)..(855): "n" may be a, t, c, g, other or unknown
catttagttttttatcaatagatttggaccactatgcttaaagctaatcagcaagtgattctgactagcagaacacctttgaatttgagcaaacgtactgtggttccaattgttgtcactcagaggtacaagaagagttgaattaattctcagtggcctgagtaaagatctagaggcaaccactcacatattttagaataataataataattctcttggaattcttccaggtctgttttattaacttcctactttctatactaaaagaaaaaaatagattagtaatattgttaacctgatgatgatagaagacttactctttttaaacaaattttcaccctttctaacagtttagctgaacatcctgaagcaagcgagggaaaatataaagcattgcaaactcaaaagcacatataaatcaagtcacttaaaataatggactcaagaaaaaaaaagaaaacatgatattcctggtgaagcttttgttttcacaacaaaattttccctggttacagaaaaatatttctgaagtataaaaaagtgaaggcataaacatgataatgaatgacaactggcatcttcattatggggatagaagagattggtgtggtctgtggcaaaatgaagaatgcatgccctgtcttatcagacattatgctcagcttcagcagatggttatcatttggggagtcagagccggcagttttagattttacttttttccccaaagaagccaaatccagattttaacatgaaatgtccggcttataaaggtggctcaatttttggacagcatgtagaccaaacaaaatggaccataagctatttggctatgggtgcaatggagacccctcnc

SEQ ID NO: 1432 - DNA, 834 bp, Homo sapiens
  misc_feature (738)..(738): "n" may be a, t, c, g, other or unknown
  misc_feature (821)..(821): "n" may be a, t, c, g, other or unknown
  misc_feature (824)..(824): "n" may be a, t, c, g, other or unknown
agccaatttttctcagcattgtttctggacctttctgagggtgggatctgggcatcttcaatggcttaacaagtatcacagatgaggaaacagacttggagaggttaagtgacatgctcaagacaacactgctggaccgcagctgaatgcacagctagaaggttggctttcacaagtacagtctacaaaaagacctgctagagccattattgccccccatgcaggatatacgtactgtgggtcttgtgctgcccatgcttataaacaagtggatccgtctattacccggagaattttcatccttgggccttctcatcatgtgcccctctctcgatgtgcactttccagtgtggatatatataagacacctctgtatgaccttcgtattgaccaaaagatttacggagaactgtggaagacaggaatgtttgaacgcatgtctctgcagacagatgaagatgaacacagtattgaaatgcatttgccttatacagctaaagccatggaaagccataaggatgagtttaccattattcctgtactggttggagctctgagtgagtcaaaagaacaggaattcggaaaactcttcagtaaatatctagcggatcctagtaatctctttgtggtttcttctgatttctgccattgggggtatgagtattatagaacaattagaccctgtatcttttagcaattacttgaagaaataccataatactatatgtggaagacatnccattggggtggtattaaatgctatcacagagcttcagaagaatggaatgaatatgaagttttcgtttttgaaatatgcccantcnagccagtgta

SEQ ID NO: 1433 - DNA, 860 bp, Homo sapiens
  misc_feature (567)..(567): "n" may be a, t, c, g, other or unknown
  misc_feature (683)..(683): "n" may be a, t, c, g, other or unknown
  misc_feature (809)..(809): "n" may be a, t, c, g, other or unknown
  misc_feature (814)..(814): "n" may be a, t, c, g, other or unknown
  misc_feature (858)..(858): "n" may be a, t, c, g, other or unknown
gttttccactgactctacttcagctctcaaattctttatatgtagctccatcatgcctgtaactccttttgattcagacctgtcgtctcacatttgaactttggaagatagcctcctgactggtattttttattccatactctgctttattatacacgttgttgcccagaggtctctttaaagcagatctgatcattctacttctagcaaccagtggaataaagtccaaattctttggctttccataaattattctttgccctttgaccccagattatcttttgaacctattaacagtcaactgtgtattattttgtagtcactcagaatagtttattttccatgttacttcattccttggttctttatttatgctgtctatttgcatggaattgatggctgacttcatttaacttcagtaagcacttaataggtcgcaggcaaggtactgaagataaaaagtcagttaagacttcttttggggagagttggaggacagattctgatttatcctgtaaggctcatctctgatgaaacttccttgatcgaatgatttttttctcttgntatggcttttctcttttttagaaataatatgtccccttttctttttaccttttcagttcccagctgaaaatgacattcttttaaatctaattataaaagtaatgaatggttattgngaaaattttaaaatatttcagaaaatggttaaaggaaaggtgatttacaccattcagagatcacctcttggttaatttgcttaagtcaggttatttttccccaataaaaagccccttttggttcanctggnggggaaccttcccccatggggaagtttccacccaaaatcttttnaa

SEQ ID NO: 1434 - DNA, 877 bp, Homo sapiens
  misc_feature (712)..(712): "n" may be a, t, c, g, other or unknown
  misc_feature (828)..(828): "n" may be a, t, c, g, other or unknown
  misc_feature (859)..(859): "n" may be a, t, c, g, other or unknown
  misc_feature (865)..(865): "n" may be a, t, c, g, other or unknown
tagctaattagtggatttttttttttttaacatcaaatggcacagcagtatgtctaaattgcccttaaagaaatacaaaatgggccgggcatgtggctcacacctgtaatcccagcactttgggatgccaagccaggcgaatcgcaaggtcaggaattcgagaccagcctggccaatatggtgaaacctcgtctctaccaaaaatacaaaaattagccaggcatggtggtgggcgcctgtagtctcagctactcgggaggctgaggcaggagaatctcttgaacctgggaggcagaggttgcagtgagccgagatcgcaccactgcactccagcctgggcgacagagtgagactccgtctcagaaatacaaaatgagtagtaaatttatctttgaaatctgcaaaacaaatgtaccctaaatgttataaataaaggtcagtaaatttaagttaaacagtgtgggggcaaaggatttttatcatctttatatccatttctctttttttatcctccccttttacacatagatgcgaatcagtagttgttgtttttggaatttgtgacactgtgagccattggctgtgcttccatatctggtttgttggccaaactttggagctatgtcgtttttcacctctcagatactaaggatgagcttcccatacttggcattagcctctgggatagtcagccaacgttatcttcttctanggacttggtactcaacccgagcactcaataagtgcttcattcaggtcatagcttggactctgcattggtgattggctctctggctttctttttttaaatttgagaatattcacatnccagaaaatttaccggttaaaccaatttaanggttantaacctatttac

SEQ ID NO: 1435 - DNA, 630 bp, Homo sapiens
  misc_feature (581)..(581): "n" may be a, t, c, g, other or unknown
  misc_feature (596)..(596): "n" may be a, t, c, g, other or unknown
  misc_feature (628)..(628): "n" may be a, t, c, g, other or unknown
atactcaggaatatgccacttctccctgtgaaagccccaatccaggccaatcccacccatcctcttttgtttaatcctcttaaaaaagaggaatgggaggcataacctacagacccaggaaaaaaattaatcatagctaccatttgttaagcccttattatgggcgggcactatgcagatggaacctactttcttatttacgttcctaagtagggaaagcggggagtagaagagggtcaacacatagacggtgagtctcagaggttctggacagtcacagggacagagagcattttcattcctgctgtgggagagtgtcctgggccagttgggctacctggcgctggcatcctctggagcctctccaaggctgtggcccgggagcacactctagtcctccagtagcacctactccagcagtgtcttgaagatctggggcatgagttgggggcagtataattacagtgacttgtgagataggaaaaggctgggtgtgggactgaataagatgaatgaaagattagtagagtctaaaggacagagaaaccactgcttatcatagcacaccccgttaaaaagcngatgaaagggcaagnttcttaccaagcttcctttgggggttcccccnga

SEQ ID NO: 1436 - DNA, 745 bp, Homo sapiens
  misc_feature (716)..(716): "n" may be a, t, c, g, other or unknown
  misc_feature (726)..(726): "n" may be a, t, c, g, other or unknown
  misc_feature (740)..(740): "n" may be a, t, c, g, other or unknown
aagttaaaagtggatgcagaagcgagcacagacggggctaggggtttcagagaaagtaattgagagtgctggcaacagcagctgaaatatagagaagttgtaggattagctttttcgcccaaagcagcttcagcccacgttttattcccatcgagggagggagaatgggtgccgctgagtgggcgggggagtggtccctgaaaggaggtggagtgctacagcccctccccgttggctctcgctgtttgtccgttgttggtttatactaatttgacaacagccgcctgttgagtctcctccagatcgcagctgaaggatctgttgagcgcttcaggaaaggcggtgagatccggtaccgcagcagagcactctcagctctgggtcttgcaggcgcagggctcccccatgccagcagaaagatttcctctggtgaagaggaccgtcgaatctgtcctcctcaagacacctcttgtacagaatttattcgaatgccacggccaaggtcttccttgaaaaatgttaaccgatgtgtgctttttgtcttttgtcatcctttctttaggacaggcgacactaacaggtgaagatctcgggagaccatgactaagaaaagaattgctgtgattgggggaggagtgagcgggctctcttccatcaagtgctgcgtagaagaagcttggaacctgtctgctttgaaaggactgatgacatcgganggctctggangtttcaggaaaatnctgaa

SEQ ID NO: 1437 - DNA, 764 bp, Homo sapiens
  misc_feature (731)..(731): "n" may be a, t, c, g, other or unknown
  misc_feature (740)..(740): "n" may be a, t, c, g, other or unknown
  misc_feature (742)..(742): "n" may be a, t, c, g, other or unknown
cagtttgcaaagggacagaattcgtctcacttattcactgcttattgtgtgcctctcgtgttttttcttcttgtgggtcggtgtatttgatgctggttagtagagacaaagaagaaggacaaacaggataaaggtggatctttggtgtggaccctctgcactgcgaaagaagccacatcaccgccaatgtggaaaatatgcaaagtgccgttaggaagaaggaaggatatgtgtgcagcatatgaagtgccttgaatacgattaacttcccttcatgagtagtaaatagtagataactctgatcaaaaaagggattcatgtgatttatcaagctgagcaactgcgcgtctgcagagaagctggaggtcaatcttgaaatctagggcaagaggagcactaggcaattgccaggactaagaagttaatcatacccttggactgcttccatctgtctcagagtgacagcgctgctctcagcgagcaggcatgctttatagcagcagatcaggaattaatattttctgtgaaacctcaagcatcatttgcagtaacttgggttttataaaaatggaacataattttatatgaataaatcacgttcagctagaaatacgagaggctgcaaaaaattatgcttgacttaaaaaaaaagagagaggaacgagcaaaaaagccaacatgaaaacagttgttgaagcgatggccttggaggcacagatagccatgtggtnaaatgggcntntatcatctgaaaggcaacctgc

SEQ ID NO: 1438 - DNA, 733 bp, Homo sapiens
  misc_feature (372)..(372): "n" may be a, t, c, g, other or unknown
  misc_feature (393)..(393): "n" may be a, t, c, g, other or unknown
  misc_feature (421)..(421): "n" may be a, t, c, g, other or unknown
  misc_feature (513)..(513): "n" may be a, t, c, g, other or unknown
  misc_feature (607)..(607): "n" may be a, t, c, g, other or unknown
  misc_feature (693)..(693): "n" may be a, t, c, g, other or unknown
  misc_feature (705)..(705): "n" may be a, t, c, g, other or unknown
  misc_feature (731)..(731): "n" may be a, t, c, g, other or unknown
gatgtatatgtttgaagtgtgcgtgtagcattggggacaggcagaggctctgctcactggggaatgatgttctggtggaacaccccatggacttggagcttgagaagtgggctttggccaggccctggcactgaccacctaggaacagtcatcttttccaagcttctggttcctcttctgtaaggtgcgagtccctaaccacctttccaaagacagcatcctgtgcaagctgtcacgggagggggaagggccctggtgaccctcagggcctctagagcctgtgggcaagagctggccctccatgccaaggtgccaggcctaaccctggtgaagagtgacccaactgggcgactgcctgaggcctcagaggangacaaggagaaggtgcacagnagcagggtgcacaccttgccctggcctntcctagggtagaggacggtgtgagcccccagaggctgtcatccagcctgagaggtttcttggctcttcctcccatgcccagggttctcccanactgcagagcaagatccaggctccacacaatgccagaggccctgcctctatcttctctctggccagcggccctatcgctaaccccacacatganggatactgctttggcatcatcgtttgtgagggccaaggctggggaagggtggacagagtgtccttccctggggaagctgaacccanggaagatggaantggacatggccccaaaaaaccacaanaa

SEQ ID NO: 1439 - DNA, 859 bp, Homo sapiens
  misc_feature (717)..(717): "n" may be a, t, c, g, other or unknown
  misc_feature (723)..(723): "n" may be a, t, c, g, other or unknown
  misc_feature (780)..(780): "n" may be a, t, c, g, other or unknown
  misc_feature (822)..(822): "n" may be a, t, c, g, other or unknown
  misc_feature (851)..(851): "n" may be a, t, c, g, other or unknown
aaataagtatatctgtcaaaaatcatatttttatgagatgtgtcaatactggtctcgtgtcatttaggctacttggaaaaaagataaaaaaaatcctgtttggctccaaaaaggaaaaatcagcccctcctgcatgagtgggagctgcaaccctttagaactgataatcacaaacccctcagaaccaaagtgaaatgaaggaaaatatgtaacattaggcattgatggaagaggactagatcctagtgtaagcatcctaataaaaggaggggttcaaagatgctctccagaaccagtatttcagacttcctatgataaactaaatgtgccagtaccagagactccaggaaaaaccagaaatttgtttttgcaattagccgagcatgtagtccagtctttaaatgtcaattcatgttatgtttgtggaaaaactgtagtaagagtttccataagaagaacttccataagaagcccaagaattagttcctacagacccagttcctgatgaattcccagcccaaaagaaccaccctgacaatttttaggtcctaaaagtctgaattattagacagtgttgcatagctagagaaggaaaaggattcactcatcctataaggcggcttagttgtcttaggcaaaagctgtataatggtaccacaaatacagttacatggtggagttccaattacacagaaagagatccattcagtcaatttncaaggntgcagactgcttgggcccacccagaattcacccgggactggacgggccccaccaggntatactgggatatgtgggcaccagagcttatgctaaagctgnctgatcagtgggacaggtaactgggtaantggcaccc

SEQ ID NO: 1440 - DNA, 751 bp, Homo sapiens
  misc_feature (573)..(573): "n" may be a, t, c, g, other or unknown
  misc_feature (691)..(691): "n" may be a, t, c, g, other or unknown
  misc_feature (698)..(698): "n" may be a, t, c, g, other or unknown
  misc_feature (703)..(703): "n" may be a, t, c, g, other or unknown
accgagctccctcccaggcccgcgaacttggccattcagccgccgctgtccccgccgcgcgccctcgcgcctctgcctgagaagccaggcgctgttcccccaccccagaagaggatggcaaaggtggctaaggacctcaacccaggagttaaaaagatgtccctgggccagctgcagtcagcaagaggtgtggcatgtttgggatgcaaggggacgtgttcgggcttcgagccacattcatggaggaaaatatgcaagtcttgcaaatgcagccaagaggaccactgcctaacatctgacctagaagacgatcggaaaattggccgcttgctgatggactccaagtattccaccctcactgctcgggtgaaaggcggggacggcatccggatttacaagaggaaccggatgatcatgaccaaccctattgctactgggaaagatcccacttttgacaccatcacctacgagtgggctccccctggagtcacccagaaactgggactgcagtacatggagctcatccccaaggagaagcagccagtgacaggcacagagggtgccttttaccgncgccgccagctcatgcaccagctccccatctatgaccaggatccctcgcgctgccgtggacttttgggagaatgagttgaaactgatggaagaatttgtcaagcaatataagagcganggccctncggcntggggagaagtggcccttccgggggcaaggtggcttgcccaaggagga

SEQ ID NO: 1441 - DNA, 807 bp, Homo sapiens
  misc_feature (602)..(602): "n" may be a, t, c, g, other or unknown
  misc_feature (734)..(734): "n" may be a, t, c, g, other or unknown
  misc_feature (771)..(771): "n" may be a, t, c, g, other or unknown
  misc_feature (792)..(792): "n" may be a, t, c, g, other or unknown
ggtactcatgtaatgattgttactagtgtagttggtgcatagggatgggtgaccctgcaaaaaaggggcacagcaaactctatttcaggtacaaatggaccttatctttaggcaaatccttgaaattttggcagggggaatcaggttttcctgtgagttttttgtttttggcttttcatagacatctacatgaagtctctgctttagaatcttaaaactgtagcttcagaggccgggcacggtggctcatgcctgtaatcgcagcactttgggaggctaaggctggaggaccacttgagctcaggagttcgagaccagcctggctaacagggcgaaatcctgtctctactaaaaatgcaaaaattagccagacatggtggcgggcgcatgtaatcccagctacttgggaggctgagggaggagaatcacttgaatcctgaaggcagagattgcagtgagccgagatgacaccactgcatgacggaatgagactccatctcgaaacaaaaaactgtagcttcagggattcacttaaattatcatttataggccaggagaggtgtggctcatggcctgtaatccaagcactctagaaggctgangcgggtggatcagttgaggccaggattttgagaccagcctgggcaacatggcaaaaccctgtttctacaaaaaaagaattctcttgggtgttatgatacacgcctgtagagacagggtcttgggcccgggcncaatggctcacgcttggaatcccaacacttttgggangcccaagccggccggatcacnaggtcaggaaaatca

SEQ ID NO: 1442 - DNA, 756 bp, Homo sapiens
  misc_feature (2)..(2): "n" may be a, t, c, g, other or unknown
  misc_feature (687)..(687): "n" may be a, t, c, g, other or unknown
  misc_feature (693)..(693): "n" may be a, t, c, g, other or unknown
  misc_feature (700)..(700): "n" may be a, t, c, g, other or unknown
tntctctgtcacctcacccttccctgtgccacatgggccctctctctcctgccaggacgctgcggctctggggacctcggagcctgggggtggctctgggagtcttcatgaccattggctttgcactccagctcttgggagggcccttccagaggaggctacctgggctacagctccgacagccctcggccccatccctacgaccagcccttccgtcctgcccaccccggcagcgactggtgttcctgaagacacataaatccgggagcagctctgtgctgagcctgcttcaccgctatggggaccagcacgggctgcgcttcgccctccctgcccgctaccagtttggctacccaaagctcttccaggcctctagggtaaaaggctaccgcccacagggtggaggcacccagctccccttccacatcctctgtcaccacatgaggttcaacctgaaagaggtacttcaggtcatgccttctgacagcttctttttttccattgtccgagacccagcggctctggctcgctctgccttctcctactataaatccacctcatcagccttccgcaagtcaccatctttggctgccttcctggccaatcctcgaggcttctacaggcctggggcccgtggggaccactacgctcgcaacttactatggtttgactttggcctgccctttnccccanagaaganggccaagagagggaatattcatccccccagagaccccaaccccccacaagcttgca

SEQ ID NO: 1443 - DNA, 755 bp, Homo sapiens
  misc_feature (691)..(691): "n" may be a, t, c, g, other or unknown
  misc_feature (715)..(715): "n" may be a, t, c, g, other or unknown
  misc_feature (736)..(736): "n" may be a, t, c, g, other or unknown
gtgtaatggatttaaatttttaggtatctttgtctactttttcataaaatgaaagaacctggctgggcgcggtgactcatgcctgtaatcccagcacttctgggaggccgagacaggtggatcacgaggtcaggagttcaagactagcctggccaagatgctgaaaccccgtctctactgaaaatacaaaaattagccaggcatggtgtcatgcacctgtcatcccagctacttgggaggctgaggcaggagaatcgcatgaacccgggcagcagagattgcagtgagccaagatcgcaccactgtactccagcctgggcgacagagcaagactccatctcaaaaaattaaaaaaaaaaaaaaaagaacccaaatggcattttccttgatgtagtcacattttttgtgatgataatgtacaggatatctagcaattatgctggacatataagcacataagatttatgaaatgattttggataatgtataaggtactggaatctggcactttatttgctacttattttcagcactttatttgctattttctgtctctgatgagtagatccccatttgtaccacagtattaatttttaatttttcttgattatcattataaacagaatcagaggcagcactgagttttcaaattactcttgctttgcttcacagttccgtagagatatctcangggtgcctgtgagcagatgctgantgaaccctgccccagtcttgnccctacctttaccccacct

SEQ ID NO: 1444 - DNA, 740 bp, Homo sapiens
  misc_feature (723)..(723): "n" may be a, t, c, g, other or unknown
  misc_feature (728)..(728): "n" may be a, t, c, g, other or unknown
  misc_feature (738)..(738): "n" may be a, t, c, g, other or unknown
agtcgtaggcgctggccgctgacatgttgaggactacgcgcggcccaggcctgggccccccgctgctccaggccgcgctgggccttgggcgggctgggtggcactggcctgcgggccgggcggcgagcggggggcgcgggcgggcctggctgcagcccacgggccgggagacgggtgtgcaggtgtacaacagcctcaccgggaggaaggaacccctaatcgtggcgcacgccgaagccgcctcctggtatagctgtggaccaactgtatatgatcatgcgcaccttggccatgcttgctcatatgttagatttgatatcattcgaaggatcctaaccaaggtttttggatgcagcatagtcatggtgatgggtattacagatgtagatgataaaatcatcaaaagagccaatgagatgaatatttcccccgcttccctcgccagtctttatgaggaagacttcaagcaggacatggcagccctgaaggttctcccacccacggtgtacctgagggtaaccgaaaatattcctcagataatttctttcattgaaggaatcattgctcgtgggaacgcttattcaacggcaaaaggcaatgtctacttcgatctgaagtctagaggagacaagtatggcaaattggtcggcgtggtccctggtccagtcggaaaagccagcggactcttacaagcgtcatgccagtgacttcgccctgtggaangcggncaaaccccanga

SEQ ID NO: 1445 - DNA, 857 bp, Homo sapiens
  misc_feature (626)..(626): "n" may be a, t, c, g, other or unknown
  misc_feature (699)..(699): "n" may be a, t, c, g, other or unknown
  misc_feature (771)..(771): "n" may be a, t, c, g, other or unknown
  misc_feature (800)..(800): "n" may be a, t, c, g, other or unknown
caaatgcagaaagagaaaaccaaatacctcatgttctcacttctttgttgttgttgttgagacagactctctgttgcccaggctggagtgcagtggcgctgtcctggctcactgcaacctctgcctcccgagttcgggtagttctcctgcctcagcctcccaggtagctggggctacgggcgcccgccaccacgcccagctaattttttgtgtttttagtagagacagggcttcaccgtgttggccaggatggtcttgatctcctgacctcgtgatctcccctcctcggcctcccaaagtgctgggattacaggcgtgagccaccacacccagccatgttctcactttgaagtgggagctaaacattgggtattcatggatgtaaagatggcaacatcagaccctgggattactaggaaggagagaggggagggagcaagggctgaaaaactatgtattgggcactatgctcactacctgggtgatggtatcatttatattccaaaccttagcatcatgcaaaatccctatgcagcaaacctgaatctaaaataaaagttgaaattattattttaaaagaaaatttacatataaccaggtatttggttcactgagcacacatgtantaaaatcttccctagagccaggcaaagcttttcagtttttagtgaggagtgcggtgtctctaccaggttcctnagacacatgatccagcttggactcttccaggatctgttggagaaacatgtaggctcacgatctgaatgagangaagggaccttctatgtacccaataaatncatcaatccttgtttcttacaatctgtttcagtgaaaagggttccttgaacacaatg

SEQ ID NO: 1446 - DNA, 843 bp, Homo sapiens
  misc_feature (649)..(649): "n" may be a, t, c, g, other or unknown
  misc_feature (687)..(687): "n" may be a, t, c, g, other or unknown
  misc_feature (789)..(789): "n" may be a, t, c, g, other or unknown
  misc_feature (809)..(809): "n" may be a, t, c, g, other or unknown
  misc_feature (837)..(837): "n" may be a, t, c, g, other or unknown
gtacctttgtccttggactttggtgatgtggtttgaccccagctagagagtgaggggaacaacagcaaaaggcaggacaaagactgactcgtgagaggaggcccaggaacaggggggcatcgtgaatgaggaggacgtgggggcccaagaaagtgagctcttgcgcactcagtcaccagcccccttctggggtccaagctgtgtccccttctctaaagaggtaagccctgagtcatgggaagatggaaaccggggctgatgagacaggatgttttttaagcaccgtggtgtcttgttgacttgcacatgcacgggggtcttgggtaaccacagggctcagggtatttgcaggaacagttcaagtgctcacttgtcttggggctgtttatggggaagtggtttccacagtgagaggacgtgagatattgttgtcaccccggaccacacttagctacttccttctcactaaagctctgtagtcatattttccctggcagagcagaaacttctatgttatcccacagctgttctaacggtgtagacttgacttatgcaatgatgccaggagtcctgagcagcacagcccaacttcaatcacacacagatggacagagctgtattagcaaagcctgagctactgagcgatganagttcagccaggctttcagacatctggtcattcaaganagatatgcgctaaccaaggacctaaagatgtgttaatatgggtgctatatcataaggaccttgaaataaatgttcttagcctttggccaaaaggtccatgtntaggaatctatttttccatngaaattaattcaaatttgggaaaaatgnccatgc

SEQ ID NO: 1447 - DNA, 809 bp, Homo sapiens
  misc_feature (732)..(732): "n" may be a, t, c, g, other or unknown
  misc_feature (790)..(790): "n" may be a, t, c, g, other or unknown
  misc_feature (808)..(808): "n" may be a, t, c, g, other or unknown
gagctagcatcaccctgagaaagcaggctggccccaggactcacgggcgtccatgcagctgatggaggggagctggaccggacgactgtgctctcttagctctagcatcaccctgagaaagcagcctgtctccgggactcacgggcatccatgcggctgatggagggagctgggccggacgactgtgcttctcgtgcttcatgtagaacccttaggtttgcccctgaagtctgtctgctccatgtactatttagttgcttttcagcatagagcttggttttccctttttttaattgtaagaatgatgtgctctggcatgtcacactgtgaaaggggaccagatgatggagcctggactgaaagggtgaatggggccgctcacctcagaactctccctgctttgctttgctgggagcagggagcagggcagcctgggagaggctggagttcctcaaagggcagagaagaatggccttcaggggaccacagggaggaaccatgccatgatagactcaaaaagctagattatgctaataaaaaggggaagacatctgtgacacacaggaaacagtgttcgtggccttgccatagaaggcgcagtaaaggaggaaaactccggagactccctgtgaattcttggctaagaatgcacgttatctgcagtgatctaaaaacacaaacgagaacagaagtgagtggccctacctgtgagatgcacagtgctgaaccggnacccaacgcttggcttgcaaggatgggaagcttggcttgccgtattgaattggtcctngggaaagaaaatttttgna

SEQ ID NO: 1448 - DNA, 698 bp, Homo sapiens
  misc_feature (650)..(650): "n" may be a, t, c, g, other or unknown
  misc_feature (665)..(665): "n" may be a, t, c, g, other or unknown
  misc_feature (686)..(686): "n" may be a, t, c, g, other or unknown
gcactcaaaggctcaactccccacaggcgtgtgttgccaggggcagaaggcttggcccctgggtcagcatactctccggacagctcatccctgccagcccaggtccctgcagccctggggctagcacaggggatgcggacctcggcctaggtccccacagctgtggggctggctcgggggacggatctctgctaagcatggcccctgccagctcaggtccctgccactcagtggatgggactttggcggagtgtggggcccctgcagggagggtctagacaagcaacaccaggaacctgaagcctccctggccggggctcagctgtcgccaggatcgcaacagttaagctgcctgcagcaggataagtgagccgatgctgctccttaatcagggacatcgaatcggaggccttgggaggagcagccggctggctgccctgcagaggccaggtctgcccagcaaacccaggaaggtgtggcgtccccgcttcgcggccaagatggtgctggtgctgcgccatcctttgtgtgcccgggaagggcgttccgggagccggtcgggggctcctgactcgcattgggcagcatgacggtgcgccggctgtcactgctgtgccgggacctctgggcgctgtggcttgctgctgaangccggcgcaagtgcntggggcgcgggccgggtcctngccttcccggaa

SEQ ID NO: 1449 - DNA, 901 bp, Homo sapiens
  misc_feature (738)..(738): "n" may be a, t, c, g, other or unknown
  misc_feature (744)..(744): "n" may be a, t, c, g, other or unknown
  misc_feature (772)..(772): "n" may be a, t, c, g, other or unknown
  misc_feature (862)..(862): "n" may be a, t, c, g, other or unknown
  misc_feature (895)..(895): "n" may be a, t, c, g, other or unknown
cttgtgtctagcccgtgattgacattctagagataatatgagaaatattccagacctgaccttagagtttgtaatccagttgggagaaacaaagccttttatgcaaaacataattagagaaccaagcaatatcatctataatctaaaagtaaaatgtgaggtatgtttttaattccaagagcctgtgagtggttctgaagtgcaagtgtcttcttgtgtttttcagaggtttgtgtttagatggctcaggtttaatctctaatggggatagcagggaaccagatgagacctgctgaggtggccacagtactgattctagtgggcaggctgcctcccctctgatactgtgtaaggcattactaatgctggcaacagtttgcatatagccaattgccaaaagcagcctgcacatccctcctgaggctggtcccgtaaattcttctctttcctgtcgtaaagcattcctcatcaccacctcccttttcacactttatgcaaggccgtgcactgggacagcaaatggctgcaactttcactgcttgcttttcccaagtcgaagaaaagttccaacgctggcaaagcaaggacattgctattttctgacgatcgaatgtcttcgaggaactagcttcagtgctgatagggtctgtgttcctctagtaagaatagcactgtttccattagaggggaccaggatgggtagacaggcttagacgtctgattactctttgctctggnatttgnatgacagctcgggtgtctgcttaccttnctgaggatgagagccatacattatccatttaatacagccacagtgacagtgcttgataatggctacatttacctacactgggtgccctanaacattaatagttcactctatgaactcgttggngggcct

SEQ ID NO: 1450 - DNA, 736 bp, Homo sapiens
  misc_feature (654)..(654): "n" may be a, t, c, g, other or unknown
  misc_feature (701)..(701): "n" may be a, t, c, g, other or unknown
  misc_feature (718)..(718): "n" may be a, t, c, g, other or unknown
gattgtaactactgcattctagcctaagaaacagaaagagacactgtctcaaaaaaaaaaaaaaaacaagaaaaaaaaagaaagaaaaaaacagatcagaggccctggcctggggtcagtttctccagaaaggcctgcacaatggagttttcatgtaaaaaatttcttacatcctgattttaaaaaatcagatgatcaggaaacattgagttccgattcctttgttacaacctccactaaagctaagtaacagctgctgtattaagatggggctccccctctccatcccacacctgcctcccttacatgcctaactcctgttgtaaatagggaccctaatctgatgtttttgtagtccctttcctaggggcactgtggggaggtggaaggaatttcacctttgttgttggacagacttagatttgagaactggttctactacttactgtttgtgtggtctgggacaagtcacttggtccaagtaagcttctgcatctgttaaaaaaaaaaaaaaaaaaaaaagtggcggggagctaagaattcctgcccagcaagttggtttgcagatcagaggcagtgtgtgagaagtacttaacccagcacctggcatatagtagatgttcaggacatcgtagcaacaataagggagacatntcacaaaacattttgtgagaaaggatcagtttctatctagtcaatgncttaaacattcataggntggtcatggtgggaactg

SEQ ID NO: 1451 - DNA, 697 bp, Homo sapiens
  misc_feature (672)..(672): "n" may be a, t, c, g, other or unknown
  misc_feature (692)..(692): "n" may be a, t, c, g, other or unknown
  misc_feature (695)..(695): "n" may be a, t, c, g, other or unknown
gagtggggacttttgtccctttttgtcagtgggaggctgggctgggagaggaggcaaggaacagcacactgtagaaatggagagtgaggaatgggagaggcccagagctcagtatgcaagctgtgtacagcggaggttgccggactgtctctgatgggctgctagtggggtggtgctggggaaggttgactcgctaaaagaaaggctgctgcagtcacatgttatagggtacatctgtgagaattagggaaaggaaattgctccgtgtcaatgcagtcttacccagggcacatggcttggggatgatgtatgaagtggactttagttccctgggtttagttcccttgttgtgcagtgcacggcttggacaaatacatgggtggccttgactaaaaggctttggttcaaccaggtgcttttctcatcgcagcttaactcctggcttcctaacactccccatgcgaggcagccccaattcacctctaaccctgggaggtgccaggaaacagagttggagccgcatctactgcttgacttctcaatgcaaacttaactattttaaagtgtacagttcagtggcattcaataaattcgcaatgtcgtgcagccaccacctctgtctagttccaatacgttttggtattgcctcaaaggaaaccccgtacccacgangcagtcactccccattcctnctnct

SEQ ID NO: 1452 - DNA, 779 bp, Homo sapiens
  misc_feature (722)..(722): "n" may be a, t, c, g, other or unknown
  misc_feature (734)..(734): "n" may be a, t, c, g, other or unknown
  misc_feature (771)..(771): "n" may be a, t, c, g, other or unknown
tagttcaactttcccatgagagtttttggaggaggtgtctcagggttgtcagggtcggccccgcctgcctctcaggtgtgtgtgatttcaggtgattacgtttttgaagaagaaggacaagttcatcagcctggtgttgaagcacatcggcacctcagcgcttatggacctgctgctgcgcctggtcagctgtgtggagccagccgggctccggcaggacgtcctgcacgtgagtgcgggagttccccccgttcccgagggcaggggtgctgcaggaagccagctggttaagtgcaggagctcagagcaccagggcgcccggcccccatctctccacctagcgtgcatttctccgtggggctgttaggggttcttgtcaaggattgtggcctgtaccttttccactgtcccgacttaactcgctcagaagcacagagcagagaggtcccttctccccgcagtctccagcctccggctctgtgaagaggccgaaatggactttcctcgcctgcctccttttcccctgccagcgcccacccctgtggcttagagcaggaggtcagtgaggtgctagccctgcgtccaggcctgtgcctgccaggagagccccggtggacagcagttccctgcagagccccgttgtttaccctggagtgtggatgcctctgttctgatggtgtttaatcagtgagaacaggtgctacagttcccgaaaagaggangatgccccccanagaagcccaggaaatccgtgctgacaaacttctgctnctggtcgg

SEQ ID NO: 1453 - DNA, 751 bp, Homo sapiens
  misc_feature (641)..(641): "n" may be a, t, c, g, other or unknown
  misc_feature (701)..(701): "n" may be a, t, c, g, other or unknown
  misc_feature (730)..(730): "n" may be a, t, c, g, other or unknown
  misc_feature (743)..(743): "n" may be a, t, c, g, other or unknown
tcttaggcaactcacttaaccttcctggggcaatttactccctctgagatgagaaagttgaattaaataatccgaaagcatcctgtcaagctctgaaaaatgctatgcttcaaggtacacagacttctcaggaagaattcatagctacaagcatgtctttttataaagaccacaggtggttctcaggaagtttgcatattacaaatctatttcgggtttctgaaatatgtgtctctagcttttcctgactacttcttttcatctgcctggtcccatggaccaagaatttagggattccgaagggagagaggggaaagatctgcttaaaaccagaggacttgcaggaacctcttctgggccgtgggcttcatcttcccacaccgagcagagcagacctctgtgcctgccctgcagctgtaggtcttgagttacctctccttccccttcctccatctgtacctccttaagagcagggccctccctgtcagacagacctcagccagcggccctccgcaggtcctggcctgcttccccacaccgttccctgtggtgacctgcctccctgcttgttttccaggctccccttccctgcgggcatatccgctcctctcggtgatcacccggcagcccactgtcatctnccacctggccctgccaccccgggaatcgcccaggcactgtcctgccaccaggtcaccgangcggctctgctgaagccccaaggggccanggcctaccagcanccgagtca

SEQ ID NO: 1454 - DNA, 741 bp, Homo sapiens
  misc_feature (701)..(701): "n" may be a, t, c, g, other or unknown
  misc_feature (717)..(717): "n" may be a, t, c, g, other or unknown
  misc_feature (737)..(737): "n" may be a, t, c, g, other or unknown
agcttcgcgctagtgctgtttttttttttttttttttttagcaatggcggttcccggcgtggggctcttgacccgtttgaacctgtgtgcccggagaagaactcgagtccagcggcctatcgtcaggcttttgagttgcccaggaactgtggccaaagaccttaggagagacgagcagccttcagggagcgtggagacaggctttgaagacaagattcccaaaaggagattctctgagatgcaaaatgaaagacgagaacaggcacagcggactgttttaatacattgcccagagaaaatcagtgaaaacaagtttcttaaatatttatcccaatttggacctattaataatcatttcttctatgaaagctttggtctctatgctgtcgtagaattttgccaaaaggaaagcataggttcactgcagaatgggactcatactccaagcacggccatggagactgcaattccattcagatcacgtttcttcaatctgaagttgaaaaaccagacttctgaacggtcacgcgtacggtcaagtaatcagttgccacgttcaaacaagcagctttttgaattactttgttatgcagaaagtatagacgatcagctgaacactctcttgaaggagttccagctaacagaggagaacactaagctccgatatctacctgttctcttattgaaaacatggccgccgngtattttccagactgnatagtcagaccctttggctnctta

SEQ ID NO: 1455 - DNA, 809 bp, Homo sapiens
  misc_feature (767)..(767): "n" may be a, t, c, g, other or unknown
  misc_feature (783)..(783): "n" may be a, t, c, g, other or unknown
  misc_feature (808)..(808): "n" may be a, t, c, g, other or unknown
cttagatgcctacctggtgttctgttgtattgtggctgagctggcactcaaattacaagacacagtcctttccactcttccctcccctttccttctagttctttcactcactgactttataaaaaggagaatatgtccaacacattgtttcattacctagtatagttcctttaatgacacataacaaacatcttttaacataaccgttacgtgtttcttctgtaaccgtaattttaaacatctacacaggatttcattgaacagtaactttagtccctgcttcctgaacaccgaggtgctcaataacttacatacattacctccctgaggtctcttggaggtaggtatggttgctgccatcttgtagatggggaagctgaggctgagacatgcaaagccacagcctgggttcacacagctggtcagagacaggatcaggattcaagcccaggtgtgtttaccaccaaagccaaaggacttccattgcggaggaaggctggctgccccagaggaggctacagcatgtaataggaggtcttctcctgtagctctgtgaacactgtgagccagctcaggcaagaatctgccccccaaaaagatacccaaatggccaataggacatatgaaaaggcagtcagccacactagcagtctagacaatgcaaattagaaccacaaggtgatggataccactacccacccacaagaatggcttaaaggaaaaagacaggtaatatgaaagtattggagatgcttacatccactggngcaagtggcaattggnccacccctttggaaactgcttggcng

SEQ ID NO: 1456 - DNA, 700 bp, Homo sapiens
  misc_feature (649)..(649): "n" may be a, t, c, g, other or unknown
  misc_feature (673)..(673): "n" may be a, t, c, g, other or unknown
  misc_feature (677)..(677): "n" may be a, t, c, g, other or unknown
agcggcgcggagactgcggggcgggccatggcggcgaacctgagccggaacgggccagcgctgcaagaggcctacgtgcgggtggtcaccgagaagtccccgaccgactgggctctctttacctatgaaggcaacagcaatgacatccgcgtggctggcacaggggagggtggcctggaggagatggtggaggagctcaacagcgggaaggtgatgtacgccttctgcagagtgaaggaccccaactctggactgcccaaatttgtcctcatcaactggacaggcgagggcgtgaacgatgtgcggaagggagcctgtgccagccacgtcagcaccatggccagcttcctgaagggggcccatgtgaccatcaacgcacgggccgaggaggatgtggagcctgagtgcatcatggagaaggtggccaaggcttcaggtgccaactacagcttccacaaggagagtggccgcttccaggacgtgggaccccaggccccagtgggctctgtgtaccagaagaccaatgccgtgtctgagattaaaagggttggtaaagacagcttctgggccaaagcagagaaggaggaggagaaccgtcggctggaggaaaagcggcggccgaggaggcacagcgggcagcttggagcangaaccgcccggaacctgagctgcntgangcttcacgccgggagcaacgctt

SEQ ID NO: 1457 - DNA, 890 bp, Homo sapiens
  misc_feature (725)..(725): "n" may be a, t, c, g, other or unknown
  misc_feature (738)..(738): "n" may be a, t, c, g, other or unknown
  misc_feature (836)..(836): "n" may be a, t, c, g, other or unknown
  misc_feature (859)..(859): "n" may be a, t, c, g, other or unknown
  misc_feature (883)..(883): "n" may be a, t, c, g, other or unknown
acaacatcagaaacattttacctagagtgaattctacatataatcattcagggggaaaaatgtgaaaccaagtaaggattataatacttagtttattcttctcctttggcaaactttataaaggctctcaaactttgctctgaaacttgattcaaaagttgaaagatccaagcctgagttatttttgcaactactctttttgcaacatcagggaatgtttctctgtttttaatagggaaatgttaaatttccctcttaatatttaattaattttaacagagcattaaaaaaggatcttaccgattccaaattggagattgcatctctgtgctcccacaaaacccctgtgttggtttctatcacaggacacattgctcttgtcttagtgtatcaatctgtgcccttgtttgtgccaagtaccagatgataaactcctcgaaagcaggaagagtgaggtgcctacctttatgtcctagtacccagcacagtgcttggcaggtagaagttattcactggatatgtttttgctgaatgaatacatcaatgaaaggagatgcagactttaaatctacggtataaaaagggttgtaaaatacagaagcaatacaaattaattagaaaataaagtgttgacacactggatcccatttaagtgtgcctatctccatttcatttttgaagttctttgggttttgcttgagatattcattcctcctttcccagangttccctgctctncaagcaatctgagctggatcgggctgcgttggacaaggtgacttctaagctctattcgtacgttcattcagcaaatctttccaaagcgttttcttcanacccccttgggctctgaacgggnacgctcatttgtaagaaacatgcntcagttc

SEQ ID NO: 1458 - DNA, 907 bp, Homo sapiens
  misc_feature (868)..(868): "n" may be a, t, c, g, other or unknown
  misc_feature (898)..(898): "n" may be a, t, c, g, other or unknown
  misc_feature (906)..(906): "n" may be a, t, c, g, other or unknown
tacatgcaatgaatgtgggaaatctttctgcaggaaatcagtattgattctgcatcagggaattcactcagaagaaaaaccctatcaatgtcatcaatgtggaaatgcatttagaaggaaatcatatctcattgatcatcagaggactcacacaggagagaaaccctttgtttgcaatgaatgtggtaagtccttccgcctcaagacagccctcactgatcatcagagaacacacacaggggagaaatcgtatgaatgtctgcaatgtaggaatgccttcagattgaagtcacacctcattcgtcatcagagaactcacacgggagagaaaccatatgagtgtaatgactgtgggaagtccttccgccagaagacaacactctctctacatcagagaatccatacaggtgagaaaccctatatttgtaaagaatgtgggaagtcctttcaccagaaggcaaatcttactgtacatcagagaactcatacaggggaaaagccctatatttgtaatgaatgtgggaaatccttctcccagaagacaacccttgctcttcatgagaaaactcataatgaggagaaaccctatatttgtagtgaatgtggaaagtccttccgccagaagacaacccttgtagcacatcagagaacacatacaggggagaaatcttatgaatgtcctcactgtgggaaggcctttagaatgaagtcatacctcattgatcatcacccgaactcacacaggagagaaaccatttgaatgtaatgaatgtggtaaaatcattcagtcaaaggacaaatctcaatctacatcagagaattcatacaggggagaacccctatgtttgtaatgaatgtgggaagtccntttgccagaaagcaacccttactggacatnagaaaatnc

SEQ ID NO: 1459 - DNA, 736 bp, Homo sapiens
  misc_feature (718)..(718): "n" may be a, t, c, g, other or unknown
  misc_feature (728)..(728): "n" may be a, t, c, g, other or unknown
  misc_feature (733)..(733): "n" may be a, t, c, g, other or unknown
aattaaaatatccagttagtctttattttcaagttcaaaaccttattgcgtactgaaaatgcatgaactactggacacttttacaagcttactttcacaggagtctggtaagatacgtgctattctcatatttttctcactagagggaaaacataaggcatagagagagaggcttgctgagtctggcccagatcaggcgcgttcattcggccgacccttgtgctggctgtaccctgcactgtgatgctctctctgcctcccacatggctgccagagtcgcctttctgagatacagatactgtcatatttcaacttaaaaccatcactgtctccaccatggaataaaggccgctgtctggagcatgcattctcggccttgggcagggccccagcgtcctcctccggagttgggagctgctggccctgcaccgtgccggccctgggctgcccctgctgcttgcccttggagtcctgccctgctcaggctcagcactcagctgcctctgcagatgccctcctcaggggccctactctcctggccacttcactgaagaattggccatttcccgccttgtctgcaatgctttattctcagccctgtgagcctctgccagggcctggctgacaatgcttgcatctggcccctagcatctctcacagcgtcttgaaccccggtgctcaactgcctgagattgaacttaagtcaaacccacttaanccttaaaatnccaantgg

SEQ ID NO: 1460 - DNA, 695 bp, Homo sapiens
  misc_feature (625)..(625): "n" may be a, t, c, g, other or unknown
  misc_feature (627)..(627): "n" may be a, t, c, g, other or unknown
  misc_feature (689)..(689): "n" may be a, t, c, g, other or unknown
ggctggcaacctggcatcaggggaatttggctgggccactttatggagcaatgaccctttataaataaagtttaatcccaaggcaaagtgtttatcttgtagtctttaaatgttacattcttgatgtcagaagaaggcataaggagaaagtcagatcatggattattttcttctgtttggactcaccgtgcttgggaatacttctgagcattagagagcacttcattcattgcagagtctctggcctccgaggctgccttcaccatcagcagcttcagcttctgggagtttcctttccagaggcagagctgatgccttccttgtgacacagcaggatcgtcagaatgacagccccagtgagtgctgagttaatgttatgaatcttggaggacctggaattatttacactcttttgaagacagccacttcttcagtaaactatgcaaaatgggaggaaaaactatggcttgttaaaagcgctggatgatgaaaacaaatgagaataatctggcagccccggtagaaaaaaaatgctaattggtttctctctctgtttttgagacagagtctcgttctgcactccagcttgggagaaagagtgagactccatgtcaaaaaaaaaaananaaagaaacaagaaaatgtgtgaagggaaaggccaagggggtggggcttctctttccaatganaagttg

SEQ ID NO: 1461 - DNA, 826 bp, Homo sapiens
  misc_feature (645)..(645): "n" may be a, t, c, g, other or unknown
  misc_feature (783)..(783): "n" may be a, t, c, g, other or unknown
  misc_feature (810)..(811): "n" may be a, t, c, g, other or unknown
cgcatttaggtctctcatctatttcaagttaatttttgtgtgtgatctgaggtccttctcattttgtactgagtcaaactgaagagccccccacctccccagttggcctgccacactttgccttctgcatttgggtctcagctcaaacatcctcactccagggaggcctcccctgtcaatctaaagcagctgcctccctgcagtttcagtcaccaccccattttattggggccgtcagaaatggtctgacatgttgtctgttgcctcccatataagctccatgacaacagaccctgtctagcttactgccttcgtttctagcacctagcgcagtgcctgacacttagccagagctcagactattatttgaaagcttcttttggttaaaagaaacattcccagtggattttgcttaagactttgtaagtgtctctggcctcatggagttggagggctgagtgggaggggatctaccagcatcacagtcacaggtggtcactcgtcccttgccccagccatcccattacttcacaagacagccccttccatccttggacaactctgatgattagaaaattcttcctgatgttggacagagacctgcttccccatcgctggcactcgttatccactgccttcctttanggacaactggagttgaacttcacattttgacagtcctttaaatatttgaaaccagctatcggatgtctcttaaataccctcctctgggcttgaatgcttctaaatcttttcaactggtccttcctggaaccccaaaanggcttggaccttttgaccccttaatcnntgatgaaaggccctg

SEQ ID NO: 1462 - DNA, 846 bp, Homo sapiens
  misc_feature (815)..(815): "n" may be a, t, c, g, other or unknown
  misc_feature (840)..(840): "n" may be a, t, c, g, other or unknown
  misc_feature (846)..(846): "n" may be a, t, c, g, other or unknown
atcttttggagcttctcctttgtaaaatgggacaggatgctgttttaagatttaagtgcttcttatgcaataggagctcaaagagtgggagctgttgtttattaaaaataacaatatcattatcatattctctacctaaagagacctgttgaaattggacagaaaaggaacgtttctgtcttgataagtcttaaaactccagtaccaagtgcagcattcgtttcttgtgagatatttgtagaatgggtggatagaaggatgggagaggagaggggtctgaagaattcctgtagcaagctaaagaggtatcatcttccaattgagctatttttagccttactcatcatttgtaatcaaaacaatccttttcttagccttactcctcccccacccctgcccccctactacttttgcgatggtaatcgtcattgccaacttactttctttggaatacacaaacagagctgtctctttccgtcatggagattttaacagtaaaaaactcactgcaccattacctctgccttgtattccagacaatagtaaaggacattgtaacatcactgtgtcagcgcaaacaaagaactatgtaattttatcccatattaatacagtgtcacgcaggaggtactatcattagatggcaatctataaaaatggcccctgagaccaggcactggcacaattatttattcttcaattatttattcagtcctaaggatggaaatgctgacagacactgcaaaatgctctacctaccaatttacagaaattgaatgacggaatcatttggggactggaatacttttattggnccctattttaattaattaaaatctnccttcn

SEQ ID NO: 1463 - DNA, 748 bp, Homo sapiens
  misc_feature (236)..(236): "n" may be a, t, c, g, other or unknown
  misc_feature (239)..(239): "n" may be a, t, c, g, other or unknown
  misc_feature (371)..(371): "n" may be a, t, c, g, other or unknown
  misc_feature (386)..(386): "n" may be a, t, c, g, other or unknown
  misc_feature (681)..(681): "n" may be a, t, c, g, other or unknown
  misc_feature (690)..(690): "n" may be a, t, c, g, other or unknown
  misc_feature (729)..(729): "n" may be a, t, c, g, other or unknown
ggttcatgggtcaggtgtccacaaagcagacccggatgctgtgtgagccacagtcctctgcccacaaggtgcccggccttgaatgtccagcggtgactttgacctctgatgagccagcctggaagaggacagacctgtggagaagaggctcagggccccaagagcaggcctggcggggtgctgagggcaaggtggctatggcaggctttatggaggggaggcggccaggagcctgnttnggctgagcttgggcatggagtgggtaggcctctggtgcctgcagagcctcatgtaactggcatcaggactacccagttgccgccatgctcctggccccctacctgccttctccctgtgggtctctctctgtnctacacacaccccgnctcttgaaggctgtctgcttccatctgacatgcattagaccccacatgcctgcaaacccacaccagggcacactggcttgggagcagatagggttactggttcctgaagctagggagccctcctcatctcagcctctctagttagtaactgtttgaccttgaacagatcgcttgatatcattaggtctcagcttcctcatctgtaaaatgggttcatgtttagtgtgtaggctggtgagagtcaagtgaaatctctgaatatgtaaagggactttttaaaccagtgattcttggncgggcgcantggctcacgcctgtaatctcagcatttttggaggccgangcaaggcagatcaccttga

SEQ ID NO: 1464 - DNA, 798 bp, Homo sapiens
  misc_feature (749)..(749): "n" may be a, t, c, g, other or unknown
  misc_feature (772)..(772): "n" may be a, t, c, g, other or unknown
  misc_feature (779)..(779): "n" may be a, t, c, g, other or unknown
gtacaaaaggacatgatattccatgttagctatatttctctctgaaaaaaaaattccttcttttagaaaagtttatcaaacatttaatctaggagaataaactattgacaactacagaatttgttcccgcagaaaatacctaaagtctctgctcatttcatgtttactaatatttcattagtcaaagcaagtcacttaaccaagctcaaagccaagagacagagatatatatcccatctcccacattaacacatactctactgagagttacattcaagtcatatggtaaagtttatggatgtaaagttctattatagagagggagtgaagaattagagaaagtaatccggtctatcacatatattattggtttggactcagaaacaaatggtttgaataaacaacttaagaagcctgatgagttataagggacttttgtgttagtgattgataccacatttacaatcacagtctctctaatcactttcaggggttttcatcatagattacttttgaattcatcaattatggtaagcactgaatagaaaataagggtcagataaaacacagtaggttagagatgaagagtgcgaattctattccagctctatcactgagggtgaaatctcacacatttctactgattttctcccccctcagtattatgatctcaaaaaaaggagtactactcttcttttttattttttcttagtatagaaagcatacaaaaggcatttgtagaattctgngccgtagcataaattaccagganggacganttaaaatcccccacaatcg

SEQ ID NO: 1465 - DNA, 850 bp, Homo sapiens
  misc_feature (800)..(800): "n" may be a, t, c, g, other or unknown
  misc_feature (830)..(830): "n" may be a, t, c, g, other or unknown
  misc_feature (836)..(836): "n" may be a, t, c, g, other or unknown
aaacagtgaaacttgttgaagagtacaaattcccaagcctgtttattaaccaattttacccaagaccaggaactcctgctgcaaaaatggaacaagttccagcacaagtgaaaaagcaaaggacaaaagatctttctcgggtgtttcattcttacagtccatatgatcacaaggacttcagaaatgggcttgggaaccagctgagttcaggatcccacacctctgctgcatctcagtgtgactcagcgagttccagaatggtgctgcccatgccaaggctacatcaagactgtgcgctgaggatgtccgtgggcttggctctgctgggtcttctttttgctttttttgtcaaggtctataattagaatacaactaatggaaacatctataaagaagaatacatttctaattaaaatcttcaatgaacaggaaagcgacatctccattctccaagggcaataatttgtactggtcatgctgcctccttctcagccactcttcttaatgaggctccccctgtctcacattgagttgggcccattggttatttgacctaaaacctaatcacggctaccatagcacatccttcaaattaaactgcttttggtttacttttagcaagaaatgcaagcggttgcattttttctgtttgtttcaatctctaatctttaagtcagaacctaattgtcagtggctctggccatcttttcctcatgtggaagaattttctatctttaataaactttttctttggttttttttttccagatggagtttcgctcttgtcccccaagctggantggtgcaatggcacgatctcaggtcactgnaacctntggcttctgggctt

SEQ ID NO: 1466 - DNA, 854 bp, Homo sapiens
  misc_feature (839)..(839): "n" may be a, t, c, g, other or unknown
gtgcatcattttaggggttacatgatgttgaatatgtcttaggattggtagtgttaaccatgatcatttggttaagatactctctgctgggttttttcactgtaaaattaccgtttttcccttggtgcttaataaagattttagaagagatatactctgaaactgtgcaaataccctgtttttcttcaaactttcacccactgattttagcatccattggtgggtcttgctggcatcagttactgcttaatgtttgtctaatgttgattttctgttttcttcatttcttttacatttattgattggaaatcgtctgtagggaagatctgtaccttcctgatatatttattgatgattattaattatttatagctgtggactcattattaataaatgagggttttatgagtaatacttgtaaaccttaggagaggaatgttgatgtatttaacttgtaaactttgttttcagcttcttttgtgttaggtaggtacatgtatgcttgggtgtaggataaatagcaatgctataataatactgtatatattgttatatgaagattgcattttatttcaagatttcctttggagataacttttaaaacattgagatttcaaaccacaagatcactaattacttgcataacacttagcataattttctcctaaacgatatcatggtctttctatagttaacactcaaggtgattttctttattggtctctttgccttctttatttggaatttgaggcacttagtatatttttttataagttatagccacacatcagtacttaccagcatgataagcagttctttactataaaattaaagttggnaaccattaagtgtaa

SEQ ID NO: 1467 - DNA, 806 bp, Homo sapiens
  misc_feature (727)..(727): "n" may be a, t, c, g, other or unknown
  misc_feature (744)..(744): "n" may be a, t, c, g, other or unknown
  misc_feature (776)..(776): "n" may be a, t, c, g, other or unknown
ctcattttgctccaaattttaagttgcttcagaaatttaattagccctctgcttactctacaccatggaaaaaaggtaatatagtagaaattctgatagcaatttcaaaagatgtccaaaatagacattaatcattggaatgtctttcattgttaataagcacagtattaagtggtttaagttctagaatgattttaataaagtcatttatgatacttagctgtgcattccaaactgtaaaggaaaaggtaaaaaatgctacttaaaaataagctaaaaaccaagacagtcggtgaggtctgtggaaatggtagtattcatcttgggagaaacatgctactggaaaggcctggatttgtctagatgggagtcattaagactgtgggacctaaagtattcagcacaataaagcaacaggacatttcaatgttttccctggtagcctgagagagaagagggttggggttatgggacccaggggaagaccgaagacaaatctttaaagaaaaagataaatatgggtaagggtccctaaggcagtgacggcctaagcacactggtactatcttgactatcttgtggtcaaagttatttcctcttctgtgctataatcctctcctccactaatccactctgagtaaagatctgttacacaccatacccttggtcatggtgcccaggggaaatgaagaggagagtattacaggcaactggaagattaagcatnccagaccccattctgangtatcagaaatattgaggaggatactggcttnctaagattatgtggaatgggggcctacaac

SEQ ID NO: 1468 - DNA, 788 bp, Homo sapiens
  misc_feature (659)..(659): "n" may be a, t, c, g, other or unknown
  misc_feature (748)..(748): "n" may be a, t, c, g, other or unknown
  misc_feature (755)..(755): "n" may be a, t, c, g, other or unknown
  misc_feature (765)..(765): "n" may be a, t, c, g, other or unknown
tggtgttgccattaatggtagttagaaatatgaagaggaggccgggcgtggtggctcacgcatgtaatcccagcactttgggaggccgaggcgggcggatcacgaggtcaggagatcgagaccatcctggctaacatggtgaaactctgtctcactaaaaatacaaaaaattggccgggtatggtggtgggcacctatagtcccagctactcgggaggctgaggcaggagaatggtgtgaatccgggaggtggagcttgcagtgagccgagattgcgccactccgctccagcctgggtgacagagcaagactctgtctcaaaaaaaaaagaaaaaagaaaaaaatacgaagaggaggcagttggaagagtagttccatcttggccaggttcagttgctggtgggcagcctaccagagaatactcacaggcagtcgtggctgcagatggggacctgagcataaacctttggaaagatgcagtttaggacaggggaggagaagggtgatcagaagtatggggaaaaccaagagcctggatgctcaggaaggatccgccggaaggaggagtttggtcagcagcatcagatactgctgtcattttttagaaagatgaaaagagcaacagtccttggatttagtggttagaaggtagtctttgntgctttctggaggaccatgtcagtgaagacgcagaaactgcatttcgggaaaagatgtggatggtggggaagcagaatttggggcttgntagaaancttggtgcanggttgtggtggaaaggaagggat

SEQ ID NO: 1469 - DNA, 787 bp, Homo sapiens
  misc_feature (651)..(651): "n" may be a, t, c, g, other or unknown
  misc_feature (714)..(714): "n" may be a, t, c, g, other or unknown
  misc_feature (723)..(723): "n" may be a, t, c, g, other or unknown
  misc_feature (770)..(770): "n" may be a, t, c, g, other or unknown
agacggcggcggcgtggccgcacgcgcggcccggcttctgtcctcgcggcgctccggctcctggccccccacgccatgcagccgtccccgccgcccaccgagctggtgccgtcggagcgcgccgtggtgctgctgtcgtgcgcactctccgcgctcggctcgggcctgctggtggccacgcacgccctgtggccggacctgcgcagccgggcacggcgcctgctgctcttcctgtcgctggccgacctgctctcggccgcctcctacttctacggagtgctgcaggacttcgcgggcccgtcgtgggactgcgtgctgcagggcgcgctgtccaccttcgccaacaccagctccttcttctggaccgtggccattgcgctctacttgtacctcagcatcgtccgcgccgcgcgcgggcctcgcacagatcgcctgctttgggccttccatgtcgtcaggtgggtggcggtggcgctgcttttccaggagcccccgacacaggccgacccctcccggtcttgccctcccagaggccgcgtctaggttggacaccccctacccacagcaagcagtgcctgctggcgcccccgaggctgtcctgggccagcgggaggaggccaagccttgcccgagattcgctccctcccgaangagcccccgcttgtgcctgccccaaggcacagccccttggggtagtgggggacagaatttcgnccccaagancccgggccctggtttcctttgggacggggcttggggaaggacacttntgagcccccttggtgaa

SEQ ID NO: 1470 - DNA, 850 bp, Homo sapiens
  misc_feature (699)..(699): "n" may be a, t, c, g, other or unknown
  misc_feature (730)..(730): "n" may be a, t, c, g, other or unknown
  misc_feature (788)..(788): "n" may be a, t, c, g, other or unknown
  misc_feature (832)..(832): "n" may be a, t, c, g, other or unknown
gctctgcctggtggcgccgggaggctgtttttccactcactggcgcgcagactccatcccactgttttcttctctcttttctggagttagattagtctgaagccgccaccagccccaggcccccgtgcagaagaaaagcgggagggaacggcggaggccgccgctgccctgcaccgccctcctggaggccacttggagagtccggccccgaggaggccatggccacaagtgcccacagctggccccaggcggggtggagcggagctgctgggaggctgctggataggagaggggtcacggctgcggaagaggaggttcttcgggacacccgtggatggacacggcaaggaaacaccaggccaaccacagctggggataaaatagcacaaccacaccctgccgtccagcgcctcccagcctgtgccccttcctagtaccaccagcaaccatcaatcccgtctcctcctgcctcctctcctgcaatccaccccgccacgactatcgccatggcagccctgatcgcagagaacttccgcttcctgtcacttttcttcaagagcaaggatgtgatgattttcaacggcctggtggcactgggcacggtgggcagccaggagctgttctctgtggtggccttcactgcccctgctcgccggcccggaactacctgtacgggctggcggccatcggcgtgcccgncctggtgctcttcatcattggcatcatcctnaacaaccacacctggaactcgtgggccgaatgccagcaccggaggaccaagaacttgntccgccggccccacttctcttctaagctcatcttggacttgcgntgtggccctgcactgtct

SEQ ID NO: 1471 - DNA, 520 bp, Homo sapiens
  misc_feature (518)..(520): "n" may be a, t, c, g, other or unknown
aacaaatgattgatacccacaataacctggacgaatctccacagaattatggtgagtggacgaagggtaatcccaaaggttacatgtagaattccatttaagtaacattcttgaaatgaataaattataagagtggggaatagattagtagttgccaggggttaaggagggaaggaggagcagcactgaatagaaggggtcataactataaaaaggcaacatgatgaatcccggtgttgacggaaatgttctgtaccttgcttgtataaatgtcaatctcctggtactgtggcatttgcaatatttgcaaattttatttatttattcattcattcatttttctgagacggagtcttcctctgtcgcccagactggagtgcagtggcgcgatcttggctcactgcaacctccgtctcctgggttcgcaccattctcctgcctcagcctcctgagtagctgggactagaggtgcccaccaccatacccagctaattttttatatttttagtagagacggnnn

SEQ ID NO: 1472 - DNA, 860 bp, Homo sapiens
  misc_feature (663)..(663): "n" may be a, t, c, g, other or unknown
  misc_feature (860)..(860): "n" may be a, t, c, g, other or unknown
tatattccgtgggagtgacattaaagaccttactgtttgtgagccaccaaaaccacagtgttctttgcctcaagacccagctattgttcagtcctcactaggctcatcgacttcttcattccagtccatgggttcttatggacctttcggcaggatgcccacatacagtcagttcagtccgagttccttagttgggcagcagtttggtgctgttggtgttgctggaagctctttgacatcctttggaacagaaacatcaaacagtggtaccttaccccaaagtagtgcggttggttctgcctttacacaggatacaagatctctaaaaacacagttatctcaaggtcgctcaagccctcagttagaccctttgagaaaaagcccaaccatggaacaagcagtgcagaccgcctcagcccacttacctgctccagcagctgttgggagaaggagtcctgtatcaaccaggcctttgccatctgccagccaaaaggcaggagagaatcaggagcacaggcgagctgaagtacacaaagtttcaaggccagaaaatgagcaactcagaaatgataacaagagacaagtagctccaggtgctccttcagctccaaggagagggcgtgggggtcatcggggtggcaggggaagatttggtattcggcnagatgggccaatgaaatttgagaaagactttgactttgaaagtgcaaatgcacaattcaacaaggaagagattgacagagagtttcataataaacttaaattaaaagaagataaacttgagaaacaggagaagcctgtaaatggtgaaaataaaggagactcaggagttgatcccaaaacagtggaggaaatgcccn

SEQ ID NO: 1473 - DNA, 828 bp, Homo sapiens
  misc_feature (655)..(655): "n" may be a, t, c, g, other or unknown
  misc_feature (732)..(732): "n" may be a, t, c, g, other or unknown
  misc_feature (786)..(786): "n" may be a, t, c, g, other or unknown
  misc_feature (788)..(788): "n" may be a, t, c, g, other or unknown
aaataagaagaccaccattgaaaaactaaggtaccctgggtttagcttgtcatctgttctagaaatggtggctcagaggctgggtgcggtggctcaagcctgtaatcccagcactttgggaggctgaggcgggcggatcacgaggtcaggagatcgagaccacggtgaaaccccgtctctactaaaaatacaaaatatcagccgggcgcggtggtgggtgcctgtagtcccatctactcgggaggctgaggcatgagaatggcgtgaacccgggaggcggagcttgcagtgagttgcgatcactccactgcactccagcctgggcgagagagcaagactccatctcaaaaaaaaaaaaaaaaaaaaaaaaaagaaatggtgtctcagaaaatgtacagcaaactgcttctcacttcatttttttagcaaaggtcagattttctggatcataaacctgggacttggttcttttttggggggtttcttgttttaaatttctgccagatcagctgcctcctttacttcccttcaaacaacaatgtgctgcttattacataagctagcagggtgtcaggaaattccactgatgtgttttctcccacccttatattagtaatttttatacaacatggagacattgaaatattttcatcanatggggtagcttttgatccaaatatattcaaagacattatcgctgaaatgccagcttcatacaaatcatctttccangtgtcactacactgcatttctatggaccgtgagaactaatttgacaaaatagangnttttgagggaaaaaccagtatttattttttaatctcctaa

SEQ ID NO: 1474 - DNA, 734 bp, Homo sapiens
  misc_feature (614)..(614): "n" may be a, t, c, g, other or unknown
  misc_feature (711)..(711): "n" may be a, t, c, g, other or unknown
  misc_feature (722)..(722): "n" may be a, t, c, g, other or unknown
  misc_feature (724)..(724): "n" may be a, t, c, g, other or unknown
ggttcttttattaattttcaaaatagttacaggtaataatacctaattatttcattgatacaacaattgatgtaactaattcagtatagtaaagaagcaaaaaatttttgcaaagaaaaattatatgagctggtagagttttgtttctgttctttttatccttctaagataaatcaatgtgattttacagattaatactgattatagcaactcttcttggaatacatttcttccacatacgtgtgaaagagtagttggaaatctcaagtttttaataaatcacatgatcattaaaatagccctgatcctatcttggggtacaaatacttagtgtgaaatgtgccccttccctgtttcagccttctgttttacctcctcattttcatgttctcccagatgttaaaagtgatcctggtatctgattcctctgtaccccagtgcttcctgcttgttcgctcatctttcttctgctgaaagctggacttgcttcttgttttgctttctttggtcaactgggttctggagaggcacttttctgatgaggaaaccccttctgtggtgtccccgaggcccctgctgggaggggctgctgagctgtgggctccttgagcctnctcgcagaagcgggtgatgagtatggctcataaacgcaaggccatgaaaccaatcctctgctttttccttgtaagccaacgacggggcctttgattncagactctaangnagctttggag

SEQ ID NO: 1475 - DNA, 802 bp, Homo sapiens
  misc_feature (644)..(644): "n" may be a, t, c, g, other or unknown
  misc_feature (741)..(741): "n" may be a, t, c, g, other or unknown
  misc_feature (776)..(776): "n" may be a, t, c, g, other or unknown
  misc_feature (800)..(800): "n" may be a, t, c, g, other or unknown
ttagaaggtgagattagcataagcagaggtttgagggaagagtgggagcaaggagtggaggacaggaaacaggaaggagactgggctgctggtggggaggaggcaggacaggccctgtgagggcagggcaaagtgggagtcagcgttggccaaagcgagagagccccaggcagtggagcctttgatgtcaggcctgaaggcagtggggactgtcttagaattttatgctgagatgaaaatgtatgactgaaaaattggtctggtggcaggaggtgatcagagtgggtggccgcaagaggcttcctggggaatgggcttcctcagtatccgggtgcagcaggtgggccagaggcgacccatggcagcccccagtgtcaacgtgagcaagtgcaggactgtggacaagactgtgatgccatgcccggggcagagaagatgatggaaaaggagaagttgccccagatccagtggctcacagaagcactcttcctgaggaagagcttgttcttgaagtttgcacccacagcttctcctaggcgatgggcttggagagctgtggtcagcatcaagagctagcctggcagcagggcaaggatgtggctgcgagatggcatcgtggtacccactctctctcggtgcctcantgtccttgtggaggatctggcctctatgacttgagtgatggtaaagtgagatgatcccatatgcgtttgacttgtgcttcacacgggtggtgcccantaaatggaatgggtattattttgaagatccttttngggaaaaaatgtccattctttaanaa

SEQ ID NO: 1476 - DNA, 728 bp, Homo sapiens
  misc_feature (631)..(631): "n" may be a, t, c, g, other or unknown
  misc_feature (665)..(665): "n" may be a, t, c, g, other or unknown
  misc_feature (691)..(691): "n" may be a, t, c, g, other or unknown
tttgctgaggggcaggcacaggagtcctggctgagctcatggcctgaggctgcctagcggccacggggaatggttgcaatggcggaggcagaggcaggggtggcagtggaggtccgtggactgccccctgccgtgcccgacgagctgctcactctctactttgaaaaccgccgacgctctggagggggacctgtgttgagctggcagagactgggctgtgggggcgtcctcaccttcagagagcctgcagacgccgagagggtcttggcccaggcagatcatgaactacatggtgcccagctgagcctgcggccagctccaccacgagcccctgcacgcctgctgctccaaggactgccccctggcaccacgccccagcgcttggagcagcatgtccaggccttgctgcgggcctcggggctcccagtacagccttgctgtgccttggccagcccccggccagaccgggctctggtccagttgcccaagcccctttctgaggcagatgtccgtgtcctggaggagcaggcccagaatctgggcctggaggggaccttggtgtccctggcccgggttccccaggcccgagcggtgcgtgtggtgggggatggtgcctctgtggacctgctgntgctggagttgtacctggagaatgagcgccgcantggtgggggccccctggaggacctgnaacgcctacccggcccctggcactggtgctcttcaca

SEQ ID NO: 1477 - DNA, 853 bp, Homo sapiens
  misc_feature (801)..(801): "n" may be a, t, c, g, other or unknown
  misc_feature (814)..(814): "n" may be a, t, c, g, other or unknown
  misc_feature (824)..(824): "n" may be a, t, c, g, other or unknown
gatgaaatatgcgaaaaatgggttctaaaatatttcaaagggaaaatgaagtgaaggaaacatcatgaaaggggaaaggaatgaggtaaacaagtcttaggaagagagttaagaaaaaattccgctggacttggccaaagaaagaaggggatctagtatctctatgaaggaaaaaagagtaaagccctcagtgtgaacccagtgagaacactgacaaatttgggaaaagttaaatactgatttcatccaaataaagcctctaatcttaagcataccaatactttggcataccagaagacaccttagaaatcaggatagcctttgcattcattttggtaagaaaactgatgctgagaggataaattacctaaaaatcttaaaacccaggcaagttagtcaaagaatcaagattagaattcaggtttccagagacagggctcattctaatgcctcaggtcactggcccgaacaaatctgcttcacagaattccttagaaagagatacacaattctttgctgggattgggtccctggaggacaaccatactatattcttgttaatatgttttttctttttttaaatttaaacttttgttcagttgagatgattgtgaaactaggtatctttcattctgactcctagtttaacatttaattttgactcccaatgagttacgtaaaagcaaaactatactaagaatgggaaaaagaactatttctgccatttgtacatatttaagatggtttcttcatataattgaaaactgcagatgagtaagagaatgactaggaaatgagatncagttttatgacncatatgatgnttaagtcaccaatgaaccccatatttgac

SEQ ID NO: 1478 - DNA, 831 bp, Homo sapiens
  misc_feature (687)..(687): "n" may be a, t, c, g, other or unknown
  misc_feature (750)..(750): "n" may be a, t, c, g, other or unknown
  misc_feature (813)..(813): "n" may be a, t, c, g, other or unknown
  misc_feature (831)..(831): "n" may be a, t, c, g, other or unknown
gacaggaaaggggttctatccatgatcttacaattcctaaacagcaacagcatcatggacgtatttgttcctggcgtcataagcctgcatacggtaggcattcagttaataggtactgattggtctaacagaggaagctgggcttgattataaaataaactaggctatgaaatcatgcctcctaaaagctcattaaaggcagcaacacgggatggggactgtaaggaagttgtctcccacctgcctccctcctcagacacacatcattccgcagatgtgaaaacgacccagactctgcccgcatgtggcctcccggaccgggcagtagggccttgcccctaccctcatgaagactgtcggctgtgttacagaactgctgctctgtctctgactcccctcactcccatgctttgttggaaactcaagttgtgaaaccacaaaacacagaaaggaagtggtcaactactgcacatactcaagctatgtagtctcagtttattccattcttgcaggatcattgtaggaaggcataagagtcctgcttactggtgagccactgaacacaaactcccttctcacctctgccttggatcccgccatgcctgaggtctagggctagaagcgttgtttcatccacattaattccggtcttgggcaacgtggctattttctgacctgtctgtcttnccaccctagtggtgaattctctttctgggatctcaactccttctcctgtcacccagctttttncgagcaccccagtccatctggcatatcattagaatgttaaacctaaacggtaagcccttctgngaatacctttaagtaacn

SEQ ID NO: 1479 - DNA, 723 bp, Homo sapiens
  misc_feature (681)..(681): "n" may be a, t, c, g, other or unknown
  misc_feature (686)..(686): "n" may be a, t, c, g, other or unknown
  misc_feature (713)..(713): "n" may be a, t, c, g, other or unknown
gaacccctactaactgtgagctcctgaggagtcaggcctgagtctgtgggtcatctagcacatccttaatagaatgattgcctggatgtgaccaccctcacccccaaccctcacacaccctgccagcatgcctcagaccttaccccagctcaagataagtctcagattgcaggatacctgctgcagggaacaaaggtgaatgattgtcttgtgagcctcctgttgactgattctgttttacatggctgcacagagcccttgtggttatttggggttggggtggtggcttctgtattagtcacttctgcatgaaccatttcactcaggatctgaggccacagttcctttcttagtcactgatacatctggcagacttgaaattaatcagacaaacattgttcatagttaacatatccttggaagtttctcagctataaggaagaggtcttggtggctagggaggcctttctctgtatcctgttctatccagtgagagcctagagggtgctgcccagccatattctggctagcctcagcggttctcctgaaaaaaaattggcatctgacaacctggatggtgactataggtagtcaaatccagctggctggtctcctgggggttagcttccatggagctgcaagtcccctgaaatgatactggcagtgttgggacagcgtgtncgaangcctgggtttttcagaactgggctcancaaaatgtct

SEQ ID NO: 1480 - DNA, 860 bp, Homo sapiens
  misc_feature (767)..(767): "n" may be a, t, c, g, other or unknown
  misc_feature (794)..(794): "n" may be a, t, c, g, other or unknown
  misc_feature (841)..(841): "n" may be a, t, c, g, other or unknown
acagtatcaccatgcctctcatagcgccacgacactagaagaaacctcactgattgctgtccctgtctacagtccaagaggatttcaaatgggcccacacggtatagctgagaacccgaatcccttgctgatgccagctcattttctttggtctcatcctcatcactcctccaagaaaactacccagtccagagggacttgcttttgctataagtgggttagatcttgagataaggaaatagcaaaatgttggtgtaacattgagtgtggaaatgtggcctgagggaagtgagtgctggcaggagctgaggaccctgttgggagggggccgtgaaaccttggcatagacctcgccagcacagctgtttggaatggaggcaggaagggcaggggaaagccatgagagagggaattttcaagatggtcagtgttctcaatccacagccatcacagaagaaactaatgaaatatgggtacaatctggagatttttaagtctctaagaagtggaatttgtgagacgaaaggcttccagaaagctccctttctgacctggcctctacccctagagggccttagccttgctgtggggaatgaaactcttcccggttgtagggttttggtgctgtccacccccagcccagccagaaatgtggcttctgtacttctgctgcagttcaagccacttttccaggtatgtcccatctgagtggagatggggctgacggcaggccacaaggcccaagcttcgggcaccgggcccggtancttgggacttgaggcttgactggtgantaatgggcagggaggcccttttgggaaacgtgccaatacctttgacnggccttttccgggggactt

SEQ ID NO: 1481 - DNA, 832 bp, Homo sapiens
  misc_feature (755)..(755): "n" may be a, t, c, g, other or unknown
  misc_feature (786)..(786): "n" may be a, t, c, g, other or unknown
  misc_feature (820)..(820): "n" may be a, t, c, g, other or unknown
atggggacagtaacagcaaaagagagatcactaaaggaagctctaaactttatttcaaatttcaacaataacagccaccagttattgagcaactactgcatgccaagtacttcactaagtgctttgcatatttttcctcatctgttcctaacaaccccacaggttaactaataaagtccttatttacagataagtaaatagagaattcgaagttaagtaacttgttaagtaacttttctgaggtcccagccagtaaacaagagagcaaggattagtactggcaagggctctagtcaatgaactgacaaaccaagccttctttaagctttaggttcacaggcttacactgctggtgctggatccctcacatgatggtatcagactctggggaatcaaaatactgtcccagtcattgccagagagaattgagatcttcagtttgacccccggaatttttaagactctttcagaatacctcagaaacttaaggaaggaaacattttatttgactatggtaacaaacagcacaacctacaagacttttctggctctaatatggatgattcatctatggaagtatttgcttagtaaacctgacatgcttcttaccattatcttggcccagaatcagagagtaaatgctccgaagcccaaatacattgaggaagtaccaggatgcagaactcaccctggcaaagcaaaatgaaaatggtgtggttaggtattatatcagagagtaatgcagttcccacttncctaccacccaaagttggtcaagtggttggnaaagaagtcacccttgggatgggctatattcatncaaagcacaacc

SEQ ID NO: 1482 - DNA, 783 bp, Homo sapiens
  misc_feature (693)..(693): "n" may be a, t, c, g, other or unknown
  misc_feature (752)..(752): "n" may be a, t, c, g, other or unknown
  misc_feature (757)..(757): "n" may be a, t, c, g, other or unknown
ttcatgtagatatgcatgactcttggccagtgattctcaacctcggctgcacattggcatcaactggggaaccttcaaagctcctggcatgtgggttccaccctcagagattgtgatgtaatgcactgacagtcaaattgggaacaactgtaaattggctcagttcattcatcttttactgctgtacagaagatttcattgtataagtacttcacaactcatgtactgatttctagttgatgaactgtttcaaatttttgttatttcaagcaattctctaatgaatgttgttgtacttgtctccccttgaatgttcctctggggtatatactgagaagtttgaattggcacatcaaaggttgagcatcttcacctttaccaggtattatcaacatatcgttttccaaagcatttacagaaatgtgtgctcccaccacttctctgcctctttgacaacactcagtatgatcacacattttttttttgccaattttatgcatgtgaaataattttattgttttagttgtttatttatcttagagaaaaggtcttgcagtaggctcctaggctggagtgcagtggtgcgatcgtggctcactgtaacctcagcctcctgggctcggacagtcctctcgcctaggcgtcctgagtggctgggactacacttgcgcatcatcaccatgcccgggtagntcttttggttttatttttagagacagggtcttgctgtgcttgccagctggctcgaactnctggnctcaagtgatcctcatggcttgaccg

SEQ ID NO: 1483 - DNA, 795 bp, Homo sapiens
  misc_feature (641)..(641): "n" may be a, t, c, g, other or unknown
  misc_feature (780)..(780): "n" may be a, t, c, g, other or unknown
  misc_feature (782)..(782): "n" may be a, t, c, g, other or unknown
  misc_feature (793)..(793): "n" may be a, t, c, g, other or unknown
tctctccagctgcaatggaagacttgtctcttccccttctgccataattgtaagtttcctgaggcttccccagccatgtggaactatgaatgaattaaacctcttttctttataaattacccagcatcgggtatgtctttatagcagtgtgaaaacagactaatacagaagtatatgttaactttctctgctgagcatgttggtgcttgcctgtagtcccagctacttgggaggctgaggtggaaggatcatttaagaccagcctgggcaacatagggagatcctatgtccaaaaaaaaaaaaaaaaaaaaaaaaaagcatgttaaatttttcatcagagttgacagcttctcaaatggtcagtttttgttatatacattgttgaggctgtgtgttagaaactttcagattcatgaacattattcaatgttctttgtagtttgttccttttattgtaatatagtctctatccctattaatgctttttcgctactgatacctgacttttttccccttaatctttgacttgtaatatgtgagattaatctatttgaataagtagacttatttctgctctctgaattttatattttctgatccatttactttgctgtgtgtgtgttttgtttttgtttttgttnttttttttttttgagtctagctttgttgcccaggctggagttgcacgatcttggttccctgcagtctcagcctcccaggttcaagtgattgcctgggcaatctccgagtagctgggactacaggcgtgtaccaccatgngnggctaaaaatngg

SEQ ID NO: 1484 - DNA, 722 bp, Homo sapiens
  misc_feature (652)..(652): "n" may be a, t, c, g, other or unknown
  misc_feature (676)..(676): "n" may be a, t, c, g, other or unknown
  misc_feature (709)..(709): "n" may be a, t, c, g, other or unknown
aagtagatataatagggtaaaggagaagtggtggtaaagacgaaaagagtagggaacaggtggttgaaggaatcagattatccccagtagaggggaaatttatggttgtttgctttagaataaggagttagttgctgaaataaaagagcattctaatataagtgctagaagctattttaactgtatgaaatggatactgagccaagatggctgaataggaacagctccagtctacagctcccagcatgagcgacgcagaagatgggtgatttctgcatttccaactgagggaccgggttcatctcactggggagtgctggacagtgggtgcaggacagtgggtgcagagcaccgtgcatgagccgaagcagggcgaggcatcacctcacccgggaagcacaagaggtcagggaattccctttcctagtaaaagaaagaggtgacagatagcacctggaaaatcaggtcactcccaccctaatactgcgcttttccaacgggcttcccaaatggcacaccaggagattacatcctgcacctgtcttaaagggtcctacacccacggagcctcactcattgctagcacagcagtctgagatcaaactacaaggtggcagtgaagctaggggagggggtgcccgccattgctgangcttgagcaggtaaacaaaacggnccggaactcgaactgggtggagcccaccacagnttaaggaggcctg

SEQ ID NO: 1485 - DNA, 703 bp, Homo sapiens
  misc_feature (621)..(621): "n" may be a, t, c, g, other or unknown
  misc_feature (627)..(627): "n" may be a, t, c, g, other or unknown
  misc_feature (702)..(702): "n" may be a, t, c, g, other or unknown
atgaaatgcttaggtttccaggccagtctacagaggaacatttatctcttatggtagttaaactgtagtactgtggactctggccacaatgtaaatcaatcttcatgggaatatgcctttgctataggacctcctctccccttcagagctgcagtagcatttgtgactctgatctgcagaccctgtagtgactctaaaccaggagcaactaccactactgtggcatggagtggggaaaaaggtaattggaaaagggtggagatggggaaggacctaccaaatgcctttgttgacacagtagagaagtcatcagacataacattgaatggaggcaataagagagttcctatggccctatcaagcttattagtaggtgttttaacaagaaatatgtaaaaattattacttgtcggccgggcgtggtggctcatgcctgtaatcccagcactctgggaggccgaggcgggtggctcactaggtcaggagttcaagacaagcctggccaagatggtgaaaccccacctctactaaaaatacaaaaattagctaggcgtggtggtgggcgcctgtaatcccagctactcatgaggctgaggcaggagactcacttgaacccgggangtggangttgcagtgagcccgagatcgtgccactgcactgcagcctgggcgacagagcaagactccgcttcaaaaaaaaana

SEQ ID NO: 1486 - DNA, 736 bp, Homo sapiens
  misc_feature (629)..(629): "n" may be a, t, c, g, other or unknown
  misc_feature (692)..(692): "n" may be a, t, c, g, other or unknown
  misc_feature (714)..(714): "n" may be a, t, c, g, other or unknown
  misc_feature (730)..(730): "n" may be a, t, c, g, other or unknown
aaatggaatgtgcacaatgaaatgtgttccaaaatctaaaagcaaatcacaggatggagaaaacctttaatgagcacagctaataagagctcattaacattcatacatatatatgtacaaatatatcatagtaagtaccatttcttcttggatccttcctggcactgtgctaactgctttctacaaatttagcttacataaacccttgatacacccttgaggtgagtaggtattatctatagtttacataagatgaaatagagcctcccagcagttaagtaacttgtgtgaagatgggacccttgttcctgatggttctagaaccttcatccttaatgataatgctaaagtaagtacatgaattgcctgaagaagtggtcagagtttatcaatagaaaatttagatagtactcagcgtgtggaaaatgtacatttatggaaatgataatgttcactatctctgatattctatgatcttttacattagcaaaaaaaaaaaaaaaaaaaaaaaaaggccagacacagtggctcatgcctgtaatcccagcactttgggagaccgaagtgggtgaatcacctgaggtcgggagttcgagaccagcctgaccaacatgcagaaaccccgtctntactaaaaatacaaaattagacgggtgaagtggtgcatgcctgtaatcccagttacttaggangctgaggcaggagaattgcttnaacccaggaaatgganggttgc

SEQ ID NO: 1487 - DNA, 812 bp, Homo sapiens
  misc_feature (778)..(778): "n" may be a, t, c, g, other or unknown
  misc_feature (781)..(781): "n" may be a, t, c, g, other or unknown
  misc_feature (810)..(810): "n" may be a, t, c, g, other or unknown
tatacaggttgagtattcctaatctgaaatctgaaattccccaaaatctgaaacttttttgagtgctaacatgatgctcaaaggaactgctcattggggcattttggatttcagacttttggattagggatgcttaaccagtataatgcgaattattccaaaattttaaaaacattccaaaatctgaaatacatttgatcccaataattttgcttaagggatattcaatctgtatagtcctttacttttagaagaaggtaggtatgattacttactgctcagaaataatagatacttagaatttatctgcaggatttcagatgggttcactattacatacctgattatcatgcacatcctgttttaaaagtatagaatggatgaatccatatctgggactcatcttttgtgaccaataactgaattctaagcattgtctctcatggggatcctcacagaattgttgccatccctttatgaaggagctggaacatattttcactaacatctcactctgctcatgtttacataagtaaaatcagtatctaggggaacttcataatttcaaatgaaaaaaatggattattttggagattacatgaatcactagtacatgtaaagcacttagaacaacagtgcctagaatatagctcaatagatgatttttttactaatagtagtaatccttttcataacagaaagcagcagctacaaatttatcaactcactggttagaatcatctgattagcttggaagtttaaaaatccactgagccanttngacaccatgaaatctatcttatttctcanga

SEQ ID NO: 1488 - DNA, 710 bp, Homo sapiens
  misc_feature (602)..(602): "n" may be a, t, c, g, other or unknown
  misc_feature (681)..(681): "n" may be a, t, c, g, other or unknown
  misc_feature (692)..(692): "n" may be a, t, c, g, other or unknown
  misc_feature (705)..(705): "n" may be a, t, c, g, other or unknown
ttcctttttagttgactgaaacaaaacaaaacaaaagggccactggatgtctgccttcttggggggtgagccagacagactgacaaacaaacagccccaactgtgttcgggggagggtttcgcctcccgttttgcccggcagcagcagcatggacgtgttggctagttatagtatattccaggagctacaacttgtccacgacaccggctacttctcagctttaccatccctggaggagacctggcagcagacatgccttgaattggaacgctacctacagacggagccccggaggatctcagagacctttggtgaggacttggactgtttcctccacgcttcccctcccccgtgcattgaggaaagcttccgtcgcttagaccccctgctgctccccgtggaagcggccatctgtgagaagagctcggcagtggacatcttgctctctcgggacaagttgctatctgagacctgcctcagcctccagccggccagctcttctctagacagctacacagccgtcaaccaggcccagctcaacgcagtgacctcattaacgcccccatcgtcccctgagctcaccgcatctggtcaaaacctnacaaactctctctgccatggatggcacggtgacgttgaaactggtggccaagaaagctgctcttaacttcgtaaaagtnggaaggggtcncaacagcttgcancaacc

SEQ ID NO: 1489 - DNA, 752 bp, Homo sapiens
  misc_feature (625)..(625): "n" may be a, t, c, g, other or unknown
  misc_feature (688)..(688): "n" may be a, t, c, g, other or unknown
  misc_feature (720)..(720): "n" may be a, t, c, g, other or unknown
  misc_feature (746)..(746): "n" may be a, t, c, g, other or unknown
agttgcccgcctgccccggagagccaggcgctaaccagccgctctgcgccccgcgccctgcttgcccccattatccagccttgccccggcgccctgacctgacgccctggcctgacgccctgcttcgtcgcctcctttctctcccaggtgctggaccagggactgagcgtcccccggagagggtccggtgtgaccccgacaagaagcagaaatggggaagaaactggatctttccaagctcactgatgaagaggcccagcatgtcttggaagttgttcaacgagattttgacctccgaaggaaagaagaggaacggctagaggcgttgaagggcaagattaagaaggaaagctccaagagggagctgctttccgacactgcccatctgaacgagacccactgcgcccgctgcctgcagccctaccagctgcttgtgaatagcaaaaggcagtgcctggaatgtggcctcttcacctgcaaaagctgtggccgcgtccacccggaggagcagggctggatctgtgacccctgccatccggccagagtcgtgaagatcggctcactggagtggtactatgagcatgtgaaagcccgcttcaagaggttcggaagtgccaaggtcatncggtcccttcacgggccggctgcagggtggagctgggcctgaactgatatctgaagagagaantggagacagcgaccagacagatgaggatgganaacctggctcaaaggcccaggcccangcccaa

SEQ ID NO: 1490 - DNA, 846 bp, Homo sapiens
  misc_feature (842)..(842): "n" may be a, t, c, g, other or unknown
aaattcttcaaactgaattgcaataatgacacaacctatcaaaacctctgggatacaccaaagggagtgccaagagaaaagtccacagccctcaacgcctacatcaaaaagattgaaagagcacaaattgacattctaaggtcacacctcaaggaactagagaaataagaacaaaccaaacccaaacccagcagaaaaaaaggaaataaccaagatcagggcagaactaaatgaaattgaaaaaaaaaaagatacaaagataaaaagctggttctttgaaaagataaacaaaattgatagaccattagcaagattaaccaagaaaagagagaaaatccaaataacctcattaagaaaagaaacgggatattacaactggcaccactgaaatacaaaagatcattcaaggctactgtgaatataaactgtaaactaggaaacctagtttatgcgcataaactaggaaacctagaagagatggataaattcctggaaagatgcaacactcctagcttaaatcaggaagaatgagataccatgaacagaccaataacaaacaatgagattaaaatggtaaaaaattactaacaaaaaaagtcccagaccagacggatttacagcagaattctaccggacattcaaagaagaattgataccaatcctttgatgctattccacaacatagagaaaaaaaggaacccttccttaattcattctatgaagccagcatcaccctaataccaaaaccaggaaagggcttaccaaaaaagaaacttcagactgatatccttgatgaactagatgctagacccttaacaaatactactaatcaaatcaccacntata

SEQ ID NO: 1491 - DNA, 829 bp, Homo sapiens
  misc_feature (677)..(677): "n" may be a, t, c, g, other or unknown
  misc_feature (732)..(732): "n" may be a, t, c, g, other or unknown
  misc_feature (804)..(804): "n" may be a, t, c, g, other or unknown
  misc_feature (806)..(806): "n" may be a, t, c, g, other or unknown
gctgtcatggcgggtgtgctgaagaagaccactggccttgtgggattggctgtgtgcaatactcctcacgaggtatgtacctttgttctttcttcgttcttgaattcccaaggaagactaaattcctgtcactttgcttattgcagggttaacgggatacagatgtttcaagcccttaattacaagccgcgtgagctcttgagacacgggcgctgtccacctacttcgttgatccgatgtcacatttttatttattttcgccatgacctctttattaagccagttttcttgttgactttttccttgacattttcatggcttcacttgtgcttgcttctgtcagcgccatctcaaatttatatctccgttttccatcttttctccttgccttaccgtttctgcttaggtgcgttggattacatatatttaggcttactaaaggtactgcccccttttccttctgttaggtcttttccatctgtattcacgaatgttttcatcaaaaaaacccacaaaattttttttattcttcttgtcccttctataatcacaccatttctttgcttcactttacagataactcaaaagagttatctctattttctccaatttctttcttattcacccttgaatgcactcagtcacccttggcgtttttcaagttcaccaattatctncatgctgccaaatccaatggtcagctcatatttctcaccttcattgacctaatancagcgtttttttgacacatttgacactttttccatcacgctcttttcaagtcaccagttatcttcatgttgncnaatccaagggcaacttatgttct

SEQ ID NO: 1492 - DNA, 843 bp, Homo sapiens
  misc_feature (728)..(728): "n" may be a, t, c, g, other or unknown
  misc_feature (794)..(794): "n" may be a, t, c, g, other or unknown
  misc_feature (798)..(798): "n" may be a, t, c, g, other or unknown
  misc_feature (828)..(828): "n" may be a, t, c, g, other or unknown
ttttaattttaatgaggctcaacttaattttttttcattagtaggttgtgcttttggttttgtatttaagaagccatcattgaacccaggatccccgagattttctcctatgttatctcctaggattcttatggttttgcacttacatttacgtgtaagatttattttataaaggatataacatgcatacctggatttatttagttttttgcatgtggttgtccagctgttctagcaccactagttggaaaggctatctttgctgttttaaattgtctctaaagctccatggaagatcagtggactgtatgtaggcctgcttctgggctccgtattcttttccatgcatctatttgtgtgtgttttctcttttcaccaacttcacactatttgggttactgtagcttaatgtaagtcctgaagttggtagtgccaaacctcagggagtttttctgaacttcatcatgagaacctggttgagatcattgtagtaaaacttggaaatgtgtaagattcccccttagtctggtcttcaaggagtttttaatgttctagccaggctaccctcagcttctagtaatctgtcaatatcatttaagtgctcctcccacttgctgtccccagtagcttctcttccctgtgacctgtgactccttatgtgttagcctgtgtttctcatttttaaggtggcagttttcctgtgacctcaattctctgatccaccctanaagggttgactttcagttggtcaacttttttctaactgtgaagaccaagtgatgactggctaactntttncatgtggaatagaaacccaaaagtttgttnaagaatactggtata

SEQ ID NO: 1493 - DNA, 848 bp, Homo sapiens
  misc_feature (752)..(752): "n" may be a, t, c, g, other or unknown
  misc_feature (754)..(754): "n" may be a, t, c, g, other or unknown
  misc_feature (805)..(805): "n" may be a, t, c, g, other or unknown
tatacaaaatataagtaaataggaaaaagtaactatagtaacagttgctattggaattcctctttggatttattagagaaagtaccctaatatctgccttgggtatagatagtgaaagcccaagcattttgggtctggttagaactaaactgtagcaaacaagggaggagtttttcagggactctggaatgggagagaacactgggataactgagaggagccaggagttggtgaagtctttgcattaggggatgtgacacttcacaggcacccctctcccctatgtttttactaaaaactaccaagaacttgatgtgtaaggatttcttatagaggccagtaaaaaggttaagtcatgcaacaggaagctttgcagaaaaacagtctatacccaaggatgcaggagcacagaagtagagaacataaggaggaattcttgagaatttgctggattatcggggacacttcgggctgacacagggagtggggctgggattataggcagagtgtaatcagaccactgaggggcagagagtctctaacatctaagttacatacttatattttaaatttttgtgattttagtttttgcttgctccattagagtagaaaataagtatttgttgaataagttagaaaaatgaatgaatgaatgaattgctttcaggactatgccacagaatgttagagtaggaaaggaccttagggatctattagttaaacctgttgagcaattagttcaatggtggtangnattgatctcacttcaaagataataccattacagcaataccacagtcactgntatgaatgcctccatgaatcagacaggttacatttataatctt

SEQ ID NO: 1494 - DNA, 695 bp, Homo sapiens
  misc_feature (587)..(587): "n" may be a, t, c, g, other or unknown
  misc_feature (641)..(641): "n" may be a, t, c, g, other or unknown
  misc_feature (676)..(676): "n" may be a, t, c, g, other or unknown
  misc_feature (690)..(690): "n" may be a, t, c, g, other or unknown
agcaccaccagcggcagccgccggagccgccgccgcagcggggacggggagcccccgggggccccgccaccgccgccgtccgccgtcacctacccggactggatcggccagagttactccgaggtgatgagcctcaacgagcactccatgcaggcgctgtcctggcgcaagctctacttgagccgcgccaagcttaaagcctccagccggacctcggctctgctctccggcttcgccatggtggcaatggtggaggtgcagctggacgctgaccacgactacccaccggggctgctcatcgccttcagtgcctgcaccacagtgctggtggctgtgcacctgtttgcgctcatgatcagcacctgcatcctgcccaacatcgaggcggtgagcaacgtgcacaatctcaactcggtcaaggagtccccccatgagcgcatgcaccgccacatcgagctggcctgggccttctccaccgtcatcggcacgctgctcttcctagctgaggtggtgctgctctgctgggtcaagttcttgccccttaagaagcagccaggccagccaaggcccaccagcaagccccccgncggtggcgcaacagccaacgtcagcaccagcggcatcaccccgggccaggcagncgcatcgcttgaccaccatcatggtgcccttcggnctgatctttatcgncttcg

SEQ ID NO: 1495 - DNA, 696 bp, Homo sapiens
  misc_feature (658)..(658): "n" may be a, t, c, g, other or unknown
  misc_feature (690)..(690): "n" may be a, t, c, g, other or unknown
  misc_feature (692)..(692): "n" may be a, t, c, g, other or unknown
ttgtgatggaagatttctttccatagattagtataatttacgtgggctgtttgaagagattaccttcttagtggttcccttaaagctctttgttatgtatatcctgaagcccagtcacttcttcccacttgtttttgagtgtttgatctagacaatgtaaaggcacttttaagataaaaattattgtatttgggggactttgggagactcacttcccaatcattttgtttagaagcaaaaatgattaaacagtactttatgtcagatctgcctgtttaagggatttgagcacacctggtagcaaagaggtttaacctagtttctcagatgaaaactagaggtggaggaaggacgaggaagcagtccagggtgagctgaggagctggttacctttagcctacttctgggatgatgcacattgtcgtctaggtcagtcagcctcctcagcccatgcattaagattcctggttgcagctgggcacagtggctcacacctgtaatctcagcactttgggaagctgaggtgggcaggtaacctgagttcaggagttcaagactggcctggccaacatggtgaaacctcatctctactagaaatacaaaaattagccagatgtggtggcggacgcctgtaatcccagctacttgggaggctgangcaggagaatcactcgaacctgggtgttggangntgca

SEQ ID NO: 1496 - DNA, 670 bp, Homo sapiens
  misc_feature (594)..(594): "n" may be a, t, c, g, other or unknown
  misc_feature (612)..(612): "n" may be a, t, c, g, other or unknown
  misc_feature (647)..(647): "n" may be a, t, c, g, other or unknown
agtttcacttttagctctgggcacctccagctcctgctcgccggacggctcccagggagagcagacgcgccagacgcgccaccctcggggcgccgacggtcacggagcatggggtcggcctttgagcgggtagtccggagagtggtccaggagctggaccatggtggggagttcatccctgtgaccagcctgcagagctccactggcttccagccctactgcctggtggttaggaagccctcaagctcatggttctggaaaccccgttataagtgtgtcaacctgtctatcaaggacatcctggagccggatgccgcggaaccagacgtgcagcgtggcaggagcttccacttctacgatgccatggatgggcagatacagggcagcgtggagctggcagccccaggacaggcaaagatcgcaggcggggccgcggtgtctgacagctccagcacctcaatgaatgtgtactcgctgagtgtggaccctaacacctggcagactctgctccatgagaggcacctgcggcagccagaacacaaagtcctgcagcagctgcgcagccgcggggacaacgtgtacgtggtgactgangtgctgcagacacagaangaggtggaaagtcacgcgcacccacaagccggganggctcgggcccggttttcccttg

SEQ ID NO: 1497 - DNA, 731 bp, Homo sapiens
  misc_feature (643)..(643): "n" may be a, t, c, g, other or unknown
  misc_feature (688)..(688): "n" may be a, t, c, g, other or unknown
  misc_feature (693)..(693): "n" may be a, t, c, g, other or unknown
tttgctagaattgtagcctagtctgtgaaacgaaaattaaatgagaattaaacttttttttaacaattaagctttttttaacttttttttagtattgctagtattaaactttttttcacaattaaaaaatacatattggttttggaggcacctttgatgttctactaattatattaatacagaacggatgcttcttaaaaacttttagtgcaaataagcttttaaaatcttagtatcttaggcacataagtaattttcattttttagatggataataaaatcttactatcttaggcacataagtaattttacattttttagatggataataaaatcttactatcttaggcctgtgagtcattttacattttttagatggatactagtttaggtgcccattttgatgttgtttttaaaaatactgaccttacagtcctttccatctttatttttgagtgacagcagaatcccgagtataagaaaatgtgattaattctcccatattgaagtcatttaatcatgctttgcctaacagctgctttctattcagtacactgaacataaaattctggagtgcctttgtgctatcataaattgtaaatgtgaaccattcttcctcttaagtatcatatggtattgctgntttgaatttgtcagtttggtagggggtttttctagagattgctgntgtantccggctaggaagggccttcttctggggacgaaactct

SEQ ID NO: 1498 - DNA, 629 bp, Homo sapiens
  misc_feature (599)..(599): "n" may be a, t, c, g, other or unknown
  misc_feature (605)..(605): "n" may be a, t, c, g, other or unknown
  misc_feature (626)..(626): "n" may be a, t, c, g, other or unknown
gacatacttcaggccccagccaccaagtgatgtgtctcttctgaatgtgcataactttcaggagaaaattgtaacacgtcactggttgagaacccagatgatgtgactctcctgccttgtcacagtcctcagggaaaagaaattacatatcagtggcccagcatccaggtgacgtcgctctcctgcgtgatttctgccaagaagttcgttggtaacctacatctcagcccagctcacaggtctgatgataactaatacctcttaccggtcaatagaagagatactgtctctcacagctaggcttacaaaaaggagtaaaatcccaggtctcctctctgtatgaaggttatagagaattaccactctcttgtatattgtataaagcactcggatggtacagagcatgtcatcataggacccagcagacagatcatgtttcatgtaaacacaccctgccaatttttagaattgtcatcctcacacatggaaaagcccaccgatgaggtcataattctcatgcacagatgcaggccacagttaaaactgtgactatcggccgggcgtggtggctcacacctgtagtcccagcactttgggangctgangtgggcggatcacaaggtcangga

SEQ ID NO: 1499 - DNA, 622 bp, Homo sapiens
  misc_feature (591)..(591): "n" may be a, t, c, g, other or unknown
  misc_feature (600)..(600): "n" may be a, t, c, g, other or unknown
  misc_feature (621)..(621): "n" may be a, t, c, g, other or unknown
gtgcgcgccgccgccgcctgtgggttggctagttattttgcaagcgggaggggccgtgcgcgctcctgcctcaggcctctgtcccccaccccctttccccggtcccaggctctccttcggaaagatgtcggacacggcagtagctgatacccggcgccttaactcgaagccgcaggacctgaccgacgcttacgggccgccaagtaacttcctggagatcgacatctttaatcctcagacggtgggcgtgggacgcgcgcgcttcaccacctatgaggttcgcatgcggacaaacctacctatcttcaagctaaaggagtcctgcgtacggcggcgctacagtgactttgagtggctgaaaaatgagctggagagagatagcaagattgtagtaccaccactgcctgggaaagccttgaagcggcagctccctttccgaggagatgaagggatctttgaggagtctttcatcgaagaaaggaggcagggcctcgagcagtttattaacaaaattgctgggcacccactggctcagaatgaacgctgctacacatgttcctgcaagaagaggcaattgacaggaactacgtnccggggaangtgcgccagtaggagcccctnt

SEQ ID NO: 1500 - DNA, 738 bp, Homo sapiens
  misc_feature (651)..(651): "n" may be a, t, c, g, other or unknown
  misc_feature (677)..(677): "n" may be a, t, c, g, other or unknown
  misc_feature (713)..(713): "n" may be a, t, c, g, other or unknown
ccagctttagctatgatgcagcaagcacagcagccccttaccttcattccttcttccttcccactttcaatcaattcatctattcttttcctttcttcagactgggcagagagaaagaaaaacagcatcagtatcttctcctaggcccatcgtgcgtagcttgatggtcttgagccctgattgcccaggccatgcccaccgggccacaatcggcctcatttggcatcactggggatgatgggtccccagtgatggcaaagcccccaagtatccctccttttctcatcacccatctgttgtggaagatctgtcacctggggttcaactggatcaggagggaaacagtggggacccaagaacagaatggggctcgtagatatgttctgttgcccatgcagcacgttaaaaaatgtccaacttgcccacacctgaaaatcaggcctctgacttcacagaaaatcaggtacagtgggccaggcgcggtggctcacgcctgtaatcgcaacacttcgggaggccgaggcgggcggatcataaggtcacgagttcgagaccagcctggcaaataggtaaaaccctgtctctattaaagatacaaaaattagccaggtgtggtaggagcctgtagtcccagctactcgggaggctgangcaggagaatcgcttgaacctgggangtggaaggttgcaatgagcccagaatgggctactgnacttcagccttgggcgacacaagca

SEQ ID NO: 1501 - DNA, 713 bp, Homo sapiens
  misc_feature (618)..(618): "n" may be a, t, c, g, other or unknown
  misc_feature (656)..(656): "n" may be a, t, c, g, other or unknown
  misc_feature (704)..(704): "n" may be a, t, c, g, other or unknown
aatgtgaacaatgcttcagaaaggaaatgaaatgtctgcagcagatagaagtgtgtaaattttgccttcactttagagctagaatcactatgagtggtagcatttcagaatcagaagaatggaaagctcagttgattatcattacacataggagtaaaaggaaaggttcacatttttattgacagctcatatcgaaaagacagctcctcttagagagaagtgaattctcctccttcttgttgtttcttctgccacctttgccctcatacataacgctctatctttatcttcttcccttttccctcctcctttcctgtcttttcttatcttcctccattctctccccatttcctttctgtgctccctctcctttctgcactcacctccttcacctttcatctgtaggtgacactaaaccgaggtttaagaagagccaccttggctgggtgcaatggcttacgcctgtaatcctagcattttgggaggctgaggcaagtggaacacaaggccaggagttcgagaccagcccagccaatgcggtgaaaccctgtctctactaaaaattcaaaaattagctgggcgtggtggcacgcgcctgtaatcccagctactcgggangctgaggtaggagaattgcttgaaaccagaaggtggangttgcagtgagccaagatcgcaccactgcacttcaacctgggcagaanagtgaaact

SEQ ID NO: 1502 - DNA, 756 bp, Homo sapiens
  misc_feature (597)..(597): "n" may be a, t, c, g, other or unknown
  misc_feature (709)..(709): "n" may be a, t, c, g, other or unknown
  misc_feature (737)..(737): "n" may be a, t, c, g, other or unknown
  misc_feature (750)..(750): "n" may be a, t, c, g, other or unknown
tcttccaagtgtaccaaacaagtatcattttatgtgtatcatgacattaaaaaggtcagaaagctatgtactaggagcgccacacaccccagtcaaaacaaaataaaaacactaaaatattaccaaaaactttgaaacaagagggccctaaactctgcaacaattaattgatctcttgaggttaggggtttctagctaatcccttgcctgtcccctgtccccttccccagcaggcagaccaggaaggactctgctgttttctggaatcatttcaatccttggaggcaaaagagatagagctaagctgtgaagggttgatatctccaagagaaacatactcacctatgtttgccagtcacttgccttctccaggaagtgatgatagactgggactcagagaatcttctagaagtttgagcaaaaagggcagaggtcactggtctctgaagtctgacccaaaaccatctccttaacagtttccttctaagccgcaggggaggcagcagaatcttccccatcacatgtctcagccaccacctccttctcccactgctgaaccccctcatttgcttcccaggtgtcagtgaatcccatctncatggccccattctgctttggcctttgtgctgagccctgttgggttgctccccagtagtgactgcctgttggcttaattgccaccttgctgggaccctatcttctggatctnctttggcttctgactctgtggctgtggncagtgtcaccatnctgagt

SEQ ID NO: 1503 - DNA, 846 bp, Homo sapiens
  misc_feature (781)..(781): "n" may be a, t, c, g, other or unknown
  misc_feature (821)..(821): "n" may be a, t, c, g, other or unknown
tttgcgaagatggcggcgctgggggtgctggagtccgacctgccaagtgccgtgacacttctgaaaaatctccaggagcaagtgatggctgtaactgcacaagtgaaatcactgacacaaaaagttcaagctggtgcctatcctacagaaaagggtctcagcttcttggaagtgaaagaccagctgctgctcatgtaccttatggatttgacccacctcattctggacaaagcctcaggaggatctcttcagggacatgatgcagttttgagactggtggagattcgcacggtatgaagcatttggcttcttggagttttaggtttctaaattttgagctccaagggtatcacacagtagctctcatttaagtgagtcttcccatgtttaaggaaaccaaatgagaaaaggtatttttctattcatttgctctactttgtacatattttaggtgccttatgtggcaccttaatatagggactctggtgtgtgcttcattttgggaaggaaatataatcctgattaactaccatgttgtaggttttggaaaagcttcgtcccttggaccaaaagctgaagtatcaaattgacaagctgatcaagactgcagtgacaggcagccttagtaagtgaggagaccatcatgaagttgtggggaccatcagaaagttccaaattttgtaaaattcattgggttatttatttcaggtgagaatgacccacttcgttttaagcctcatccacaatatgatgagcaaggtaaggggttgtaagtattctnctgattttttctgagcagctattcctagatgaaccctttngtgatcctggatccctgggattctt

SEQ ID NO: 1504 - DNA, 723 bp, Homo sapiens
  misc_feature (692)..(692): "n" may be a, t, c, g, other or unknown
  misc_feature (707)..(707): "n" may be a, t, c, g, other or unknown
  misc_feature (711)..(711): "n" may be a, t, c, g, other or unknown
ctttttgcacacacacgaatacaaagagccatacgaccttcggatgccggaaggtccttctgaatcccttccctgttccttaggttgcactagtcgggggttccatgctggggggcagaaggaatgctctctaccgtctgaaaccgttcatcaggaaggccttgatttgtgatgtgctaggagagcacaggatctgcaaatagaaggcacctgtctcccttctgcaggccgaggagaggccgccatggactgtgtgcttcttcatggcttgtttactcttctttcacagaccctacagcttggggcctgggctcctctgaccatcctcattgagaaaggaaagtgagtccagagaagttgatgcttcctacctgttggagcggcccagcagtgtaagcgtggttgttactgccccatccgccatgtccttcagtgccaccattctcttctcccctcccagtggcagcgaggccagatgctgctgctgcgcctgtaagagtgagactaatggaggcaacacaggctcccagggtgggaatcctcctcccagcacccccatcacagtgactggacatggcttggctgttcagagctcagagcagctcctgcatgttatctaccagcgggtcgataaggcagtgggtttggctgaagctgctctgggtcttgccagggccaacaatgagttggtnaaacgtcttcaggangaantgggtgacctga

SEQ ID NO: 1505 - DNA, 773 bp, Homo sapiens
  misc_feature (704)..(704): "n" may be a, t, c, g, other or unknown
  misc_feature (728)..(728): "n" may be a, t, c, g, other or unknown
  misc_feature (757)..(757): "n" may be a, t, c, g, other or unknown
cccatactgttgacattgtattagatataagtgatttagagatgatgctaagtgtacaggagaatgtgcataggtgcatatgcaaacactatgccccccccaccgccccccacctgttttttgagacagagtctcactctgtcacccaggctggagtgcaatggtgtgatctcggctcactgcaaccttcacctccagggttcaagcagttctcctgccttagcctctcaagaagctgggactacaggcgtgtcccactatgcctggctaattttattgtatttttagtagagacagggttttgccgtgttggccaggctggtctcaaactcctgacctcaagtgatctgcctgcctcggcctgccaaagtgctggagattacaggcatgaaccactgcgcctggccctaacactgtgccactttatatcaaggacttgcacatccgtggatttttatatctgcagggacctggaaagaatcccccacggacactgagggatgaccgttggggcactgccatctcccatttgcagatgtgggctggaggctagggaggttaaggaacagctaggagctctagaactggaaagtggcagaggctggacatgcaccagggactgtgccccctgagctgtcctggttagaaggaggggagcctagccacactgatcttacttgaatccccaggactcgatgcctgangtccggcagagctcctttgccctnctgggagacctaccaaagcctgcttcatncatgtaagccctgtat

SEQ ID NO: 1506 - DNA, 844 bp, Homo sapiens
  misc_feature (759)..(759): "n" may be a, t, c, g, other or unknown
  misc_feature (761)..(761): "n" may be a, t, c, g, other or unknown
  misc_feature (826)..(826): "n" may be a, t, c, g, other or unknown
tactttataaaagtatcagtctgcaacatagtggaagttttgttgttttttgttggtttttttttgagatggagttttgctctgtcgcccaggctggagttgcagtgagccgagattgcgccattgcactccagcctgggtgacagagcgagactctgtctcaaaaaaaaaaaaagaaagaaaaatacaggaataatgcataacaatatattatcctacaaaacatgagatatctgcagtgtgaaaactacacaaatttctgatgcttttactggaaaaacaattttatgaagtttaagaacagtcagagaaaaacaacacaataattaagatgtggatgatataatggctgtggtggtgacagaaattttcaatgtagtcagatgcttatgttaaatttctagtccccgtcattgtttgtccttaagcaagttacttaatttctgttagtctctgtttccttgtctataaaattaggaagggtggactaggtgaccagtaatgtcccatataaaatctaaaatttttatagtaatgatatatggccgggtgtggtggctcacacctgtaatcccagcactttgggaggtggaggcaggtagatcacctgaggtcaggagtttgagaccagcctgcgaacatggttaaaaccccgcctctactcaaaatataaaaattagccaggcatggtggcacatgcctgtaatcccagctacccaggaggctgaagcaggagaatcacaccaacctgggaggcanangttgcagtgagctgagattgtgccactggacttcagactgagaaacagagcgagacttcatcttnaaaaaaaaaaaaaaaagg

SEQ ID NO: 1507 - DNA, 708 bp, Homo sapiens
  misc_feature (674)..(674): "n" may be a, t, c, g, other or unknown
  misc_feature (688)..(688): "n" may be a, t, c, g, other or unknown
  misc_feature (698)..(698): "n" may be a, t, c, g, other or unknown
agtaaaagaacttggctcctacatcaaagccaagtctttgggcaatgctggcagtttctcctggaagtaatgagaaatgttgtgaaagaactcagcgcattggccagaaatgattgaaaaaccatcaaatttggggcagcaggaggtgtaaatacaagtgagaaaagggattctagagccacctatgaaataccacaatctccttgaggtggggaacattccttgatgttccaaaactgagaaaagcacacccagggccagtctttgtagagtttgttgctgttaagagcccacccaggcagatcacaaggtcaggagtttgagaccagcctgaccaacatggtgaaaccccatctctactaaaaatacaaaaacttgcccggtatggtggcatgtgcctataatcccagctactcaggaggctgaagcaggagaatcacttgaacccaggaggcagaggttgcagtgggccaagattgcaacactgcactccagcctgggcaagagcgagactccatctcaacaaaaaaagagcacacacatctcaacaaaaaaagaggctactggtgttgagggtagagcttgctgctaatgaaccaagaggcacatccttttccatggagaataggaagccccgagaatggggaggtgtgtgacagccatgctggactcanaggcaggtgtcatnaactggccangttctaatct

SEQ ID NO: 1508 - DNA, 809 bp, Homo sapiens
  misc_feature (754)..(754): "n" may be a, t, c, g, other or unknown
  misc_feature (776)..(776): "n" may be a, t, c, g, other or unknown
  misc_feature (797)..(797): "n" may be a, t, c, g, other or unknown
ttgctcagtcactggggcaactacttttcacccaatgtcctctggaaaagaaagatctggagggtctttttcttcaaaataataaggagggggtgcagaagggtagggatgaacctctccctcctttgccgcttgagctttagctggcaaattggcaaataaacctgctctgtaacctcttctgttacttcgttttactctccttcctcctcatcatcagtgtgaaaaagttccaagggagaacgcaccagaccccacatttgtcccactgttaccctgatgcttctgagctccccttactcaccacagggatggctttaagagtacttgggtgtcctccagcttagttccacattctccgttgctccagtgacccttcaacctggattcgagcccccacaatggacgtcacttgccgagaccagttcagtcagggagaccctaacccagcagcactagaggaattaaagacatacacacagaaatatagaggtgtgaggtggaaaatcaggggtctcacagccttcagagctgagagccccaaccggagatttacccatgtatttattaacagcaagccagtcattagcattgtttctatagttattaaattaactaaaagtatcccttatgagaaatgaagggatgggccaagttaaaggaataggttgggctagttaactgcagcaggagcatgtccttaaggcacagatcgctcatgctattggttgtggttaaaaatgcctttaacggntttccccctggtgggccaggtnttcctggccttattctggaanctggaaccttca

SEQ ID NO: 1509 - DNA, 744 bp, Homo sapiens
  misc_feature (649)..(649): "n" may be a, t, c, g, other or unknown
  misc_feature (677)..(677): "n" may be a, t, c, g, other or unknown
  misc_feature (726)..(726): "n" may be a, t, c, g, other or unknown
tctcttgcttgtattatttgggaacatcatttaaaaggactgtataatattccattaagtagatggaccatcatttatttaacatgctttggtctttaccccttgaaggcaaggcatatcctcctttccctattaacccattatggttcagtcatccgtgaagttggctaagcttttgaatttaaattttctgtctgcactgtctctttgaggtaatggtatgccagttgctgtgtgaaatgaaacttctttttatttgctttaaactttattaattcaagctttagctaggcatcttgttcttattcggctttagtttgataaaaaaaaaaagttgtgtttatcttcccctgcctggtcttgcagctttggtcctagggcctcccttccttctttcgaaacagatgccactgtggatggtaggttccacaagcatggccctgtccactcatcacagatgtgactcgagcagcttctggagctgcgctctagagggcattcaggtggatgtttccccacctgcaaggtgggatgtttgctggacagataacaagatttgcctgtttttttccccttcccatcacatctatttccttatccctttggtgacccagggtgccctgttggctggatcttaggaactggttgnctcacactttcacctgccccctgcctgngctttccccttcctgacttctggtgacctcctggtcccactctactggnctcttccttacagtgctg

SEQ ID NO: 1510 - DNA, 799 bp, Homo sapiens
  misc_feature (765)..(765): "n" may be a, t, c, g, other or unknown
  misc_feature (794)..(794): "n" may be a, t, c, g, other or unknown
  misc_feature (799)..(799): "n" may be a, t, c, g, other or unknown
atcagagtattttatgtattaaggagattcacattttgtgtaaattgtagatacttcacattttgttattttgcttatggtatttttttcagtgtcagattttgaaaatacagtttaatttctcaatttctccttttatggcttttagatttcatggtttaaaaagtctttaaaagccaggcgcagtggctcacacctgtaattccagcactttgggaggccaaggcgggtggatcacttgaggtcaggagttcgagaccagcctggccaacatggtgaaatcccatccccactaaaaatacaaaaaattagccaggcgtggtggcacgcacttgtaatcccagctacttgggaggctcaggcagcagaatcgcttgaacccaggaggtggaggttgcagtgagccaagatcgcaccactgcattccagcctaggtgacagagcaagatgctgtctaaaaaaaaaaaaaaaaaaaaaaaagtttttaacactcctagataattttttaactccttattttttagaagatttttatggtttcatttttctatttaaatctttgattcatgtgaaatttatcttgatttatggtgagttatagatttaattttttttcctagctgttccaacaacatttattaactaatcaatttttccccactggtttttgatgtcacttctatcatacattcaattcctaaatgtatttggtttatttctggatttcttgtccagtccattatgctggtgatctgttcacacacnggagttaatttttcagggtttaaatttcngggan

SEQ ID NO: 1511 - DNA, 853 bp, Homo sapiens
  misc_feature (799)..(799): "n" may be a, t, c, g, other or unknown
  misc_feature (848)..(848): "n" may be a, t, c, g, other or unknown
tgatgctcagccacaatggtggtagagtgtggatcttctctactcagtccactgattcaaatgccactcttttccataaacatcctcacggatgcacccagaaataatgctttagaaataatgctttatcagctatctggatatctcttaacctggtcaagctgatacctaaaattaaccaccacaggctacagtgaaaaagatagttccaactgtgagtgaggatgcggagaaactgaaccatcatacattaatggtgggaatgtaaattttagtacatctggatcaacatgttagaaacattttgaaaaacagtttgataatttttacaaaatgttaaatatatactttccatacaacccagcaattctactcctaggtgttacttaaaataaatgaaaacacatatcctcacaaggacttcattacagcataatgctgtttttataaataatttataaaagccaaaatatggaaatatcccaaatatgaattaacaggtgaataaacaaaatgccatatagctataaactacgataccacacagcaataaaaaggagcaaactactgttatgtgcaatggtgtagataaacatcaaaaacattatgctgagtgaaataagccagacacaaactgcatattgtaaaattcaatttatatgaaatttctataagaagcaaaactataggggcagaagacaaatattggttgcctgaggctggagatgaagcagggattgctgcaaatgggcataaggggacttcttggggtaatggaagtgttctaaaattggactgngacaaaattctcagctttttggctaaagatcaagtgtaaattggattgngggga

SEQ ID NO: 1512 - DNA, 827 bp, Homo sapiens
  misc_feature (770)..(770): "n" may be a, t, c, g, other or unknown
  misc_feature (781)..(781): "n" may be a, t, c, g, other or unknown
  misc_feature (795)..(795): "n" may be a, t, c, g, other or unknown
ataacaagccctaaataaaaatagaggtggactttgctcatggagtgttacatcagttctcccaaaactaattgataatttcagtgcaatctctggtaattatagcagatttttttttttgtggaaattgagaagctgaatctaaaaccgatatggaaatacaaatgagtaagagtagccaaaacagtaagttactcatcccagtattaagactgtgcagctacagtgatgagagtgtagtgctggtaagaggactggcacgcaggccagtggggtggaatggagcccggaaagtgaaccacaaacttttggttcacagaggtaccaggataattcaagggggaggaattgtcttatctacaggtggttctggcaacagagtattcacaggaaaaatggtgaacgttaacccttgcatcatatgcaaaaaattatttgaaacaggtcataagaactaaaaccatcaaacttctaggagaaaatacagggaaaaatctctgtggccttgaccatgcaaaaatttcttgggacacaaaaagcatgagccacaaaagaaaacgttgataggtgggatctcatcaaaatttcaaactctctttctttgaaagacagttaagaaaataaaaaggcaagccacgccctccaaaaatacatgcagtacatatacaggacaaaggacttatttctagaacctgtaaagaactcttagaactcaataataagaaaacaacccagtaaaacaatgggcgaaagatttaaacatgcatttnccaagaaggtntatgaattgggccnttaagcacaccacagggtatcattatttatca

SEQ ID NO: 1513 - DNA, 642 bp, Homo sapiens
  misc_feature (620)..(621): "n" may be a, t, c, g, other or unknown
  misc_feature (625)..(625): "n" may be a, t, c, g, other or unknown
tttatatacggtatggctggaaaagttttggattttaaaacagggtccctctccttgaatctgggtggacttgtcaatgccctgaccaatagagatgacgaaagtacgtgtcaccggactgacttctagggccagtcacagaaagccatgcagttcctgtcttgttggaaggaacactgctcttcaagccctgagctccgcttcgtaagtccaactcccctaaggccatcatggcaggagaggccatatctgggcgcttcagtggatgttcttatctggacccagccttccagctatccccactgacatgcaaaccaagcctctagaccagcccgtccaccggccgaatgctgcctgtgaccgacctctgccattgccacatggaacagaagcacctcccagctgctccttgcccaaattcttgacccacaaaatgtgagacaccattaaaacttgtttcagatgacccctaaaaaataaaatcaacctcttcatctggtgctcttataaaaacttactacggaagcttcttgagagacagttcgttggtcttcctgaataatttttttttttcttttttgagacaatgtcttgctctgacacccccagctggaatgcanngggngcgatcttggctcactg

SEQ ID NO: 1514 - DNA, 788 bp, Homo sapiens
  misc_feature (656)..(656): "n" may be a, t, c, g, other or unknown
  misc_feature (767)..(767): "n" may be a, t, c, g, other or unknown
  misc_feature (769)..(769): "n" may be a, t, c, g, other or unknown
  misc_feature (786)..(786): "n" may be a, t, c, g, other or unknown
taagaagcccttgcatgtgcagttcacaacagggttcatgctcctataaaaatatagtcctgtcactgatctgacaggagatggtgtgcaggcagtaatgcttgcttgcccagtgctcacttgctgtgcggcctggttcctagcaggccatgggccagtaccagtctgcagcctggggttaaagggccaaaggtgtctgcctctctgctggcctaacagcacaggaaagggagacagcactgtcttaccattccctaacctctgcccaacaatatactagagagaaatacatcaaattgccgttctatgttggtatcagagagttaaatcagaactgtactgtcctggttctgtcactagccctgagaccttacctctgggttccatgagtgggacagaaggagagaggatgctagcagtgctggctacagtttgctttcttgctcacctggtagaaccgaggtagggccagaatacagtccatcagcttgtggcggcccaagttgatgagcattgtgttctggccagtgttcagaaagtgaatctgcagagttatcaacttggtgagccgctgacagtgctgggcctgtcgcacacaggagtcctgaggaacaagggtggagaggcacagtagagaaagacctagttgtcacctnctgtgtgaacccttacaacggtattcaccccttctggtcctgggttggcctatgatgcccttccgctttacctggaaagagcccaaggaccaaagaaaataattttactgnanacagcaagtcccaaggnca

SEQ ID NO: 1515 - DNA, 809 bp, Homo sapiens
  misc_feature (721)..(721): "n" may be a, t, c, g, other or unknown
  misc_feature (794)..(795): "n" may be a, t, c, g, other or unknown
gaattttaaactttggtttggttctattgttttctctgctttcttttctgacaaaatttttaagtggtttttggactgatttggtgaaagggaactctgcaagaaatgttcatgaccgcgatctcagccgtgcacacagtggtgggagttcagctttaagactgttttctgcctgacagggcaggacccccagacaaatcactggctggctctgtggtagttggcagccattcaagactggtcttgtgccaggagtattactagatagccagacagatcaattcacttttatattcccgccattatttatagcccactgtatatctactcttgcttatgaagtaatgattagcaaatacagtacacataaaacatgggcatttgttctggaaagggctttctcctgctgatattgcagatagtttcacaggtcacagaaccttaaaaaggatttaaagggcatgtcttgtgtagcatttgttcctttgaaaatgatgctcctttcccattttttagtaattgaagaggatagaaaggttttctcattgcttacgtttcactgaattctctgcagccccttttcccacagatgtttcagccaaacctgtatggagggaggtgacatggcatggcttgctgtttaaaacagctacggtattttgtgcttcccttttgagtgtgtcaaggtgaacaaaaggagagcctctagaacgcatggganggaatttgggacaggaccttttacatgctgggggaaactgacaggactcatgaggaaagactttggttgggtnncttcctctctttct

SEQ ID NO: 1516 - DNA, 845 bp, Homo sapiens
  misc_feature (702)..(702): "n" may be a, t, c, g, other or unknown
  misc_feature (821)..(821): "n" may be a, t, c, g, other or unknown
  misc_feature (837)..(837): "n" may be a, t, c, g, other or unknown
aaatgcatatatacataatgatatatagagataattaactttaagtttattaaactgtatttactctataaactatgacttcattttttgttttgttttgtttttttgtttttttgagatggagtctcactctgtcactcaggttggagtgcagtggcgccatctcagctcactgcaacctccgcctcctgggttcaagcaattctcctgccgcagcctcccaagtagctgggactacaggcacctgccaccaagcccgggtaatttttgtatttttagtagagacggggtttcaccatgttggccaggctggtctcaaactcctgaccttgatccacctgcctcagcctccccgagtgctgggattacaggcatgagccacctcgcctggcctataaactacgactctgatgaccgcatagtatttaagcaagaaaacaaccaaaatgttctagctaaagtggagaccacttaacctaacccaattaaactttaagttgaacacaagagtagtagatgcagttcagctccatgacattgggtgagttgtctaaatgctctgtgctttggtgtccttgtctgcgtgtgacatgaagccgcagatctcaaagatctctttcattccgtgaaagcgctctcaatgtgtgaagttgactgcttctcctgctgtttaccaagagaataatcttaaccctacattgnggagatcggatttggtctcacttgacagaaagccagtcccacgagcagcttggtacccaaataccagtctgtttagtgctcattagagatgaagaaccatattcataagtcaagctganacggatgcatcttcanacagaatc

SEQ ID NO: 1517 - DNA, 749 bp, Homo sapiens
  misc_feature (663)..(663): "n" may be a, t, c, g, other or unknown
  misc_feature (699)..(699): "n" may be a, t, c, g, other or unknown
  misc_feature (715)..(715): "n" may be a, t, c, g, other or unknown
agctcctgggctcaatgatcctcctcctcggcctaccaaagtgctgggattataggcatgagccactgtgcccagccaatttcatgtttttgaaaaatttgtcaattgtggaataagtgggtaaaaatcctattacaacaaattgtaccaagtcttagactaactagaataggaccatttctgagccccaggaagggctgtcggaggtgctgccccacatccaggaggctctgtggtctgggccacaccttcaggaggatgtgcacctactgggagccccaggccatctctaatctcacactagattctcccacccacagatatgtggtctccctgatgaaggctggatttagtccttgttctcagcgaggtgggtattggccccacaatggccacagtacactgaccccgtaacagaggaaatctatagctcgtataattcattttcatggcaagtggctgcatttgtttttggcctcacttggtctgcttcccagaatccctaagaagggaccaaactgccaaggtgggaggatcacttaagcccaggagtttgagaccagtgtgggcaacacagcaagacctcgtctctatatttatttaaaaataaaaaagccaggcgcggtggctcacacctgtaatccagcactttgggaagccgangcaggcagatcacaagggcaggagatcgagaccatnctggctaacatggggnaaccccatctttactaaaaatcaaaaaaattacc

SEQ ID NO: 1518 - DNA, 825 bp, Homo sapiens
  misc_feature (719)..(719): "n" may be a, t, c, g, other or unknown
  misc_feature (745)..(745): "n" may be a, t, c, g, other or unknown
  misc_feature (813)..(813): "n" may be a, t, c, g, other or unknown
  misc_feature (820)..(820): "n" may be a, t, c, g, other or unknown
aaaaaccacactcctatgacagctctttgcctgctccttgcttgatgttttctggaagtgtgtgtggggtcaaggatggtgtggggcacctgtatctactcctaatgtttttgaccctgctgtgttcaatcttcttacacttcagtttcttcattttaaaaaggaaaaggtaatttcttcacagtctcctatgagttggacagaaagtcatggatgtgtaaaggacttcttgatgataagccccaccttcatttttccacggcaccaaacagccctgtgacatctgcattcaccccactcgtttttatttttgctgcagtgaacagcttgagttgtctcttaagagtcatctcatcccttgctattcgagatgacccacagatggcagctgttcagcatcacctgggagttcattggaaatacagaatctcaggccccacccctgaatgtcgaatactgtgtgtactgctctagcttctccagagtaaaagatagtctctataggatgccgtctgctctggcaccaggccccctgagcccatgccttttatctgacgtttgttttgcaacccattacatcacttgcccccgggcatcctttaaatttcatccttggctaattctcattgtaaccggttccagcttgctttaaatgattgggtggatggaattctccccattgacaattgacaggtggcaattaattggtcatgcctcantgggatgaatccattacatctctttnctggctaatatttttatctaccttccgacttttttgtagggactttggtggatatcctcatgaaaggnccatctnttcct

SEQ ID NO: 1519 - DNA, 788 bp, Homo sapiens
  misc_feature (653)..(653): "n" may be a, t, c, g, other or unknown
  misc_feature (715)..(715): "n" may be a, t, c, g, other or unknown
  misc_feature (748)..(748): "n" may be a, t, c, g, other or unknown
  misc_feature (755)..(755): "n" may be a, t, c, g, other or unknown
gtgtgaggcaagggtagagattcatttatttctgtagagagatacctagttgttccagaactacttcttaaagaattttcttttcccattggcaccttgtcaagaaccaaatggccatggtatgcatctgtttgggagttctctatttattccattgacttacttgtttatctttatcccagtacctccagtaaagttttgatttctgtaacttcagaataagtcttaagtccagtagtgtaagtgccccacctttattatccctttccaaggttgtcttggatattttaagtcctttgctttttcatataaaatttagaatcctatgaataaacctgatgggttttaaaatttttaaaatttttgttttatcaaatatgttttctgggccaggtgcagtggctcacttgtaatcctggtactttgggaggctgaggcaggcagatcgcctgaggtcagaagttcgagaccagcctggccaacatggtgaaaccctgtctctactaaaaatacaaaaattagccaggtatggtgatggatgcctgtaattccagctactcagaaggctgagggaggagaattgcttgaacctgggaggtggagattgcagtgagccgagattgtgccactgaactccagcttgggcaacagantgagactgtctcaaaaaaaaaaagattttctgaatatattgaaatgagttttctcatcttgncatgagatgaaaattttttctttgctctacggntgtggcnaatgtgctctattatggattggagctatctcta

SEQ ID NO: 1520 - DNA, 331 bp, Homo sapiens
  misc_feature (234)..(234): "n" may be a, t, c, g, other or unknown
  misc_feature (272)..(272): "n" may be a, t, c, g, other or unknown
  misc_feature (329)..(329): "n" may be a, t, c, g, other or unknown
attttattttattattattactttttttgagattgagtcttgctgtgtagcccaggctggagtgcagtggcacgacttggctcactgcaatctccgccccctgggttcaagcgattctcctacctcggcctcctgagtagctgggatcgcgggcgtgtgccaccacacccagctattttttttttttttgtagtgttagtagagacaggatttcaccatgttggccaggctggncttgaactcctgacctcaggtgatccacctgcctcggnctcccagagagctgggatttagaagcgtgagccaccactcccggccaatatatttgnat

SEQ ID NO: 1521 - DNA, 692 bp, Homo sapiens
  misc_feature (541)..(541): "n" may be a, t, c, g, other or unknown
  misc_feature (624)..(624): "n" may be a, t, c, g, other or unknown
  misc_feature (661)..(661): "n" may be a, t, c, g, other or unknown
  misc_feature (686)..(686): "n" may be a, t, c, g, other or unknown
tgattctacaaatatttaattagtcccccaacatttgaggaaactactaatgtctacttcccatgctgtgggaccagagggggctctacagcagtaatggctgaagttattatgaagttttaggtagaaacaagcaatctgtgcttctcattactttatgcgatttagtgatgtaattacttctgatgcaagtttgtgtatgatcactttttgtatatatcaaatggaacagagcagtcatgcagtatatataccatattgatcaaagatgaattacagaacactgagaaggggaaagaaatcattgatctctcagctgattgtattgcttcaagtcaagaagataaaaatgtgctgaaacaaattcacagatgaaccaaatacagtcgcaaggagaaggcagtgttttcctggagcttccttggagtggtctgtagcatagcattttcttttcttttttttttttttgaggcggagtctcgccctgtcgcccaggctggagtgcaatggcctgatctcagctcactgcagcctccacctnccgggtccaaatgattctcctgcctcagcctcccgagtagctgggattataggtgcctgccaccacgcccatctaatttttgnatttttagtacagatgaggtttcaccatgttggccangctgatctcaaacttctgaccttgngatctg

SEQ ID NO: 1522 - DNA, 836 bp, Homo sapiens
  misc_feature (828)..(828): "n" may be a, t, c, g, other or unknown
gaaaaatagagatgagggctcactatgttgccaggctggtcttgaaatcctgacctgaagtgatcctcctgccttggcttcccaaagtgatgggattacagatacaagccatcacaactggccctccctaaattttctaacagcaaccttatctttaaagaaattgtccgtgtgtgctctgcccatgtttctaatgacatgcatgtgttttttcagcaccgtatgtgccctgaaattgcccgccttttgaccccccacatttaccaggatctggagaatcatccatctgttcttaagtatgagaagattaaggtgagtctgtcttacccgatctttcttggatggtgtcagcaacctaaaaaggctataatttcctcaagataaaaaagcttttcagcggccaggcgcggtggctcacacctgtaatcccagcactttgggaagctgaggtgggcagatcacttgaggtcagagttcgagaccagcctaactaacatggtgaaaccctgtctctactaaaatacaaaaactagctgagcatggtggcaagcacctgtaatcccagctactcagaaggctgaggtgggagaattgcttgaacccaggaggtggaggttgcagtgagctgagatcgtgccatgctactgcactccaggctgggcagcggagagagactcctgtcaaaaaaaaaaagaaagccttcagaagggagtagagccagctttttaaaactggttactgggagaaaattgaaatcagaccagggtttttaatccaatctgctgtacctgtaccttaacaggtatttaagaatctggcagcgcgtgntaccctga

SEQ ID NO: 1523 - DNA, 724 bp, Homo sapiens
  misc_feature (332)..(332): "n" may be a, t, c, g, other or unknown
  misc_feature (368)..(368): "n" may be a, t, c, g, other or unknown
  misc_feature (404)..(404): "n" may be a, t, c, g, other or unknown
  misc_feature (579)..(579): "n" may be a, t, c, g, other or unknown
  misc_feature (663)..(663): "n" may be a, t, c, g, other or unknown
  misc_feature (680)..(680): "n" may be a, t, c, g, other or unknown
  misc_feature (714)..(714): "n" may be a, t, c, g, other or unknown
cttgcgcacgcgcagcccgcccctgcggcagagtggcgcccgcgcgtgactcccccctgccggctgcggaggtgggggggggacggcgcccccgccgtgtgcgtggggcggggatggagcacgcgccctggagccccggggccagctctagggcccgtgcaggccacaccatgaacacctccccaggcacggtgggcagtgacccggtcatcctggccactgcaggctacgaccacaccgtgcgcttctggcaggcccacagcggcatctgcacccggacggtgcagcaccaggactcccaggtgaatgccttggaggtcacaccggaccgnagcgtgattgctgctgcaggttaccagcacattcgnatgtatgatctcaactccaataaccctaaccccatnatcagctacgacggcgtcaacaagaacatcgcgtctgtgggcttccacgaagacggccgctggatgtacacgggcggcgaggactgcacagccaggatctgggacctcaggtcccggaacctgcagtgccagcggatcttccaggtgaacgcacccattaactgcgtgtgcctgnaccccaaccaggcagagctcatcgtgggtgaccagaacggggctatccacatctgggacttgaaaacagaccacaacgagcagntgatccctgagcccgangtcttcatcacgtccgccacattgattccgacgncactacatgg

SEQ ID NO: 1524 - DNA, 710 bp, Homo sapiens
  misc_feature (641)..(641): "n" may be a, t, c, g, other or unknown
  misc_feature (654)..(654): "n" may be a, t, c, g, other or unknown
  misc_feature (662)..(662): "n" may be a, t, c, g, other or unknown
gatgccaaaattacttttttccttccaaatatcaccttctgactgtttccaccatggttaagagggctgaataagatgatcattctttagatgacgaattaacccttgcttcttcgaaaggttttagggaaattaacaaaaaaattcccagatgccaacagccaccattcaaaagaccaccaatctattgcatcataccagatgccactctctcttcctagtagggatttctctcctcggtcctgatcaaggtgttataatagagacattttcattatagacagtgtcctgaagggattccagctcaaatataggaattcttaaacctagctgaaactcccaaagtgatttcattgctgggcatattttaacatacttaggggaaagcaaatctttaaacaaagcaaaacaccaaactacagttttaaaaagaagaaaggagagcgtattttagtttcaaaattacattacattttaatttaattttccttctaattttcctgtcagcattttatttacaaaaactgtgcagcaaacgagggaaaatcttccaacacaaacaactctgtaatgactaaattggttttattcatatattttagacatttggttaacttggatctttttcataagttctttgngatgctttgtaanggtagtgnaactgaagtggttggtgagtttgatttggtcccacagtgcttaattca

SEQ ID NO: 1525 - DNA, 813 bp, Homo sapiens
  misc_feature (626)..(626): "n" may be a, t, c, g, other or unknown
  misc_feature (630)..(630): "n" may be a, t, c, g, other or unknown
  misc_feature (722)..(722): "n" may be a, t, c, g, other or unknown
  misc_feature (772)..(772): "n" may be a, t, c, g, other or unknown
  misc_feature (810)..(810): "n" may be a, t, c, g, other or unknown
caaaacaaaaacaaacaaacaaaaaaacctgtatcccttggttttagtttgtaaatgaaccaattgtgaattcaataatttggggtttaattttgtaaactataatagctcccttttgttgattgctgtttgccatgctctttggaaggcttcatgcaccgcgttacatttagctctcatgacgaccttacatttgtaagagtgtgagacagagcagtgcaaggtcctgcccaaggcccctccactggaagtgacagagctgggatgggatctgggtctgcgtggctctgaactcctcagctataccatctcctgcttccaacattgtgccagataatgatggctatggccctaatttctgaaacaaagtcttatttgagaacttcttagttagcgagatttctaccttagtcttttcactaggtatccagaaacttactaaaaaatttaaaaatcttgtagttttgaacccttttaacaaagaaaagcagtaagggcctagttattataagtacaaataggaaaaatgtataaactacagcttatcttctaaatggaaatacttaaaagacagattttcaatctctttagggggttgaggaaaaaataacattcagattttttgnttgnttggtttagcagaaaaagtttgatcatcgctttaacaattcagctttcacattttctctcatctttcttcccattgttggcaagactgtatnactgccttttgaaaaaacctttgggtaatcactggcattttgaattaacntttggtatatgccttggctaaaaatagggacatttttntcc

SEQ ID NO: 1526 - DNA, 724 bp, Homo sapiens
  misc_feature (560)..(560): "n" may be a, t, c, g, other or unknown
  misc_feature (685)..(685): "n" may be a, t, c, g, other or unknown
  misc_feature (712)..(712): "n" may be a, t, c, g, other or unknown
  misc_feature (721)..(721): "n" may be a, t, c, g, other or unknown
aggtttgtgatcttgatgtagcaaagcgattcttttcatcttcggcgagcccaggggatggactcatcctagtgctcatggtctgaacctgccgtgttcttggcttttcgtgggaggctgcattgcggattgagggagagtgtccaaccgtggcaatggaagggactgggtacttgctggattttttggtgccaccctttagaagcaggtattattggctctgctttgcagatgaaaaaaactgaggttgaggtgggctaagtgtatccatcaggccggacagaaaacatgacccatcaatgtggccccaaccttggtgacaccttagaatagcagtgattcatttggtctcagatcttgatgtgtgactagctgcagccacccgcaccttcacagacataaaaaccgccagacccctgacacgcccatgaagacacacccaaagatgtctttggagatccccgggcaacagggacactggcatttctttgcatctccgtgccccaatcctggacctgttctggtgcacaggaagctggttacgaagggatgcagtgganatggtttgcagaaagaacaccaagtttgccggactccgtgttatggagatattttgacttctggggatggagctggagcatgcccaggagacccatagtcatgagcattcacaattacccagcanttaacatgtgctgggaaccctgcccantgagagctnaca

SEQ ID NO: 1527 - DNA, 605 bp, Homo sapiens
  misc_feature (577)..(577): "n" may be a, t, c, g, other or unknown
  misc_feature (599)..(599): "n" may be a, t, c, g, other or unknown
  misc_feature (603)..(603): "n" may be a, t, c, g, other or unknown
gacaacacgctgactaggaaaaggaggaggcggggcagtggggccttcggcggcgactatggaaggagccggctacagggtggtgtttgagaagggcggagtgtacctgcacaccagcgctaagaagtatcaggaccgagactctctcatcgctggtgtcatccgtgtcgtggaaaaggacaatgacgtcctcctgcactgggctcctgtagaggaggctggagattccacccaaatcctcttctccaagaaggactccagtgggggtgactcatgtgcttctgaggaggaaccaacctttgaccccggctatgaacctgactgggctgtcatcagcactgtgcggccacagccctgccactcagagcccacgagaggtgcagagcccagctgcccccagggctcctgggccttctcagtgagtctgggggagctaaagtccatccgccgtccaagccaggcctcagctgggcctacctggttctggtgacccaggctggaggttccctgcccgcactgcacttccaccgcgggggcacccgcgccctgctccgcgtcctcagccgctacctgctgntggccagcttcccgcaggactnccgnct

SEQ ID NO: 1528 - DNA, 764 bp, Homo sapiens
  misc_feature (3)..(3): "n" may be a, t, c, g, other or unknown
  misc_feature (746)..(746): "n" may be a, t, c, g, other or unknown
  misc_feature (750)..(750): "n" may be a, t, c, g, other or unknown
  misc_feature (755)..(755): "n" may be a, t, c, g, other or unknown
ttntattcctcgcattcagcaccttccaaaaaacaagtgacatttctaatattcaggtttcctcctctcccctttaaagttgtccatgtagaaatttcatatattaaggaactaagatttctttgataagcaaatgtttttcttcggaatgcgatttcatcactgtgtctaggggagggagtgttatttttagaaagggagggactaacgcttggtagttacagtaattagagagaattatactttagcagcaatgagattacttcatctgccttatatttgagagctaatttgtacaagtagctcctggggctgtgaagggcttgccaagagtaaaaggttcaaggagtgaaatagttaatgagattcgtgatagaaatgggaatatgattgtccacaaaagggaacatcttccttttggagggtgttttttagtatatcaactagtattgtttgcctttcagcctaaaatccttcctcttaaagattgtgcttgcttggctggatttttgctgatgctgtttaattttaagctcttttccacatggagctattccagctcatttttaaaaatttatttaatgcttccaaaaaatatcctgagttattactggcctttcttccttactgtatacccggtgcctggcaaaaagtaggtgctcaacaaagagaggaaggcagggaggggaaaggtgagcgagaatgagaaggcgtcactcttcagacatttggggaatgcgatgatnaggnctcantaagatctg

SEQ ID NO: 1529 - DNA, 860 bp, Homo sapiens
  misc_feature (837)..(837): "n" may be a, t, c, g, other or unknown
  misc_feature (842)..(842): "n" may be a, t, c, g, other or unknown
tgttccatgctctctaggtgtgcctctttcaatatttcctgtccttttcgccactgctcataaatggtttctaatcattcttataattgtaccttcttggagccttgagagacaggcacaggttctcttacataggctattattgatattggttgcttttattttccctccaacccccactccagataacaactgttgagtgcgtaccatgtggcaaacaatgggaatgaagagattaatgagccctcaaagaattcatgatttacgtagcacatacttctagctaactgttctagctacaccagccagttctagagaggtacccatggaggttttggatatgtgcttaactccttgaagattcttctggaatgatgcctaaagtaattgtcaagagaagctatgctaatcttcctcttcagaatattcccatttctttcttagttataggtatgaggagtctaaaatatgctttaacatagtaagcttattgttataactggaaccatgcaaaatcttaatttcctataatataatttcttgctcctccaaagtcattcaaatattaaattggacttattctatatgttgcttagtggaaaggtatcacaaataaaaagtgggccacaatgagtaggtcaattaaataaatgcaaaaaatatattgatttattaattacaatataatactgtgctaaatgcttaacttgcattatctcatttaattcttaccaaaactctttgaggtgattattggatcactcccatttacagatgaaaaactgagggttaaggaaaagatgtgtatgccccaatttcttaatgactaaatggcancagancaaggactgtcttgactc

SEQ ID NO: 1530 - DNA, 862 bp, Homo sapiens
  misc_feature (808)..(808): "n" may be a, t, c, g, other or unknown
  misc_feature (843)..(843): "n" may be a, t, c, g, other or unknown
  misc_feature (845)..(845): "n" may be a, t, c, g, other or unknown
tgttttatcagcaaggtctttgtgacttgtatcttgtgctgaccttgtatctcatcctgtgactcagaatgcccaacctcctgggaatgcagcccagcaggtctcagccttattttacccagctcctattcaagatggagttgctctggctcaaatgcctctgacaccaacactcattattttctgttttttgttttgttttacagtagtcattctgatgggtatgaggtgatgaccaattgatttttgacagaggtgcaaaagtaattcaaaggagaaaggacagtctttccaaaaccagtgttgggataattagtcatcctgcaaaaaaatgaaccttgacctaaatttcaccttatacacagactagctaaaaattgattttacacgtaaatgttaaaattcaaagcataatatttaaaaaagaaaacagaagaaaattttcatgaactgaagttagacaaaaagttcttagatatgatgtcaaatgcctgatccactaaaaaacatgacaaattggattcataaaatttaaaacccatgctctgcaaaatacactgtgaagagaataaaaatacacaccacagacttggagaaaatgttgagaaatcacttatctgacaaagactagtattcagagtatataaagacctctcaaaactcaacagaaggaaaacagagtttaagtaaaaaatgggtaaaagacttgagcagatacttcatcaaagaagttatatcgatggaaaataagcacaagaaaatattttcaacatcattagctatcaggaagtgcaaattaaaaccatantgaggcttggggacagtggctcatgcctgtaatgncngcattttgggaagctga

SEQ ID NO: 1531 - DNA, 691 bp, Homo sapiens
  misc_feature (671)..(671): "n" may be a, t, c, g, other or unknown
  misc_feature (687)..(687): "n" may be a, t, c, g, other or unknown
  misc_feature (690)..(690): "n" may be a, t, c, g, other or unknown
gcggccgcggcgggaacatggaggagctgctgaggcgcgagctgggctgcagctctgtcagggccacgggccactcggggggcgggtgcatcagccagggccggagctacgacacggatcaaggacgagtgttcgtgaaagtgaaccccaaggcggaggccagaagaatgtttgaaggtgagatggcaagtttaactgccatcctgaaaacaaacacggtgaaagtgcccaagcccatcaaggttctggatgccccaggcggcgggagcgtgctggtgatggagcacatggacatgaggcatctgagcagtcatgctgcaaagcttggagcccagctggccgatttacaccttgataacaagaagcttggagagatgcgcctgaaggaggcgggcacagtggggagaggaggtgggcaggaggaacggccctttgtggcccggtttggatttgacgtggtgacgtgctgtggatacctcccccaggtgaatgactggcaggaggactgggtcgtgttctatgcccggcagcgcattcagccccagatggacatggtggagaaggagtctggggacagggaggccctccagctttggtctgctctgcagttaaagatccctgacctgttccgtgacctggagatcattccagccttacttcacggggacctntggggtggaaacgtancana

SEQ ID NO: 1532 - DNA, 728 bp, Homo sapiens
  misc_feature (711)..(711): "n" may be a, t, c, g, other or unknown
  misc_feature (722)..(722): "n" may be a, t, c, g, other or unknown
  misc_feature (724)..(724): "n" may be a, t, c, g, other or unknown
gctgatgctgccgtgcggtacttgtcatggagctggcactgcggcgctctcccgtcccgcggtggttgctgctgctgccgctgctgctgggcctgaacgcaggagctgtcattgactggcccacagaggagggcaaggaagtatgggattatgtgacggtccgcaaggatgcctacatgttctggtggctctattatgccaccaactcctgcaagaacttctcagaactgcccctggtcatgtggcttcagggcggtccaggcggttctagcactggatttggaaactttgaggaaattgggccccttgacagtgatctcaaaccacggaaaaccacctggctccaggctgccagtctcctatttgtggataatcccgtgggcactgggttcagttatgtgaatggtagtggtgcctatgccaaggacctggctatggtggcttcagacatgatggttctcctgaagaccttcttcagttgccacaaagaattccagacagttccattctacattttctcagagtcctatggaggaaaaatggcagctggcattggtctagagctttataaggccattcagcgagggaccatcaagtgcaactttgcgggggttgccttgggtgattcctggatctcccctgttgattcggtgctctcctggggaccttacctgtacagcatgtctcttctcgaagacaaaggtctggcanaagtgtctaangntgca

SEQ ID NO: 1533 - DNA, 644 bp, Homo sapiens
  misc_feature (581)..(581): "n" may be a, t, c, g, other or unknown
  misc_feature (592)..(592): "n" may be a, t, c, g, other or unknown
  misc_feature (625)..(625): "n" may be a, t, c, g, other or unknown
agcgcgagccccgccgccgccgagcatggacgaccccgactgcgactccacctgggaggaggacgaggaggatgcggaggacgcggaggacgaggactgcgaggacggcgaggccgccggcgcgagggacgcggacgcaggggacgaggacgaggagtcggaggagccgcgggcggcgcggcccagctcgttccagtccagaatgacagggtccagaaactggcgagccacgagggacatgtgtaggtatcggcacaactatccggatctggtggaacgagactgcaatggggacacgccaaacctgagtttctacagaaatgagatccgcttcctgcccaacggctgtttcattgaggacattcttcagaactggacggacaactatgacctccttgaggacaatcactcctacatccagtggctgtttcctctgcgagaaccaggagtgaactggcatgccaagcccctcacgctcagggaggtcgaggtgtttaaaagctcccaggagatccaggagcggcttgtccgggcctacgagctcatgctgggcttctacgggatccggctggaggaccgangcacgggcacngtgggccgagcacagaactaccagaagcgcttncagaacctgaactggcgca

SEQ ID NO: 1534 - DNA, 830 bp, Homo sapiens
  misc_feature (574)..(575): "n" may be a, t, c, g, other or unknown
  misc_feature (794)..(794): "n" may be a, t, c, g, other or unknown
  misc_feature (810)..(811): "n" may be a, t, c, g, other or unknown
cttggagactatttattacatgtatttttaagactttagataaatatccccaaattgccttccaaaaactttacagttctataaatgatatatgagactactgtttcttcacatattcaccaacacaatacttttttatttttgctattttgatggggagaaaagtttctcattttaattttaatccacattgtaaattgtgtagtgaaacatttttacacataattattaataatttggaagtttcttttgagaattacctgcttataatggcacattcatcttttatacctgagagttcttgagtttttaaaaactttgcatttagtccccttccaaaaataatctaataatatttaccataaatgggccgggtgcagtggctcacgcctgtaatcccagccctttgagaggccgaggcaggtgaatcacctgaggtcaggagttcgacaccagcctggccaatgtggggaaaccctgcctctactaaaaatataaaaattagccgggcgtggtggtgggtgcctgtagtcccagctacttgggaggctgaggcagaattgcttgaacccannaggcggaggttgcagtgagctgagatcatgccattgcactccagcctggatgacaagagcaaaaaactctgtctcaaaaaaaaaaaatttaccataaatgacatacaaaataaaaagtaataatctagaaatagtcaaaaactcaaaacgatggaaaaggaaggccgcattaaatagagctctcataaataagcatcaaatctgactgtccacaaaaangggaagccctgtaagnnatataattttaatcattaa

SEQ ID NO: 1535 - DNA, 862 bp, Homo sapiens
  misc_feature (784)..(784): "n" may be a, t, c, g, other or unknown
atctttactttgtgttgggagcattccagttcttctcttctaggtattttgaaatatacaataaattattactaacggtaaacaccctaccttaagttttcttctttaacatcttaatgtagtcaattatataaatatattctatttttaaacttgggtgagttaaaaacatatttgtctcaaaattctcttttgctgtctgaaatatccagattcatatctcgcgttgttgtctttgtgctaaccagcttctcagaaatattatttcacaacttcatggctttgcttagttggaggaattttggcacctggcttcttccttgctcagatccagagggcaggtagtgtttaagaaaacaggatttgcaattaggaagacctcagtttggattaggttcatccatttgatagttggtgaccgtggaccaagttacttctctgaatttcttttgcacagctataaatcaaggattataatccttcacaaaatcataagaatcaaagccaaataatgcatctaaaggtccagcccagggcttagcacactggtataacacaaactagctgttgttattataagtgtaaatcctgtggtatgcccctttatgacctgcagatgacattttccacttctactattgatcataggtaccttcatggttaagaacatgcattttttgcattgcaattttattcccaaatctattcatgtattcagcagtgaacccgaatacccggtatatgccagatccttgctaggctgggctgtgggtgatacctgttncacaagacaaatgtggctcaaagagacatgctcttggccttgtaaagcttgcagggaagatagcaattgagtatttgg

SEQ ID NO: 1536 - DNA, 795 bp, Homo sapiens
  misc_feature (703)..(703): "n" may be a, t, c, g, other or unknown
  misc_feature (783)..(783): "n" may be a, t, c, g, other or unknown
  misc_feature (792)..(792): "n" may be a, t, c, g, other or unknown
agaaagaggcttctccaacccggcccggcccttccttcccctttcccgcagtcgttgcctcctcctcccctgcctcctcctccccttcctcctcctggccgcttagtctcacacccgccgggccgttgttcccgagacgttgttgagtcccctgtgtcctcttctgggtggaggaactgcaatgtctggtggagaacagaaaccagagaggtactatgtgggtgtggacgttggaacaggcagtgtccgtgcagctctggtggaccagagtggggtcctgttggcttttgcagaccagccaattaagaattgggagccccagttcaaccaccatgagcagtcctccgaggacatctgggctgcgtgctgtgttgtcacaaaggggattcccatcgaaacgtcatcatgtggctggaccatcgagcagtcagtcaagttaacaggatcaatgagaccaagcacagtgtcctccagtacgtcgggggggtgatgtctgtggaaatgcaggccccgaaacttctgtggctgaaagagaacttgagagagatttgctgggataaggcgggacatttctttgatctcccggacttcttatcgtggaaggcaacaggtgtcacagcacgggctctctgctccctggtgtgtaaagtggacatattcagcagagaaaggctgggacgacagtttctggaaaatgattggnttggaagactttggtgcagataattcagcaaaataggaaaccaagtgctaccttctggagcttctcttggaaatgggctnacaccagangca

SEQ ID NO: 1537 - DNA, 718 bp, Homo sapiens
  misc_feature (646)..(646): "n" may be a, t, c, g, other or unknown
  misc_feature (662)..(662): "n" may be a, t, c, g, other or unknown
  misc_feature (675)..(675): "n" may be a, t, c, g, other or unknown
ttattattgtgaacttagtgacaagtgtggcactattacccatttccttgtctgcccccaaccctggggtcttgggcagagaacaggagttcttgccattttctcccagctcccaccttgtgctggcttgcgggtgctgaggtcatatttgctgggtgagagggtgcaggccagatatgagccaggcctggcagagagggttttggtcagcagtgatacctgcagtgttctctgcagttggtttgggctggccctgctcctgagaactcctgggttgtcccttcaggcaaccagggaaggctccttggagcagcagcatctccccttaccactcgccgacaccagcttccgcctgacccagagaaggagtttggggacagccacagcacgtccagggctcccaaggcagctggcagagccaatgaggagaccccaacacccatccgacggctgcagctctccctgacgtgtgtcacccgcagccctggtcccagccgctgtgcttctcagggcctgcctgcccagcccgggtggatatggtgcccaggcgggccccggggacacaatgagggccattctcagagccaggcagagcgtgtggggcagtcctgtcagtcctatgtgcaacagctgggatattggttanggagtgctggcatcangctggggcttttncttctctggcccttgcccttttgggatgagcaaagcccccaaa

SEQ ID NO: 1538 - DNA, 831 bp, Homo sapiens
  misc_feature (808)..(808): "n" may be a, t, c, g, other or unknown
  misc_feature (813)..(813): "n" may be a, t, c, g, other or unknown
  misc_feature (820)..(820): "n" may be a, t, c, g, other or unknown
aaagaaacaaaccaagctcttgcaagaattttccatatcaatgaaggcattgagtaggccatttgggctagctggctggtaaacagatggttgtgatactgtactaaactctcaacaggtgttgtggaagagttcagtattgtcaacaatatttttgatctgcagttggttgaatctgcagatgcaaaaccagtggatacggaggcctggctgtatggtattacacaggaagagtttactgagtgagaaatgaggtcaaggatattctaggtggtcttagaaaagcagtcagcaaagggttttgagaaaagaagaaaatgtttcttgagaagattaagagtaacatattaaacgctgcagtgtatttaaggctttggcattctttccaactcatagattgtcctcagcagtagataagattacttaccttaacctatatcatttctattcaagtctgtagaacttttttcatcttcttttcttctttttttttgcatgagtatcaattaaggaaaaacaacaacaaccatgtttacaatttattaggttccctgcagatatacgtggtatctgatcagaatagggaatacttttaaagcaagaagctaacaattttttttcacacctgcaatccttgatacatagaaggaaatctgattgcgaagacctctgttcatacagaataaccttaaagatataggctagtcttatttcatacctaagtgatatcaagtgtgtcaataatcattgatagtgaaattttccatcaacacagggtgcctatgagaattaagatgatccaattccngagtnttttgcngtagaaacctg

SEQ ID NO: 1539 - DNA, 841 bp, Homo sapiens
  misc_feature (685)..(685): "n" may be a, t, c, g, other or unknown
  misc_feature (723)..(723): "n" may be a, t, c, g, other or unknown
  misc_feature (770)..(770): "n" may be a, t, c, g, other or unknown
  misc_feature (820)..(820): "n" may be a, t, c, g, other or unknown
  misc_feature (833)..(833): "n" may be a, t, c, g, other or unknown
gatcacgccactgcactccagcctgggcaacagagcgagactccatctcaaaaaaaaaaagtcacgattctgtgaatactcagttctgagttcgaatcttacctctgtgctcacactgctagcagaatgaccgggtaaatccctgtgcctctgtttcctcctcggtaaaatgggcttgatgctggccgggcatggtggctcacacctgtaatcccagcactttgtgaggccgaggtgggcagatcacctgaggtcaggagttcgagaccagcctggccagcatgatgaaaccctgtctctactaaaaatacaaaaattagccaggaacgatgtcatgtgcatgtaatcccagctactcagaaggctgaatgaggcaggagaatcgcttgaacctgggaggcagaggttgcagtgagctgggattgcgccactgtactccagcctgagccacacagcaagaatccgtctcataaaaaaaagggctgatgctgtccacttccaggccccattatagagatgcagtagagatcaggtgtgtcctgtacctggcactgggtctgatgcttaggaggccttcattcagtgacttgagagtgcttttttttggtggttatcaaataacaatagtgaacattcatgaagcagcagctacatgccaggcttctatgtctattgcctggctcantgcccctaacaactctgtgaggtagatcctaatatctncattttacagctgaggacataaggccagagaggttaagtaacttatncaagggcacacagctggtaagtcaagaagcagattccaactttggcttcngaatcttatttgnaatcactg

SEQ ID NO: 1540 - DNA, 851 bp, Homo sapiens
  misc_feature (840)..(840): "n" may be a, t, c, g, other or unknown
tagtaagtttggaaattgggaagtgtgagtcctccaactttgttctttttcaaggttgttttggctactctgtgtcctttgcatttccatgtgaatttcaggattcgtttgttaatctcagattgaattttgctagggattgcattgaatctgtatatcaatttagagagtattgcctcttaacaatgttaagtcttccaatccatgaacaggcatgcctttatctaaatattctttcatttctttcagtgatattttgcagtttttcagcatatgaaccttgtacttattttgttaaacttagtttttatactgttctaaactgaattgttttcttaatttctcttttgagttatagattactagtgtataaaaatacaattgattttttgcacattgatcttatatcctgcagacttgctgggctcacttatcagctcaattggttttacaatctcttcttaatctgtatttctatccatatcagtctcctgagttccagacctttacttccaaccacgtttggatgtttccacttagttgacctcatagagatatctctaacttaatatgtccaaaattaaagtcatccccttcaccccacttacaacaaacacacaagccaaccttttcccttctgcagtttgcgtatctcaggtattatcatttgcctggttgcccaagcctctaatatgagaatcatctttgattcctcactggttcaccctgtatagtcaggtagttctaactcctacgtagatctcaattctatccctcttctggattggcactaccctggctcaggttttatcattctctcctagaatatttcaataattncttactgggct

SEQ ID NO: 1541 - DNA, 838 bp, Homo sapiens
  misc_feature (797)..(797): "n" may be a, t, c, g, other or unknown
  misc_feature (802)..(802): "n" may be a, t, c, g, other or unknown
  misc_feature (831)..(831): "n" may be a, t, c, g, other or unknown
gatatatggaagatttaaacaccattcattctttgtttttccacaaaggaccgtcctccttctaatatttggaagaaaatagatcaatccagggactataaaaatggcaatcaactcagggaatatcaactggaagggctcaactggctcttgttcaattggtacaatagacgaaactgcatcttagcagatgaaatgggtcttggcaaaactattcaatcaattacattcctctatgaaatccttctgactggtataagaggacctttcctgattattgctccactttctactattgcaaactgggagagagaatttcgtacgtggactgatattaacgttgtggtttatcatgggagcctgattagcagacaaatgatacagcaatacgagatgtacttcagggattcacaggggcgtatcattcgaggagcttacagattccaagccatcatcaccacttttgaaatgattcttggaggctgtggagagcttaatgcaattgaatggcgatgtgtgattattgatgaagcacataggttaaaaaataaaaattgtaaactcttagagggcctgaaactcatgaatctggaacacaaggtgcttttgactggcacccctctccaaaatacagttgaagaactatttagtcttcttcactttcttgaacccttaagggttccttctgaatcaacatttatgcaagaatttggggatctggaaacagaggaacaggtacagaaacttcaggctatcctgaaccaatgatgttgagaccattaaaaggaagatgtggnaaaanaagttggcaccctaaggaagaaaccatcnttgaagt

SEQ ID NO: 1542 - DNA, 806 bp, Homo sapiens
  misc_feature (747)..(747): "n" may be a, t, c, g, other or unknown
  misc_feature (785)..(785): "n" may be a, t, c, g, other or unknown
  misc_feature (794)..(794): "n" may be a, t, c, g, other or unknown
aggattgcttgaggccaggagtttgagaccaccctgggcaacatggcaagaccctatctctacagaaaagaaaaaaattagctgggtgtcatggcatgcacctgtggtactagctgcttgggaggctgggcccaggagttttaggttgctgtgagctgggattgtgccactgcgctccagcctgggtgacagagcaagaccctatctctaaaaataaatcagtttttttttttttaaaagaaaactaatttaatgaaataatagatgaaaacttctcaagtctaggaagagatatagacagtcagataaaggaagttcaaatgaaccacaggaagatacaatgataaaagatcttctgcatggcacattatactcagactgtctaaagtcaaagagaaaatcttaaaagcagcaagagaaaagcatctagtcacccataaaggaaattccttaagactaacaaatttctcagcagaaacattacaggccataagagaatggggtggtatattcaacatgctgaaagaaaaaaaaacgctgccacccaagaatactatatccagcaaaattatctttcataaatgaaggagatataaagtcaccccggacaaacaaatggtgaggtaattcattactactagaccagttctacaaatgctcaagggagtcctaaacatagaagctaaaggacaacatttaccattatgaaaacccccaaaagtttaaaagtcactggcaaagcagttnttcaaaggaggaagtgaaagaactcaaatgctccactncagaaatcnccaaagcacatg

SEQ ID NO: 1543 - DNA, 838 bp, Homo sapiens
  misc_feature (79)..(79): "n" may be a, t, c, g, other or unknown
  misc_feature (148)..(148): "n" may be a, t, c, g, other or unknown
  misc_feature (550)..(550): "n" may be a, t, c, g, other or unknown
  misc_feature (622)..(622): "n" may be a, t, c, g, other or unknown
  misc_feature (679)..(679): "n" may be a, t, c, g, other or unknown
  misc_feature (749)..(749): "n" may be a, t, c, g, other or unknown
  misc_feature (779)..(779): "n" may be a, t, c, g, other or unknown
  misc_feature (822)..(822): "n" may be a, t, c, g, other or unknown
aaatatgattgtcccttcagtgggacatcatttgtggtcttctctctctttttgatctgtgcaatggctggagatgtantctacgctgacatcaaaactgttcggacttccccgttagaactcgcgtttccacttcagagatctggtnagctggatttagggtgcctttgagaattaagattttactagttatctcctttatttctttcttatgtatctaattgccaaactgaaaagaggagattggattcaaagcaaaattcattgaatgctaagaatgagagcgaatgtttttaatgaagcaaaatgtctgttcataaaataaattgccactttggttttaatatgtagaactttgcttctgttttcatagcctttctatttcttgatttctcgtgatgaatgtttacattcacacagcaacttctagcgggatcacgcctttctgctccacagctttgctcactctcaatcaaatctgaccttttaacataatgtgataaattcatctccactgggaaaaatacctgtggcaatttactcatattgntatttattcttttacaatatcaataggataaaaatgtaaacttaagaaaacatgaaacgttagatttaattntataaagtctagaattaatgactaggtaattgaatatttctggaatcagaggcgatnagcatatgcctaaacttaacatggtgccttcatcaccaaaccccctcaaaaaattatagattttcatagncagtgtcttttctattctttgaagtattanaggaaatttctctggcttggtacatttccattctctgctctangggtaagaatttttgg

SEQ ID NO: 1544 - DNA, 831 bp, Homo sapiens
  misc_feature (751)..(752): "n" may be a, t, c, g, other or unknown
  misc_feature (806)..(806): "n" may be a, t, c, g, other or unknown
aaaaaacaatatcgtttgctgtcacttaaatatcatccagataaaggaggtgatgaggttatgttcatgaggatagcaaaagcttatgctgctttaacggatgaagagtcccggaaaaattgggaagaatttggaaatccagatgggcctcaagccacaagctttggaattgccctgccagcttggatagttgaccagaaaaattcaattctggttttacttgtatatggattggcatttatggttatccttccagttgttgtgggctcttggtggtatcgctcaatacgctatagtggagaccagattctaatacgcacaacacagatttatacatactttgtttataaaacccgaaatatggatatgaaacgtcttatcatggttttggctggagcttctgaatttgatcctcagtataataaagatgccacaagcagaccaacggataatattctaataccacagctaatcagagaaattggcagcattaatttaaagaagaatgagcctccacttacctgcccatatagcctgaaggccagagttcttttactgtctcatcttgctagaatgaaaattcctgagacccttgaagaagatcagcaattcatgctaaaaaagtgtcctgccctacttcaagaaatggttaatgtaatctgccaactaatagtaatggcccggaacccgtgaagaaagggagtttcgtgctccaactttggcatccctagaaaactgcatgaactttctnnatggccgtcagggcttaacaattaagctccttctgcagctcctctatgaaaggncatctaaacggttctaacatagaag

SEQ ID NO: 1545 - DNA, 850 bp, Homo sapiens
  misc_feature (656)..(656): "n" may be a, t, c, g, other or unknown
  misc_feature (714)..(714): "n" may be a, t, c, g, other or unknown
  misc_feature (781)..(781): "n" may be a, t, c, g, other or unknown
  misc_feature (797)..(797): "n" may be a, t, c, g, other or unknown
  misc_feature (816)..(816): "n" may be a, t, c, g, other or unknown
aatgcgcttgcgcacgtgctgtctaccagttcctgagagggacgcgtgccgcggagccaggcttactacgtgacccggacaccaggcatacgctaggggcagtcagctgtgccttctctttcggagttgttccgtgctcccacgtgcttccccttctccactggctgggatcccccgggctcggggcgcagtaataatttttcaccatgcatcggaaaaaggtggataaccgaatccggattctcattgagaatggagtagctgagcggcaaagatctctctttgttgtagttggggatcgaggaaaagatcaggtggtaatacttcatcacatgttatccaaagcaactgtgaaggctcggccttcagtgctgtggtgttataagaaagagctggggtttagcagtcaccggaagaaaagaatgcgacagctgcagaagaaaataaagaatggaacactgaacataaagcaggacgacccctttgaactcttcatagcagccacaaacattcgctactgctactacaacgagacccacaagatcctgggcaataccttcggcatgtgtgtgctgcaggattttgaagccttaactccaaacttgctggccaggactgtagaaacagtggaaggtggtgggctagtggtcatcctnctacggaccatgaactacttaagcaattgtacacagtgactatggatgtgcattccangtacagaactgagggccatcaggatgttggtgggaagatttaatgaaagggttattctggctctggncttttgtaaaaagtgntcgcattgatgaccagttnaaattctggccatttcttccacgttgccccatgg

SEQ ID NO: 1546 - DNA, 846 bp, Homo sapiens
  misc_feature (586)..(586): "n" may be a, t, c, g, other or unknown
  misc_feature (644)..(644): "n" may be a, t, c, g, other or unknown
  misc_feature (665)..(665): "n" may be a, t, c, g, other or unknown
  misc_feature (829)..(829): "n" may be a, t, c, g, other or unknown
  misc_feature (843)..(843): "n" may be a, t, c, g, other or unknown
  misc_feature (845)..(845): "n" may be a, t, c, g, other or unknown
cagttacagtttcctggagggagtggatattttcctaagcacttgggctatatcagagaacagaataataccatacattccagaaaatgttgtcatcttcagcttaatactaaaaccctgaacaaaaaaagttttggccaggcacggtagctcacgcctgtaatcccagcactttgggaggccgaggcaggtgaatcacgaggtcaggagatcgagatcatcctggctacagtgaaaccccatctgtactaaaaaatacaaaaaattagctgggcgtgatggtgggtgcctgtagtcccagctacctgggaggctgaggcaggagaatggcgtgaacccgggaggcggagcttgcagtgagctgagatcgcgccactgcactccaacctgggcaacagagcgagactccatctcaaaaaaacaaaaataaaaaaaataaagtttttgcttcagaacaccttgtggagctcttgaaacttctggcgagggcgtcacctgtgtgatgtggggtaagaagtcttcttcgttctatccgcagaaaccatagaatgtggctttcatcagttggttgaccaggttggcttangtgttacagtgccagcaacatttccatgagcttcttgctcagtgcctctctctgccgnctgcactttctgcatttctangctcccatcgttgcagacagatggaatcgcgggcacttctgtccaactcaccttccccaaaagccaagccctatgaaggcagccagaggaacttcactgacttggttccccactggcttgtcccaaaagaagcccaaaggacccaccccttcaacttccaaagnttcggaaatctggnant

SEQ ID NO: 1547 - DNA, 820 bp, Homo sapiens
  misc_feature (650)..(650): "n" may be a, t, c, g, other or unknown
  misc_feature (745)..(745): "n" may be a, t, c, g, other or unknown
  misc_feature (772)..(772): "n" may be a, t, c, g, other or unknown
  misc_feature (815)..(815): "n" may be a, t, c, g, other or unknown
tgtgatacagcacataaacagaattaaaaacaaaagtcacatgattggagtgttggcaagatggctgaataggaacggctctggtctgcagctcccagcaagaccaatgcagaaggtggatgatttctgcatttccagctgaggtacctggctcatcacactgagactggttagacagtgggtgcagcctatggagagcaagtagaagcagggtagggcgttgcctcacccaggaagtacaagggggtggggaactccctcccctagtcaagggaagccatgagggactgtgctgtgagggactgtgttatctggcccagatactatgcttttcctacagttttcacaacccacagaccagaagattcccttgggtgcctacaccatgagggccctgggtttcaagcacaaaactgggcggccatttgggcagacaccgaggtagctgcaggagttatttttcttacctcagtggcgcctggaaccacagcaagacaaaaccgctcacttccctggaaagggggctgaagccagggatctaagtggtctaactcagtggatcctacttccatggagcccagcaagctaagatccactgggttgaaattcttgctgccagcacagcagtctgaagtcaacctgggatgctncagcttggtggggggaagggcatttgccattctgagcttgagtaggcgttttcccttacaatgtaaagaaagccatgtgggaagtcgactggcanacccactgggtgcggaaaacccttgtnccagctgcctttctagatcgccttttggcagcatataaggtcntaatc

SEQ ID NO: 1548 - DNA, 855 bp, Homo sapiens
  misc_feature (706)..(706): "n" may be a, t, c, g, other or unknown
  misc_feature (817)..(817): "n" may be a, t, c, g, other or unknown
  misc_feature (844)..(844): "n" may be a, t, c, g, other or unknown
gacactcttgattaatgtgatccagaaccattgtgaatatccacatttgaaaatgccactattacatgtattttcacctatgaaatgtaaacatgagaatgggtcacaaaccttgctgagatacagatgctaaagagcctgctagatgtattcattaggtacaccattcacatgcgtgcacaagcctcaaagcatgttattcaaatttgtgccttagcaaaatgatgcctgctatacatcatgggtatttggagctcccacaaagagtagaaattgtaaacgttagatccctgaatgtcagtgatctactatagatgtaactattgttggtatgacacttcacacatcagttagaataatatcgcccaactttaagatctaacaatggcttgctgtaatattttattgatgatttttaaagtaagcatactatagctgaattcttctaaattttattttatattcaaatataaaataattactataaaaaacaaaatcacagaatggatccacatatatactgtcatatatgtgacaaaacattcacatatatactgtcaattgatttttgacaaaagcaccaatgcaattcaatggggaaatggaacttcaacaaatggtactagaacatctggatatctaaatgtggtgggagggaatcatgaatttttttcacatagcatacacaaaaattaatttgaaatgngtcattgatctaaatttaaaaaccaaaactatccacatttagaccaaaacatctaagactatctttgaaagctgggggtaaagaaagatttctaggacatagaaggcattnttagagaagacattcccaatggacttntcaaaatttaa

SEQ ID NO: 1549 - DNA, 772 bp, Homo sapiens
  misc_feature (748)..(748): "n" may be a, t, c, g, other or unknown
  misc_feature (760)..(760): "n" may be a, t, c, g, other or unknown
  misc_feature (764)..(764): "n" may be a, t, c, g, other or unknown
gaaaaatgatgctctccccacttctctcccttccgtaagtatttcctaagtgcctactatgtaccagataccattctaggtgcaggggacatgtctgtaaacaaaacaaagtcctttctcttaaggaggttactttctagtagagacagacaaataaattaataaagagaggctctatcagaggtgaaagttctctgcagaaaatcaaagcagggggccaggtgtggtggctcacgcctgtaattccaacactttgggaggccgaggtgggcggatcatgaggtcaggagttcaagaccagcctgaccaacatggtgaagccccgtctctgctaaaaatacaaaaattagccaggcatagtggcatgtacttgtaattccagccactagggaggctgaggcaggggactcacttgaacccagcaggtggaggttgcagtgagctgagatcgcgctactgcactccagcctgggaaacagagcaagactctgtctcaaaacaaaacaaacaaacaacaaacaaacaaacaaaaatcaaagcaaagcaaggtaaggagatatgaagatctccaggaaggagaagtggtcagaaacagaatgagtcaggaaaggtcagggtaataaggtgttgtctgagtaaaggcctttgtagtgaaaggggagcagatagatacctacgtaaggaatgcccctggcagagaaaagagcagggacaaaggccctgtgcaggaagaattcaaggggccaantgcagaacccanggangtggctga

SEQ ID NO: 1550 - DNA, 818 bp, Homo sapiens
  misc_feature (775)..(775): "n" may be a, t, c, g, other or unknown
  misc_feature (779)..(779): "n" may be a, t, c, g, other or unknown
  misc_feature (818)..(818): "n" may be a, t, c, g, other or unknown
gatcacgccattgcactcctgcctgagcaacaagagcaaaactccgtctcaaaaaagaaaaaaaaaaaatcagccgggcatagtggcgggtgtctgtaatcccagcaactcgggaggccgaatcacttgaacccgggaggtggaggttacagtgaaccgagatcgtgccactgcactccagccccggcaacagagagaaaaaagaaaatgtggtcaggctctgtgttctactgtcttccctcctgttttctttccctttgtattatttttgattttctttactatcatcttagagagatcctaagagaaaactgagacgaacacatgtgtttaggcctgccatgtggaaatggcggtctctattcattctatttacacggaaacatttaacaagcagctcttgaggaggccagagaggtgcaggcctagccctgtcagcaccaccctccacagatgcccaaacagccccagcgcatttctttaccttgatttctttcctactcatttcctccagctgtgcaagggtaaaggcaaaagcacaaagacctgggttggaccctgcctccatttgccgcaccatgatcttaccacatggattcttagagcgtaactgctgccccatggaccaggttagctaagagaggttccatgaaactgctgttgcagaaatgcttctaactataaaatgccaaacctgggaaagaatgtttggattctcatagcctggatcagtaggacactgccttggcgttgctggtgccccaccccaacttanccangccagggggaaggtagagccccagcccctgagacccttn

SEQ ID NO: 1551 - DNA, 851 bp, Homo sapiens
  misc_feature (646)..(646): "n" may be a, t, c, g, other or unknown
  misc_feature (790)..(790): "n" may be a, t, c, g, other or unknown
  misc_feature (804)..(804): "n" may be a, t, c, g, other or unknown
  misc_feature (839)..(839): "n" may be a, t, c, g, other or unknown
tagccaacaatttacaaataataaaatatacattgcttgtattataaattccatttagccagttgattctcagagactgcttccattgatttttgccgaattctggttccataaccagccgatggctgccatgcatgaacagttgtctttccagcgtaaatattgggtaatatttttgccacagaaacaacaaagacatatgtcagaacttcattcactcaccagggatgggaacaacttccttgctaaattggaaaataattttcaaatactgaaagaatatctcttcagttttgtatgctgttcacagtgtaatacctacagacacgaaacacttttaagttatacctgcagtattaatgctttctccatcactttcttaagcccagaaaatcaacagtaaacccagcccttgtttgtagcatttgtcgatttccatatgggaatatcccgccatggccaatttcaagctgctcacgtgacgtcactgaagacgggttggtaaaagaggggtccagtagccaccatgagatagtgcttcccctgtgtagatagaacagatgtgagtaaccctgaagcacagataatgacaaaatatagtgagatcatgaggaaggggcaatttgtgaatattcattacctttgnttttagtataatttattcaattgtaagcttctataatttaatgtttaataaagactgtgtttaacaaccagctcacaaaggttctgaaaatgttcacaatcagttccgttaagccagtgctggtcggctgcagcgcaccactgnatattgggaattgnacgggtagaaggttggctttctcttgggacaagcncctttaagggga

SEQ ID NO: 1552 - DNA, 414 bp, Homo sapiens
  misc_feature (245)..(245): "n" may be a, t, c, g, other or unknown
  misc_feature (410)..(412): "n" may be a, t, c, g, other or unknown
cttataatgagtttatcaggacataaccccatcatcagtcaaggtgctcccatagtatggaatggctggaagtggggggtagttaaaaagagccatgtgggctgggcgcgatggctcacgcctataatcccagcactttgggaggccgaggtgggcggatcatctgaggtcgggagttcgagaccaggctcaccaacatggagaaaccccgtctctactaaaaatacaaaaaaaaaaaaaattanctgggcatggtggcgcatgcctgtaattccagctacccagctacccagctacccggctgaggcaggagaactgcttgaacctgggaggcagaggctgcggtgagccaagatcgcgccattgcactccagcctgggcaacgagcaaaactccgtctgaaaaaaaannnaa

SEQ ID NO: 1553 - DNA, 243 bp, Homo sapiens
  misc_feature (207)..(207): "n" may be a, t, c, g, other or unknown
  misc_feature (228)..(228): "n" may be a, t, c, g, other or unknown
  misc_feature (241)..(241): "n" may be a, t, c, g, other or unknown
ttgctacatcaaagagagagatccttttgtttgtttgttcgtttgttttttgagactgagtttcgctctttcgcccaggctggagtgcattggcatgatctcggctcactgcaacctctgccttctggtttcgggcgactcttctgcctcggcatcccgagtagctgggatgacaggtgccagccaccatgcccagctaatttgagnatttctagcggagatggggtntcaccatgttggnca

SEQ ID NO: 1554 - DNA, 866 bp, Homo sapiens
  misc_feature (741)..(741): "n" may be a, t, c, g, other or unknown
  misc_feature (770)..(770): "n" may be a, t, c, g, other or unknown
  misc_feature (803)..(803): "n" may be a, t, c, g, other or unknown
  misc_feature (863)..(863): "n" may be a, t, c, g, other or unknown
caataaaattgtctaattgtcattctaaccctattatagcagtttctcaaactcttaaaaaatggaaaagatgcctgtagtgtttaatgttatgcctcaaaccttacttttcccccagttttcttttacatcagtgcaaagcactctttatgagcactaaatgtgggtaaaggtacaagtcagagagcacctgtttagtatatgtggcattttaaattgagtccttttggggtactagtctatcaagagagacacattttcttatccatgtcaattttgcttcctattttcttatccatgcctttcacttggaatgacaacagttgacattaaaaagctgttggcaggtatggaataaccttattctgttaccaaatagcaaagaccaaagtgcatgtgaggtgtctcacaggtttaataaatcagcaattacatctctcgagtgtgatatttataggtggcatttagaacttggggcgtaacaatgcgtacaaagacatcattctatctgcacctaatgtccgaaattcctactgctccagcaaaatttctgacgtgttagtttcaggagtagcacgcaaactgtgttttttaagttatgcagacagcaacctgtcctacatgcaagtcacaatcactcatgaaaattagtttatgttgcttatagcttcgcagcttgtgagctttcactagagccgaggaagacttcaaagcgactagatgttagcacttctgccgaanggatatttcctggatttcactccatgtgntttatcccttcttccatctaaggactctagctnctaaccttcccggccttaaggggttaccacaggcatttttaaccgcattccctttttccnttt

SEQ ID NO: 1555 - DNA, 859 bp, Homo sapiens
  misc_feature (823)..(823): "n" may be a, t, c, g, other or unknown
  misc_feature (835)..(835): "n" may be a, t, c, g, other or unknown
  misc_feature (857)..(857): "n" may be a, t, c, g, other or unknown
gagaaagaataggtcagaagcaatagtaaaagacataataacttgagaatcttccaaaactaatacagacttgcatatttgagaatcactgtagctctaagcagaatcaataccaaaaaacaaaaataaagggaaaagagaggaaaaattgccaaaacaaagaaaatcttaaaatcagccaaaggaggaaaaagatacattaccttcaaaggagcggcagtaaagacggacagtctactttgcaaagaaatggaaatcaaaatacagtggaacgatatcttcaaagtgttgtaagaaaataactgccaacctagaaatctgtatgaagcaaaaatatctttcaaaaatgaagtgagaatatagacatcttcagacagacaaaattagaattcatcaccagcagatctacactagaggtactataaagaaagttcttcaggtaaaaggaaaattatcccagctggaagcatggagatgcaggaaggagtaaagagcactggaaaggatagatagacgaatacatctaaaataatgtgaactgtgtaaaacagtaaaaatattgataggtgcagcaaaccaccatggcacacgtttacctgtgtaacctgcacatcctgcgcatgtacctggaacttaaaaatttttaaagtaaaaataataaatggcaacagcaacacagaaagctggaagagagttctgatgggggaaaaacacaggttatttttcctcggctctcactctacaacagtgatcatcacagaggacttctttgaccaaatgtgtggatttcttccccacgtgccaaggcaaggccatcagtttntgcaatgggccnccaacttgggtcgggcttaacncc

SEQ ID NO: 1556 - DNA, 714 bp, Homo sapiens
  misc_feature (594)..(594): "n" may be a, t, c, g, other or unknown
  misc_feature (668)..(668): "n" may be a, t, c, g, other or unknown
  misc_feature (692)..(692): "n" may be a, t, c, g, other or unknown
  misc_feature (695)..(695): "n" may be a, t, c, g, other or unknown
cggccgtcagcttccaccaggtggacttcaccttcgaccggcgcgtgctggccgccgggctgctcgagtgccgcgacctgctgcaccaggccgtgggtccccacctgaccgccaagtcccacggccgcatcaaccacgtgttcggccacctagccgactgcgacttcctggctgcgctctacggccccgccgagccctaccgctcccacctgcgcaggatctgcgagggcctgggccggatgctggacgagggcagcctctgaaccccggcgccgcccaaccgcgcccctcgcgccttttggggctctcctgctgggcgcgggtggggtttgtgggtttttttccacctcttttctcccaatcggactccggccaaactcccctagacagatgggtgacctgtctcctttgagaggatgctgaggcatctgtagcagctgtttcaaacaccaatgtcacctctcctcctggcccccgcccaatggggagaggaatttggggccctactctggggaccacctttcacccgtttgtactttctgggccacgccgacccctgggtcgcttgatgtaaaagccaaaagctgctgcctnccacttggatcatgtcgcctgggattttcatccctcgacaaggactaggggttcacacggtgaactgggggaanggaagtgttaagggggcaagtcgnggnaccccccctttcataaact

SEQ ID NO: 1557 - DNA, 803 bp, Homo sapiens
  misc_feature (677)..(677): "n" may be a, t, c, g, other or unknown
  misc_feature (741)..(741): "n" may be a, t, c, g, other or unknown
  misc_feature (752)..(752): "n" may be a, t, c, g, other or unknown
  misc_feature (789)..(789): "n" may be a, t, c, g, other or unknown
gctaggtcggctttaaaatcgatgcagagtaattgcagtacatgggtagttggatgacattaacatgagaaatgtgctgtagtcgtcatccttggaacaaacacgtccaattacagtgaaattctgtgccccttacccggctaatttgaacacagctcaccgccaaggcctcctccagcatggccagccctgggcagagatcgtcacgaatggatttgacgggaatggggctggggactgtcatgttgaagcccggtggagatgtgggacagggacctcgtttgttccagagcctgttccaaccctccctggcttttgtggcatgttttctatgccgtttgctgcaaggatgcgttgggcatggagtaacattcccgagaccgtcctgcagtactgcacgtgtgcgtgtctgtgctttggtttgtctgtgtgtctaccttgttttagagtaaaaaagtgaatctgaggccagatcatcagtctgcacctgcctctcctcagtataatatcaatacagaagaattatattcctacctaaaggaattcatccacatactatatttcaggcatctattggtgaatcccagagaccgccgagttgtgattatcgaatcggtattatgtccttctcacttcagagagacactcactcgtgttcttttcaaatattttgaggntccatctgtcttgcttgcttcaagtcatctaatggctcttctgacgcttggaattaattcttgncatgggcctanattggggatatagggaaagcctggtgttacccatatntgaaggaatcccaa

SEQ ID NO: 1558 - DNA, 698 bp, Homo sapiens
  misc_feature (638)..(638): "n" may be a, t, c, g, other or unknown
  misc_feature (644)..(644): "n" may be a, t, c, g, other or unknown
  misc_feature (689)..(689): "n" may be a, t, c, g, other or unknown
gaattttgtggggacacagatagtgagattatagtggttgttcatctcttccctgccatgccatgcacacacgtggcaccttgggtttgtctggggggagaatgatgttcccgttatcccgatggtgtccagcttttgtatttgtcatgtcagctgctgggcctgtcttagaagttgctaataacttccactttaatattactcttattgatgcattgggtttttttattgaccaataaataatttaggcattggcaatgttaagaccataacataaaccttttctaagtaatttttccatattgagcttattagcatcttttggtatctgctgggtttttagctttacaacaggcactcacatataaacatgtttatcctatttagatttgtagttcctgggagtcagagttctgtgagcagtcttaacttataaagcatgttcagacatgcttttcagatgattttgtttcattttaaaaggggaaatggcattaacctaataggaattctcctcctgaacctcagaggcagcagatggtacagctctctttgaactttactgcccaggtgaacgttctctgcatttagatcttcaggagttttacagactagtgtggagtgggacatgtaagggncaagangaagaggcaggtttcaacttgagctcttcttcctccttaaagcanggacaagtg

SEQ ID NO: 1559 - DNA, 694 bp, Homo sapiens
  misc_feature (622)..(622): "n" may be a, t, c, g, other or unknown
  misc_feature (679)..(679): "n" may be a, t, c, g, other or unknown
  misc_feature (686)..(686): "n" may be a, t, c, g, other or unknown
gaatattgtgcatttaaaagagatgaggtttcaccatcttgcccaggctggtctcaaacccctgggttcaagcgatcttcctgcctcagcctctcaaagtacagagattacaggcatgaaccaccgtgcctggtcctatttttaattttttgaggaaactccatactgtttttccataatggttgtactaatttgtattcccaccagcagtgtgcgagggtttcctttcctttacatcatcaccaacacttgttcattgtttttatagtagccgttctaacgagtgctaggtgatatctcattttggtttgttttttatttatctatttttgatggagtatcactctgtcacccaggctagagtgcagtggcatgatctcagctcactgcaacctcagcctcccaaatagctgggattagaggtgtgcactatcacggccagaaaatttttgtgtatttagtagagatggggtttcgccatgttgcccaggtaggtctcgagctcctgacctcaagttcaggtgatctgcccacctcagccttccaaagtattgggattacagacatgagccaccatgcccaccctaattaacagtatttgtcaaattttaatgtgcatcanattcttaggtttcagctggcatctgtttccagctcttggtgctatttgcaaccttgnatcttangatgaagc

SEQ ID NO: 1560 - DNA, 770 bp, Homo sapiens
  misc_feature (711)..(711): "n" may be a, t, c, g, other or unknown
  misc_feature (725)..(725): "n" may be a, t, c, g, other or unknown
  misc_feature (746)..(746): "n" may be a, t, c, g, other or unknown
actagcgaccggtgacctctttttcccccttgcctggctcctgtggtggcaggctgggcacgaggaccatgctgggccggagcctccgagaagtttctgcggcactgaaacaaggccaaattacaccaacagagctctgtcaaaaatgtctctctcttatcaagaagaccaagtttctaaatgcctacattactgtgtcagaagaggtggccttaaaacaagctgaagaatcagaaaagagatataagaatggacagtcacttggggatttagatggaattcctattgcagtaaaagacaatttcagcacttctggcattgagacaacatgtgcatcaaatatgctgaaaggttatataccaccttataatgctacagtagttcagaagttgttggatcagggagctctactaatgggaaaaacaaatttagatgagtttgctatgggatctgggagcacagatggtgtatttggaccagttaaaaacccctggagttattcaaaacaatatagagaaaagaggaagcagaatccccacagcgagaatgaagattcagactggctgataactggaggaagctcaggtgggagtgcagctgctgtatcggcgttcacatgctacgcggctttaggatcagatacaggaggatcgaccagaaatcctgctgcccactgtgggcttggtggtttcaaaccaagctatggcttantttcccgtcatggnctcattcccctggtgaattcnatggatgtgccaggaatcttaacc

SEQ ID NO: 1561 - DNA, 693 bp, Homo sapiens
  misc_feature (627)..(627): "n" may be a, t, c, g, other or unknown
  misc_feature (665)..(665): "n" may be a, t, c, g, other or unknown
  misc_feature (689)..(689): "n" may be a, t, c, g, other or unknown
agctggaaggagggaggttagagccacccatgggttcagaagctgataagcaggttattgactctgaatttgcctcatcgtatgtaaattggggacaaatttggggatttaatgatataatgtaagaagcagacatgtcacagccctggttatacagtcagtgtataataagtggtaagccgtcagaggaggcagccggtgagaatgggagcatctcagcagccctccgccccctgctcctggttgcagatgtacctgttcttggctatttgtgccccagctccgtgtcctccggtgtgtgtgaggccaagctcctggggtggggacttgggggtgtgtctgcagctcctgaggccaagaccaaggctgaggccgaggctgaggctgaggccaccttggtgaggaggaaattgcaggtggagaagctcgttgaccgtgaccttgatctgaccgtaattttgatggtgccgatgccgtcagcacgcaggcctcctgccctcgccacgactggctcctgcagcccacctggctgagaggtgtgctggctctcgcaggttgcaaaatggggacatcaccgtccgcctgggctacagcgtgctcgccgattgcatttggggagggactganggctgattgtgttgtggggatgttgcagagaattaganaaggcattccaaaaaggccaacanttcg

SEQ ID NO: 1562 - DNA, 689 bp, Homo sapiens
  misc_feature (675)..(675): "n" may be a, t, c, g, other or unknown
  misc_feature (680)..(680): "n" may be a, t, c, g, other or unknown
  misc_feature (687)..(687): "n" may be a, t, c, g, other or unknown
tcatccatgtggatacatgtagctatagcttattgatttttccatgtgaaccttttgaaatactggatattaattcaagacaagttctttaaatttgagcctaaaacccagtagcactctgtacattgaaaatttcagattcataagaaaccatcagtcctgactggaacttcataatttgttcatttgtctgtgttttgggggaaaaaactttaaaacctcaaccatttatcaaggaatttgattaaaaaaaataatctatcaagtggctgatctcttacattaagggaaaaaacaggcaaagcattcatttgaaggagcctagccattttctctttcttatttaaagacttggcttggaacttagcagttacatatgcagggtagcgagttaaaaagccatgtttaattaacaggcgctttatacttctgtatccttgttatgatatagcaccttgttcttcagtgtagaaagtgatttctgcatattttaaaggactggcatctttatggtaagaaagccatataaataaagatatacttagatgaaaatcggaacatgtttttaaaatagtgtgtgtctactttcatctctgttatcaaacttgctgcataagccagagttgatgctctgtgattatgctaatgaccaaaagaatcgatgatgcgagactngatgnaatcagngg

SEQ ID NO: 1563 - DNA, 725 bp, Homo sapiens
  misc_feature (307)..(307): "n" may be a, t, c, g, other or unknown
  misc_feature (385)..(385): "n" may be a, t, c, g, other or unknown
  misc_feature (448)..(448): "n" may be a, t, c, g, other or unknown
  misc_feature (696)..(696): "n" may be a, t, c, g, other or unknown
  misc_feature (711)..(711): "n" may be a, t, c, g, other or unknown
  misc_feature (720)..(720): "n" may be a, t, c, g, other or unknown
ttttgaataagaattggcgttaactcctccttgcaatgctgtgagcattgtagaaaaaacctgggcaggcactaggaaaatgagctcttctggtggttctgccactggctggttgtggggacctgggtacatctgtcaccttcttgggccttcttaattaggaaatgctgctttcagaatctcttagtttcattttttttgtgtgggttttctctttttcttttttctttttttttttttttcattttaatcttctatttccatggctgtgcctttccagaattaaatgaaatgtttcttgatgcanactgttataatctagtagggtggtttggcaaaaaaaaaaaaaaaaaaaaaaaagtggagggaaaaggtaatgagtganatgttggcaaaaagggctgtgtccacaattgctcatcaaagctcatgtgttactcaccccatntcagctgctgagctccaaacactggtgcagtaaaataaaaatgaaaatgcctcctgcctcctactgcttcctcctacatacaccttaaggaaacaagatccagattttctaaacaattttcttcattttactttattttgattggcaaaatgtcataggaaatgacttgtcagtgtatcaagtttacatatgtatttccatgaccatacatagaatgttggcacccatagatttgaaatcagactttntgctgcatcattagnattcataanccggt

SEQ ID NO: 1564 - DNA, 763 bp, Homo sapiens
  misc_feature (690)..(690): "n" may be a, t, c, g, other or unknown
  misc_feature (741)..(741): "n" may be a, t, c, g, other or unknown
  misc_feature (760)..(760): "n" may be a, t, c, g, other or unknown
aattgcgagcgagagtgagtggggccgggacccgcagagccgagccgacccttctctcccgggctgcggcagggcagggcggggagctccgcgcaccaacagagccggttctcagggcgctttgctccttgttttttccccggttctgttttctccccttctccggaaggcttgtcaaggggtaggagaaagagacgcaaacacaaaagtggaaaacaggtaagaggctctccagtgacttacttgggcgttattgttttgtttcgaggccaaggaggcttcgggaagtgctcggtttcggggactttgatccggagccccacatccccaccacttgcaactcagatgggaccggaggcggtgttaaatggggagacgatgtcctagtacgagctctggtgaccccaggactctgcgctgctgcgcttggggcttgcccgacggtggagaccggggagcatctctgggcgtggagacccgggcgcagtaccccgggctcagaggggtcgggggttcccgggcgtgctgagggcgctgctgccgggtggggagagctgcaggtccggcaccgagcgctgctttgttcggagggccctgagctggctagaaacccttctggttgcaggtcggccagtacctacggagacaaatgccagcacttgagtcttcactcggtcttaagaaactggnctggtctgacctgggaattggctatatgcttccccgggacttggaaccggnacaattccccggactgtgnaat

SEQ ID NO: 1565 - DNA, 713 bp, Homo sapiens
  misc_feature (639)..(639): "n" may be a, t, c, g, other or unknown
  misc_feature (706)..(706): "n" may be a, t, c, g, other or unknown
  misc_feature (713)..(713): "n" may be a, t, c, g, other or unknown
aaaatgagaaacccctacacagggctctatgtcccctcgccctctccagtcaaggccaccacaagccaagggaggtctgggcgtgagaggtgagaccctgtgctccccctgccctgggtggaggaagggggtgccctgccaccctgagaacaatggtgtgtgcagaagagaagggactgaaactctttgaagatgttccaggatttagcacccagggagcggcggagactcagccccaccagcctccggcacggagggaggaaagcgttccccaggctgctcaggagaacgtttgttgctgtagtgggcagtcaccttccaaccggggacagtcacccccctgctcggggacagtcacccccccgctcggggacagtcacccccccgctcgggcacagtcacccccctgctcggggacagtcatccccccgctcggggacagtcaccctcccggaatggggcttcctttctcggggctgggaatcaccctggatccctccccactcggggtgctcttgggccatctgagggctcctgggtcactcttgggccttctcagggttcctgggtcattcttgggccatctgagggttcctgagcccaatgacacttctgcctaagctcgcgctgcgggaaggnaagaagccaggccaaggtcccttccgtggccccggtgcaaaccttggcctttgggaaaaaaaggaanccccccn

SEQ ID NO: 1566 - DNA, 666 bp, Homo sapiens
  misc_feature (636)..(636): "n" may be a, t, c, g, other or unknown
  misc_feature (659)..(660): "n" may be a, t, c, g, other or unknown
gaaaatgtgtatgtgtgtatatgtgtgcgagtgtgcgtgtgtgcgcgcgctgtacctctccctgcgtggtgaagccatcagattgtgcgctcactgatccctgttgttgagtctgataagggtgagctcagaagccatcagatcgtggcctcactggtcccagttgtggagtccgatgagggtgagctcagatgctctgtggtcactccctgtgccgtgcttcggggacgctgagatgctgcaccagccaggcagggcggggtgggccccacttccatcgagctcctgcggatgatgagcaccacccaggagccacctggggggcagggcaggggctgaatcccactgggggtgactgtctctcacatgacaggagtccagggcatgcatggaggctcctccgtgtcatctagcgccagctccttctgtcactcctctgtggcctggagcggcctgctgtctcccggtcacgagccagcccgtgggcatcagcaccgcaagagcagggtccgtccatcttttgaggcacccccacccccgccacacagtgccttctgtttcctctcattgggcagaatcgtgtcatgtggccgcccagttgcaagggagcccgggaagggtgcctgggcccttgtncaacaaaactggctggttgggannaatgcc

SEQ ID NO: 1567 - DNA, 742 bp, Homo sapiens
  misc_feature (716)..(716): "n" may be a, t, c, g, other or unknown
  misc_feature (724)..(724): "n" may be a, t, c, g, other or unknown
  misc_feature (739)..(739): "n" may be a, t, c, g, other or unknown
ctggctggaccactggctacagcaccgcaagcagatcgggctgctcagcttcttctgcgccgccctgcacgccctctacagcttctgcttgccgctgcgccgcgcccaccgctacgacctggtcaacctggcagtcaagcaggtcttggccaacaagagccacctctgggtggaggaggaggtctggcggatggagatctacctctccctgggagtgctggccctcggcacgttgtccctgctggccgtgacctcactgccgtccattgcaaactcgctcaactggagggagttcagcttcgttcagtcctcactgggctttgtggccctcgtgctgagcacactgcacacgctcacctacggctggacccgcgccttcgaggagagccgctacaagttctacctgcctcccaccttcacgctcacgctgctggtgccctgcgtcgtcatcctggccaaagccctgtttctcctgccctgcatcagccgcagactcgccaggatccggagaggctgggagagggagagcaccatcaagttcacgctgcccacagaccacgccctgagcccgttaggttttcttttcttggtggtgcaaagtggtataactgtgtgcaaataggaggtttgaggtccaaattcctgggactcaaatgtatgcaagtactattcagaatgatatacacacatatgtgtatatgtatttacatatattncacatatntacaggatttgcaantat

SEQ ID NO: 1568 - DNA, 762 bp, Homo sapiens
  misc_feature (739)..(739): "n" may be a, t, c, g, other or unknown
  misc_feature (745)..(745): "n" may be a, t, c, g, other or unknown
  misc_feature (747)..(747): "n" may be a, t, c, g, other or unknown
gattttgtttcattttaaaaggggaaatggcattaacctaataggaattctcctcctgaacctcagaggcagcagatggtacagctctctttgaactttactgcccaggtgaacgttctctgcatttagatcttcaggagttttacagactagtgtggagtggacatgtaaggacaagaggaagaggcaggtttcagctgagctcttctcctccttagagcaggacagtgttgggatgggctgattgtgagtatggagttctttctggaggagctccagcaggagctgggcaaatactgggagctttgactaaggggcatgcattgcagatgaggtttgaccagaggttttccaggatccctgaagaactctgcacttctaagcctgtaaggccacaacaggtgagatgaagggggagttgaacttccagctccttgtgtgtcccctagggttccccttttgggtccacacaaaggctcttgagcccaatctgaaggtctaaggctatggatatctcctccatttctaagttgggacaaggttgtccagcaaaaagaaaagcaaagactggtccaatcttagagacgtttgttttggaagcagagctgggctattagctttcctcaagaaggaaaaaggagtgctacaaaagttaaatactgatttttaaaaaaaattggcattcacacaatttctactaccacagatgagacttctttttggtttctcaaaaacttangctctncnaggaatggtggagct

SEQ ID NO: 1569 - DNA, 718 bp, Homo sapiens
  misc_feature (669)..(669): "n" may be a, t, c, g, other or unknown
  misc_feature (677)..(677): "n" may be a, t, c, g, other or unknown
  misc_feature (684)..(684): "n" may be a, t, c, g, other or unknown
tccagtggtacagttacagcctttttctgctgagttcaagggattttcccaacgcagcatcccaaagcgttgggattacaggcataaaccaccacacccagcttcatgttttgaattttataactcccttttcagtgagcctttccctttttctgatgagcaagccaaaattatcagtataaaaaatttaaaagagaagtttttctcccttcctgctgctttttctctgtctttctctgaaggtgtgtggaggtgggtgtgtatgtgtgtgtgtgtgtgtgagtgtgataggatctcactttgttgcctaggctggagtgcagtggcatgaacttggctcactgccaagcaatcctgcctcagcttcccaagtacctggaaccttaggcacaagtcaccacacctagattattttttaaaaatttttgtagagatggggtctcactgtattgcccaggctggtttcaaattcctgagcacaagcagtcctctcatcttgacctctcaaagtgttgggattacaggagtgagccactacacccagcccctgctgctttcttgatcttgccgttcagtttgcacccaatgctgacttgtggtttcaacgctgtatatgcggagtctgacttccagagcacttttgtaatccaaatgccacgtatttcttanccctcttncaattgngatataagaggattccgagacccttgggatgaga

SEQ ID NO: 1570 - DNA, 591 bp, Homo sapiens
  misc_feature (516)..(516): "n" may be a, t, c, g, other or unknown
  misc_feature (556)..(556): "n" may be a, t, c, g, other or unknown
  misc_feature (570)..(570): "n" may be a, t, c, g, other or unknown
atttagatgtcgggggcgggggagggtggttggcggcgggagttgctgagagggccggccgcttatccctgtttggtcccacttttctcccagcacctgcccttgttcaccgcctcttcatctacttggatttggctcgaataaaccctcagctcccggccagcgctgagagccctggcggaagagtgggtagcggtggccttaagtattaaatctgagcctgcttcttgggggagagactcgttgaaaagggagtgtgttgggggggtgttgtgcgctgaggggagttagaacttcccggtcggttacccagtgggaagctgcggggcacaaagcccagaatttgctgctaatcgctgggtgccctggagacagagggggcgtgtcctctgcggattccattctcaccttcccctcccgcttctgatctcgctgtttgctccacccttgctccccacccactatcagctccagcgggtgggggtgaagggctgtccccaggccaacacctccttncaggctttggggagtggggattctttccccggatgggcanagttccttctgcantggcgctacccgtccgtgctg

SEQ ID NO: 1571 - DNA, 845 bp, Homo sapiens
  misc_feature (830)..(830): "n" may be a, t, c, g, other or unknown
attgtgtagctatacctagcaggaataaatactaagtctgtgtcagtattcttccccttggtttcagttatctattgctgtgtaaaaaaccatcccaactttgttgcttgaagcacccaggattcattgtttctcataagaattttctgctggtctcatgcggacttgctcgtgtcctagctgggatggctggattgttcatcttgcagttggtgctggacaatggtgggctctctctcagtggctttcatgcacaaggaggctcacacaggcttcttgatacagcagcctcagagcatcagaagggcaagagtggatgctgtctggtctttgaagtctcactcagaagtcacctgttgtcacttctgtgttctattagtgcaactgagtcctgaggcttgcccaggtttgcactgaggaaatcgattccacctcttgctgagaggagcagcaaagaatttatcgccacttttaacccactacaacctcaatttcaactgattgtctctaatgacttcttctgtaagcatccaaaacatcccttgattgaaactatctcaaggtgacctatcttccttcaacaatattttgtggttcgaaactatgtcattaagagagtgactttgaaaacctatataaggacccagatgtgaggtgactgcctagtctgaggaataatgactttaagttatatttgtagagaagtggtaaagccacgaagcagacccatggagaaatgcaaatctgtcatcagccttgaaggatgggacaaatttggtggtgccctggttaaggaggaaccagccctggggcttgctggcaaagcctangagactaatttgtaa

SEQ ID NO: 1572 - DNA, 742 bp, Homo sapiens
  misc_feature (701)..(701): "n" may be a, t, c, g, other or unknown
  misc_feature (706)..(706): "n" may be a, t, c, g, other or unknown
  misc_feature (740)..(740): "n" may be a, t, c, g, other or unknown
gaaatgatgcctccatttactgaaaagaggaagaggtggtgggggtggagcagattttagaggctaatcaggcattggggtttgaacaggggatgtttgagatccctggtggacatccgagttcagcgagaacattgcagctgagggacgcagggagaaggggcatttcccgtggccttgaaggagactcatatttggagatcagagggagaacatgctccaggtagaaaaggtgtggcaggcaaaggtggtggggtgggaagcaggtcacagctctgctggggctcggggcagccctagcagctctgtcttccattggtctgctctggaaaaggcagtcaggccactaaagcctggctgaaatctggctgcttgggcgcctgctgtcttaggcctggcccctttccacactcccactgtctgtgtggaccttcgagacatttgcatttgggagctgtggttagagcacagcgtgtgatgaaggcaggcaaggacaggccatgcattcgggggtctggggtcaggcgagctcctcacaggtgctctggaccacgctagcagccgctaagcccgtgcaggtggacaaccactgtggctgtagagcgacaatcgcccagaattggtgtcatctcaacgccttcactgtgtcccaagtcatctcggatgccctacccttcgcctgctgctctttaacctgccgnttctnctgccgacagcctgtgattgactctgcatccttnct

SEQ ID NO: 1573 - DNA, 733 bp, Homo sapiens
  misc_feature (691)..(691): "n" may be a, t, c, g, other or unknown
  misc_feature (703)..(703): "n" may be a, t, c, g, other or unknown
  misc_feature (714)..(714): "n" may be a, t, c, g, other or unknown
acaggcgggcactctctgcgggtcccgcggctcccgcggcttccggcccactcagcgcctccagaggcctcaggtgagggtcaccccccgcagcttggggtcactcccctgagcccccggatcttcccatgggtcctttggaggcctgggttttggagtttgtccttcgttaagtgccgcccgccgggcgcggctgctccaggaccacagacgagtctcgctctgttgcccaggatggagtgcagtggcgcgatctcggctcgctgcaagctccgcctcagcctccggagtagctgggactacaggagcccgccaccacgcccagctaatttttttgtatttttagtagagacggggtttcaccgtgttagccaggatggtctcgatctcctgaccttgtgatccgcctgcctcggcctcccaaagtgctgggattacaggcatttcgctggggatgctacttgatctctcttcagcctcagtttcctcacctggacagtggagctgaacccaccccccactatctgaccctgctctctgggctgtcttttgggaacccgccctgctgaggcctgctccccaccctccatggctgtcagccccccaggagaagaatgtctgccatatggaggctgctggcagcaaagggagatgaacaagccaaggttgcccggcctgcatgccggcccanggctgctgctgngtcttgccatnaacccttcccttgaaccca

SEQ ID NO: 1574 - DNA, 724 bp, Homo sapiens
  misc_feature (681)..(683): "n" may be a, t, c, g, other or unknown
attttttcagacgttgcatttttcagttcgagaatttccattgggttctttatgttttttttttttctactgaggagagagggtgaaagcacaaatgcaagagcattgacaaagaaattgtagaatgttagagcagcactgaactcaattgaggttaaatatcttaaaccctgctggacgcagtgactcacacctgtaatcccagcattttgagaggctgaggggggtggaacacctgaggtcaggagtttgagaccagccttaccaacatggtgaaaccctgtctctactaaaaaatacaaaaattagctgggcatggtggcgggcacctgtaatcccagctgcttgggaggctgaggcaggagaatcgcttgaaccagggaggcagaggttgtagtgagccaagatcacgtcattgcactccagcctgggtgacggagcaagactccgtcaaaaaaaaaaagatattaaatccaggaggtcgactacttttgtccagcagcactgataagaaagatagctggtctgggcacagtagctcatgcctatgatcccagcaccctgggagactgaggtggaaggatttcctgagtccaggaatttgaggctgcagtgagctatgattgccaattgcattccacctgggtgacagagcatgaccctgtctcaaaaaaaaaaaannngaaaaaaaaaagacctggcgcaatggcttacacctataatt

SEQ ID NO: 1575 - DNA, 711 bp, Homo sapiens
  misc_feature (622)..(622): "n" may be a, t, c, g, other or unknown
  misc_feature (656)..(656): "n" may be a, t, c, g, other or unknown
  misc_feature (681)..(681): "n" may be a, t, c, g, other or unknown
actagcagcagcggcagcagccctagtcccgcggtgcggtcgaattggtccccagccctccgggagcgcaccacaaagcagccccaacgcctctccctgcgtccgcggctcctcagcgctcggctccgtggtcaacttcccctcgctgggctcggctggcgggcgcggagggcagcggcggaacggcgggctgtctgctcgcgctccccgcgcacaacacttcaccctctcgcctcgggtctcgggggccgctctgggatcccggccaccagcaattgtccggaaataatgcaaaaggtgtcccaaggctcctgaccagtgaacaaagatttgagaaagacagccaagctcatgttttctcctgatcaagaaaatcatccatctaaagcaccagtaaaatatggtgaactcattgtcttagggtataatgggtctctcccaaatggcgatagaggaaggaggaaaagtaggtttgctttgtttaaaagacctaaggcaaatggggtgaagcccagcactgtgcatattgcttgtactcctcaggctgcaaaggtaaaaaaaaaaaaaaaaaagctacataaattaacttggagaatttgaaagacttttatgtgttggttgnattctctagcattccccttacatttctatttcanaaattgccttttggttggattgganaaaagacttttggagacatgggattttgaa

SEQ ID NO: 1576 - DNA, 748 bp, Homo sapiens
  misc_feature (678)..(678): "n" may be a, t, c, g, other or unknown
  misc_feature (724)..(724): "n" may be a, t, c, g, other or unknown
  misc_feature (746)..(746): "n" may be a, t, c, g, other or unknown
gttttgtatgtgcctaccactttatattcattgtatattcaccccgtatttatgtattccttgcatctgccctgagaggcagagtcatggatggaaaaccaaggcctggcttaagaccctgcccaggtatagctggtaacgtgagagtcattctcaagactgcctgcctccagtgcccataccctttccgccacaccacaccttggggcttgctgttgtagcctgtgtggtcactaggcatgtctgggctaaggacgggcaagtcccacaagtggctgtttcgtgtctcctgcagtctcctggctgatacttctctgtataagctggtgattcttgggctctttcctcatctccaaaaccgttgttgggatggctgggtggatggatgggtgggtaggtagatggaattcccaaagtaacacaaggggcattgggccatttgaggaagctgcagacagagcactggccaccaccaaagccactggagcttgggagtcaggcggccctggggggtccttgctgttgctgcgtctcccacaccttaatcagagcatcgccaatgcaataaagttaatggagccagtcatcctatgaaggagccaattccgtgcaaagatgatacatctttgaagttgatgaggcctattaattgagcttatgccccttaaaatgaattanattcttgaaattaccacacagagtacatccattagtggttctggcnccgaggaatgaggacccccagnca

SEQ ID NO: 1577 - DNA, 835 bp, Homo sapiens
  misc_feature (638)..(638): "n" may be a, t, c, g, other or unknown
  misc_feature (672)..(672): "n" may be a, t, c, g, other or unknown
  misc_feature (724)..(724): "n" may be a, t, c, g, other or unknown
  misc_feature (747)..(747): "n" may be a, t, c, g, other or unknown
  misc_feature (794)..(794): "n" may be a, t, c, g, other or unknown
  misc_feature (824)..(824): "n" may be a, t, c, g, other or unknown
gtgtcccgccgggtccccgagcgtcccgcgccctcgccccgccatgctcctgctgctggggctgtgcctggggctgtccctgtgtgtggggtcgcaggaagaggcgcagagctggggccactcttcggagcaggatggactcagggtcccgaggcaagtcagactgttgcagaggctgaaaaccaaacctttgatgacagaattctcagtgaagtctaccatcatttcccgttatgccttcactacggtttcctgcagaatgctgaacagagcttctgaagaccaggacattgagttccagatgcagattccagctgcagctttcatcaccaacttcactatgcttattggagacaaggtgtatcagggcgaaattacagagagagaaaagaagagtggtgatagggtaaaagagaaaaggaataaaaccacagaagaaaatggagagaaggggactgaaatattcagagcttctgcagtgattcccagcaaggacaaagccgcctttttcctgagttatgaggagcttctgcagaggcgcctgggcaagtacgagcacagcatcagcgtgcggccccagcagctgtccgggaggctgacgtgggcgtgaatatcctggagagcgcgggcatcgcatnccctggaggtgctgccgcttacaacagcaggcanaaggggcagtgggccccggggaagatgattctgggccttccccatctactgncattaaccaaaatgaacatttgncacataattttaaacctactgtagtacaacaagccaggattgcccanaatggaattttgggagacttatcattaganatgacgtcatt

SEQ ID NO: 1578 - DNA, 812 bp, Homo sapiens
  misc_feature (685)..(685): "n" may be a, t, c, g, other or unknown
  misc_feature (801)..(801): "n" may be a, t, c, g, other or unknown
  misc_feature (809)..(809): "n" may be a, t, c, g, other or unknown
  misc_feature (811)..(811): "n" may be a, t, c, g, other or unknown
cattgtgtccaaagtaccccttttacctactttacagtagttgtaacttgttgcaaagcttaaaaaataatttaaaatacaaaagtatgtgatagtataagtttatgttcatctagtatttctttagttattcaaattgtgaggttaagaaaggaactcctaagtgtagctactgcttcttctgtccatcatgggactatgtagtttgggagaaggaaagggaactctaactagtgcctcatgagaaactatggagcttctgtctctttgtcctttgtattcctcattgtgaactacatcttgaacccagagcaatagctgggcaagtgaagagtcataaaggtgaaatgtgactgagaaggattacaaaccctgtaattaacagaggcaatctattagctgtagcctcctagttaggagaaggatggggacagtgggtgcagttgaacacacaacctaactctgaactgggtccttgatgtgctatagcttatgaacttatggaacttagatttggagacactggcttcaattattacgtgcaacttttcagctgtgcgatgttggacaagtctaggaattataaaaactaagacatactagccaaaatactttgaattctgaaattccattgtaatggtattaattttgtgggtagctctccataaagatgtttatttaaatnaaaacagttaagataaacattactggtattgggaacatattaatggtagccatacctacgccatttgggtttaagaatcttgggattatggctattaaaataatggatttttaccncgattagncnt

SEQ ID NO: 1579 - DNA, 809 bp, Homo sapiens
  misc_feature (714)..(714): "n" may be a, t, c, g, other or unknown
  misc_feature (761)..(761): "n" may be a, t, c, g, other or unknown
  misc_feature (805)..(805): "n" may be a, t, c, g, other or unknown
ctcatatgctttttttaaaaaaagaaataattgctcataagaagaaaaaatacagaattattgaaaacaaaagtacctcaaccttcagttctcagatatagtactataaataattagttttcaatcttggcaggctttttacgtagtcacatatgatttgagcatttttttcctcttttttacacagataagattatatgtatggctatatgactttactcaaaaataagtcttgaagatctgtccataccaataaagatctgtgtaagattttaagagctgcaggagattgttattgattttgattagattgcactacagcctatacagtcttctatttagattttgaggttttacttgtggtctagaattgattgttttgtacaaaattcaatgtactcattcagcaaatacttactgaatgtctgctgtgttgcaggcactgacctaggtttcagggatatggtggcaaacaagaaagatgtgaaagacagtcccagccttcccaggccttataatcaatggcatttgaaactaacaggtctgctacatttgttctgtatacgcacacgtgcgtgcacacaagcacactcgcacgcgcacacacactgaatcttgccagttgtgtccatctagtccagggttctgcaaactttttctgaaagagccagatattaagtattttaggctttgtaggctacagatggtctctgncacatattcttctttggtttgggtttgggtaaacatgtaaaaatggnaaaactattcttaacttgggggcagtcccagacagaccattggncaga

SEQ ID NO: 1580 - DNA, 765 bp, Homo sapiens
  misc_feature (760)..(760): "n" may be a, t, c, g, other or unknown
  misc_feature (762)..(762): "n" may be a, t, c, g, other or unknown
  misc_feature (764)..(764): "n" may be a, t, c, g, other or unknown
catgcacaggtatgttcattgcagcactactcgcaatagcaaagacttggaaccaaccgaaatgtccatcaatgatagagtggataaagaaaatgtggcacatatacaccatggaatactatgcagtcataaaaaggatgagttcatgtcctttgcagggacatggatgaagctggaaaccatcattctcagcaagctatcacaaactatcgtaggaacagaaaaccaaacaccacatgttctcacttataaatgggagttgaacaagaacacatggacacagggaagggaactcacacacccgggcctgttagggggtgggggcctaaggaagggataacattaggagaaatacctaatgtaggtgacaggttgatgggtgcagcaaacgaccatggcatgtgcatacctatgtaacaaaactgcacgttctgcacatgtaccgcagaacttaaagtataataaataaatatataaatatttataaataaataataaatacataaatatcagaaagtaaaagaggaaaaaaactgaaccttgaatttttttcttttagaatatttataatatttaacgtatttgaaggtgaaggccatcctacatggacatctgaagctttagctaagtattatcttttctgtaatgtgactattggtttgcaagttcggttcttcttttcgaatagtatgagattaattttctcagtacttaaatcacttctcaattaagttggatgttcatggaggaacattctttncntna

SEQ ID NO: 1581 - DNA, 778 bp, Homo sapiens
  misc_feature (751)..(751): "n" may be a, t, c, g, other or unknown
  misc_feature (774)..(775): "n" may be a, t, c, g, other or unknown
aaaaaatgaatgaagaaaatatggcaaaacttaataaattcacattaagcaggagaaagacctaactaaattagtaatctgaattgtagaatatttttaaaaaattaatagtaacttaattactgtcagattcatggagttccttggagaaattgctttggcaaatagatagggaaaatttacaaatagcacaaaacttggtaaataaagcaatttctaaagaatccgccatggactagtatttttaagttattttctccataaagtgcatgtatgttatcaatttgccttgcaaaatcatttttataagaaagagagctatttctgtttttaccaattatttgtggtatttgaaagtcattcatttacaaaaacataagaatgatatccatttactcattcactcattcattgagcaaatatatattggaggtcactgtgctgggtacatagtggtgagttcaataaagtccttgccttttctagcatgggggatgggagttaactaaaaaataaaataaatgaataaatattttgtaatacattatgataagagcataatcaaggtgctgaataatttctttgggaagatgacatttggctgagtactgaaggatgcaaagaagtcattcatgcagagaagggaggaaagagcccccaggcagaagggagctatgcggacaaagcaaaaggctgggagatgtttagcatgggccagaaactagaaggtagtcagtgtggctacaggtgntgagtggtatgggaaagaaatcnnaga

SEQ ID NO: 1582 - DNA, 790 bp, Homo sapiens
  misc_feature (703)..(703): "n" may be a, t, c, g, other or unknown
  misc_feature (737)..(737): "n" may be a, t, c, g, other or unknown
  misc_feature (772)..(772): "n" may be a, t, c, g, other or unknown
gaaaaatatgaataagggctaccaattgttttagttttaatcaaaactaaaaatatacatctatgtctttactgatttaaactcacataaaactgccttccaaaataaatgcagaattgggcacttatttgttctcatgtctgtcctctcagagccaataagctgtaaaaaactctcaaaataaaactctgttttattttctgttttgccccggtttctatcacataagtgctcaataatatatgctttacataaatgctgaatgaggaacatatatatctatataaactggggagcaatgcaagactggaagaatgtcttgatgtgttggagaagttgaagaagagattgtgggatagctatgacacatagattgagctacaccacgaatctctccatgtaacccaggaacccaaggatatgtgatgagatgtttgtggaagcaggaattaaaaggaagatttcttttaataatgccttgcagttgcgcagtgatttagaccttccaaaaacacttttaattatattatctcatttgatcctcaaaacaatcgtgggaaataggcaccccagtcattattatccccattttgcagatgaagaaactgagatagagctttaagtatcttgcccaaggttaaataagtaattagtgagctgagacaaaccccccactatttctgcctcttactcagtctcactncactgtacctttgtgcaacaatgtgaagcacatncaagatgatatttagtgtgggggacccttgcgtanagggacaccagtttcttg

SEQ ID NO: 1583 - DNA, 793 bp, Homo sapiens
  misc_feature (757)..(757): "n" may be a, t, c, g, other or unknown
  misc_feature (769)..(769): "n" may be a, t, c, g, other or unknown
  misc_feature (786)..(786): "n" may be a, t, c, g, other or unknown
aaaatttttaattaactttttttaaattaaaaaaaattattaattatttttaatagacaggatcttgctatgctgtccaggctggtcttgaactcctggtctcaagtgatcctcctgccttggcctcccaaagcgctggtattacaggtgtgagtcactgcacctggccaagtttattttttctgtatacatttcttcagccacttcaatcaaacatttaattaacatgctataatgaatgacttttcttactaggctaacaaatgaggcacttggaaacttactttagttacagcctcactttctttttttgtgaggaaattctgtgttgacatactctttaatttctttttaccttttctgactgattttctgtaatttgggaatattgtgatgactgcttattctaataatattaacatatagcattcttttagcacataaatagtttcatttgcatagtaagcgccaggctttgccatcgaatttgataaaataatccatgcttcatggtaccttagagatgggatattttaagtccaattctctctctctctctctctcatttttttctttttggagacagggcctggagttacccatgctggagtgcagtggtgtgactgtagctccctgcagcctcgaactccttggcctcaattgatcctgccaccttaccttctgagtactgggactacagggggggtcaccacaccctttttttttttgacatgaagggatataatgccgggaaatnaaaaattaaaanttttgggggtattgggnaataggc

SEQ ID NO: 1584 - DNA, 722 bp, Homo sapiens
  misc_feature (668)..(668): "n" may be a, t, c, g, other or unknown
  misc_feature (695)..(695): "n" may be a, t, c, g, other or unknown
  misc_feature (697)..(697): "n" may be a, t, c, g, other or unknown
cataaaagaatacttgaaactgggcagtttataaagaaaaaaaagtttatttggattatgattccaccagctgtacaagaagcatggcgtcagcatctgcttctggtgagggcttccaggagcttccaaacattgtgcaagtggaaggggagctggtgtgtcacatggtgagagaggaagcaagagacgaggaggtgccatgctcttttaaacaaccagttctcacgtgaactcactcattacctcgaaggaggacagcaagcctttcgtgagggatccgcccctatgacccaaacacctcccactaggccccacctccaacgtgggagatcaaatatcaatatgagatttggaggggacaaatatccaaaccatatcactaggtttaagaggagaggagccatttttgcttctaccccttgatggctagtcctgtgtattctggctggggaagaaatagaactgatgcagcttgtattctttgtcccgaaagagtccaacttgtcaagatgtcatctcccaactggctccatggggaatgttgggctaacaaatggtgctttttaaaacaaagtacagaatttttgcaaatacagtagtggctaaggttcttttgactttaacactgcattgcatggtgaatcagtggtttaaaaattgcattggangggagcctattttttttttcttacctntncttgagtgctttaaagtgggcatta

SEQ ID NO: 1585 - DNA, 705 bp, Homo sapiens
  misc_feature (681)..(681): "n" may be a, t, c, g, other or unknown
  misc_feature (693)..(693): "n" may be a, t, c, g, other or unknown
  misc_feature (696)..(696): "n" may be a, t, c, g, other or unknown
ttagtaacggatatacatttgtaaaattacagactggggttaggagtgcagactgttattgtattgtgttcttgtgcaaaaaaaccccaggtgtatcatgggaatacatctttgaccttggacttccttgtgtcctgctggcagaggtcactagttttgacacctggtgagagatgtgaagtgttcctttatttacttatatttatttatttatttatttgaggcagggtcttgctctgtcacctgggctggagtgcagtggtgtgaacatggctcactttaccctccaactcctgggcttaagcagtcctcctacctcagcctcctgagtaggtaggactacagacgagcagcaccatgcccagccaatttttttatttttaattttttgtagagagaggatctcactatgttgctcaggctggtctcgaattcctggactcaagcagtcctcctgcctcccaaagtgttgggattattggtgtgagctgctgtgcccagccaatgcttcttttatatatttatttagatttggtgtttgatttttttgttaataagggaccttctcaaagatacttttaaatgaaaagacaaagggtcagaaaatactggtttttttttttttggaaacagtctcattctgtgacccagactggagtgcaatggcgttgatcttggctnacaagtgacctncgntttcctggg

SEQ ID NO: 1586 - DNA, 786 bp, Homo sapiens
  misc_feature (736)..(736): "n" may be a, t, c, g, other or unknown
  misc_feature (759)..(759): "n" may be a, t, c, g, other or unknown
  misc_feature (780)..(780): "n" may be a, t, c, g, other or unknown
gatttgggagatgcagcatgcatcctcattgactggacatagggaggggaagaaaggcctcacttgacttccagtttctttttggctaagtggatagccattcatggagatgaggaagacaacaggatgagtaggtttgactggtagaggtttacttgagttatgttttaaatgcattgagtctgggatgcctagtgagacatcctagttgaaatatcctataggcagttggaagaaatgtctgaactggaaatgtagatgcccttttgagagcagaaactgctccttcctcttttcttcattattgatggtgtctcccagtctttttcaagtcttcctcatcctttggtgcctctcaggctgatagccttctccctctcttcttaaggaatacactcacttttggtgaagccgttgctacaattgctgtctgtctgccaaggtttcagtgtaatgccataaggcaaataacctaaacccattaaaattaattcagaatttaaaaggccagataatttaatctactttttaaaagactcataaatattaaattaccaaaaaaaaagacaactcctcaaacagaatagatttatcctaagccgaggaaattgtgataagtggacagagttatttaaaggcatattaaaagttagatttctcacgcctgtaatcccagcactgtgggaggccgaggcaggcagatcacttgaggtcaggagttcgaaaccagcctggncaacatggtgaaaaccccgtctntactaaaaatttaaaaattancccacc

SEQ ID NO: 1587 - DNA, 798 bp, Homo sapiens
  misc_feature (626)..(626): "n" may be a, t, c, g, other or unknown
  misc_feature (714)..(714): "n" may be a, t, c, g, other or unknown
  misc_feature (739)..(739): "n" may be a, t, c, g, other or unknown
  misc_feature (776)..(776): "n" may be a, t, c, g, other or unknown
aaaaactggagagtaattgttttataacattagaaccctgaatggcaatttgatgaactggagaagaaaaagatgtctgcaataaatcagaaacaaacccttcagcttcagcagtagtgctcattattttttttaaaaaaatagagcctctaggatcaaacatattatacaaagtagcatgtatcattaaaagtataaattggtatcctttttaaggggagtataaagaagtatgtaggagtcagtgtggtctgaaaaatggaaaggttattttgctgctaaaatataggtttttttacagtgtaagtgcactgctcagaacatatcttcttccacgcttcaaaagagtttgggtaagggaacagcctgaaaaacacctgaaagagagaattctggcttatggattagagagcatctataaacagaacaaattggtgaataagagttcacaaaaattttgtctaagaaatttccccacatgcattcagaggttaataattaaattttttgaagttcattttaaaacattgcttattttaacatgtaaacgtatgttgggtgggaaaagtcaaatgggagattgaaactgttttaatcatgtaaatgatcagccctacaatttttgnttttttaataatctggaatgcttattttatatgctgggatgctagttggtttttctattaatacacttaacttgcattctagcttcgncattcagagacaggcatcgtgtggngggttgtgtgcagtgctggcaatagtgaagaccaatngtgcccgagacacttaacccat

SEQ ID NO: 1588 - DNA, 837 bp, Homo sapiens
  misc_feature (804)..(804): "n" may be a, t, c, g, other or unknown
  misc_feature (828)..(828): "n" may be a, t, c, g, other or unknown
  misc_feature (834)..(834): "n" may be a, t, c, g, other or unknown
aagcaaagcagctcttatttgaaaaaccactgggttccgagttcattactacaggaaaaactgttctcttctgtggcacagagaaccctgcttcaaagcagaagtagcagttccggagtccagctggctaaaactcatcccagaggataatggcaacccatgccttagaaatcgctgggctgtttcttggtggtgttggaatggtgggcacagtggctgtcactgtcatgcctcagtggagagtgtcggccttcattgaaaacaacatcgtggtttttgaaaacttctgggaaggactgtggatgaattgcgtgaggcaggctaacatcaggatgcagtgcaaaatctatgattccctgctggctctttctccggacctacaggcagccagaggactgatgtgtgctgcttccgtgatgcccttcttggctttcatgatggccatccttggcatgaaatgcaccaggtgcacgggggacaatgagaaggtgaaggctcacattctgctgacggctggaatcatcttcatcatcacgggcatggtggtgctcatccctgtgagctgggttgccaatgccatcatcagagatttctataacccaatagtgaatgttgcccaaaaacgtgagcttggagaagctctctacttaggatggaccacggcactggtgctgattgttggaggagctctgttctgctgcgttttttgttgcaacgaaaagagcagtagctacagatactcgataccttcccatcgcacaacccaaaaaagttatcacaccggaaagaagtcacccgaccgtntacttcagaagtcagtatgtgtanttgggnatg

SEQ ID NO: 1589 - DNA, 846 bp, Homo sapiens
tttgttacaaaactggatgctgttaaaatcctctggaaaatatttttggttttttggtttcactttagcgggcagttaacctggttaggttcagactgcctctgtgggctgtggatccagtttgaacttacttttcaaaaccttcgtattgctgttcaggtcccaggtgtgccatccatgccattgtgcagttctcaacgcctttcctctgccgccttgggtcagttcacacatgggcatgttggtggtaaacttgagattgtatacacaaatttagaggacgtttcttctctccgtgacttcccttgtacacaagctcccaagagtttcttttcgtggttctttggtgagaaaactggaattttagcttctttgtgcttttcatacgttttctgtagaggggctcatttcctgaacaaaatggagagagagaaaagttagagaaaaaaataaaatgaattccctcttccatactcttccgatcatcgtctttttcctagttcttttgtcagaagaactctcttttagagtttaggagacagctaccagccacaggtgtgcagactcaggattggggcttgctttgaggcagagctgagagagaagaaaaattaccagatatccacccctccccattgtccctctcccattcatcatcttttctagttctctagccagaaggagtttctcttggaacttttctctgtcttcactcactgcacagttaatgagatttgggctgtcctcaagtctaagctgacatatgtgggagaaaaaaaccaggaaactcactactggtttgagttttgatttctcttcgccagtctgcttgcttcaaatactttt

SEQ ID NO: 1590 - DNA, 853 bp, Homo sapiens
  misc_feature (759)..(759): "n" may be a, t, c, g, other or unknown
  misc_feature (776)..(776): "n" may be a, t, c, g, other or unknown
  misc_feature (830)..(830): "n" may be a, t, c, g, other or unknown
gcattaagctgggcacagtggctcacgcctgtaatcccagcactttgggaggccaaggccggcggatcacgaggtcaggagatcgagaccatcctggctaacacggtgaaaccccatctctactaaaaatagaaaaaaatcagccgggtgtggtggcgggcgcctgtagtcctagctactcaggaggctgaggcaggagaatggtgtaaacccgtgaggctgagcttgcagtcagccaagattgtgccactacactccagcctgggtgacaaagcgagactccatctcaaaaaaaaaaaaaagaaagaaaaaagaaaatgagcacattactgtgattttacagcaattaaagtgattataagataataccacaaacataggtacaccagcaaattgaataaccaaatgaaatggcaaatctctagaaacacaaagcctaccaagactgaatcacaaacaaagaaaaaatatgggtaaaccagctgggcatggtggctcccgcctgtaatcccagcactttcggagtgcactccattgcactccagcctgggggacaagagcgagacttctcaaaaaaatagaaagtaggggtaaacctataactagtaagaacattaaattactaattaaaatcctttcaacaaagaaatacccctgactggatggttttaccagtcagttctaccagacatttaacgaaaattaatgccaatcctttgcaaactctttcaaaaacttgaagaggaggaaatctttctnactcggtctatgaaggncagcattgccttgatgctagggtcagaccaaagaccttcaggaaaacaactggnccatattgcttatgaacattggt

SEQ ID NO: 1591 - DNA, 815 bp, Homo sapiens
  misc_feature (750)..(750): "n" may be a, t, c, g, other or unknown
  misc_feature (798)..(798): "n" may be a, t, c, g, other or unknown
  misc_feature (801)..(801): "n" may be a, t, c, g, other or unknown
caggatgctgaggcagaagaattgcttgaacccaggaggcagaggttgcagtgagccaagatcatgccaccgcactccagcccacacgacaaagtgagactgtctcaaaaaaaaaaaaaaaaaaaatcgcagcttagctgaattcttgatagaaggtggtgacttagatgccttctcttctggtttgtctgctgtgtctgtgtgcacctggacccattgtgctctggaaagcaggcacactggagtcctggagtgcaggctggctggcgccttgcagtgcctggtgatggctggggtttggtccctggtctgtcccctggggttcccatgtctattggtgaggcagcagtgtgtgctcgtaggagaccctctgtcaagaggctctgtcgggagccagcctgctgccctgcctttgaggctgatccttcaccctaggagggcaggcactgagggccagcactctggtcacgccaaggatgctatggcgacccactgaagaatgagctattaccctgcccacccctgcctgctgtgcccccaagcaccccttgggggttactcacttgccttcctggtatcaggttaagaggttattagaccttccatttattcactcaattcttttccctgctctcctgagtaatagctcaggaacccgtgccccagccatgctgggaacatgcttagaaagtaaggggaaacctttgggccagcacccacgtggttttgaatcactcaaggacaatctgnctaagtcactggcttggtggccgtggccaacaaggagtcattcagtancgnctttgccctcactg

SEQ ID NO: 1592 - DNA, 690 bp, Homo sapiens
  misc_feature (630)..(630): "n" may be a, t, c, g, other or unknown
  misc_feature (677)..(677): "n" may be a, t, c, g, other or unknown
  misc_feature (683)..(683): "n" may be a, t, c, g, other or unknown
agagtgtgcaaatcctgcagcagcaactgacatatccaggttctatgatcaggactgactaggtggttgccgtgacccatagagaacaaggaaagatgggctggtggattggcccacctgggagccacatggggcaaggggagccctcaccctcagccagccaagggaggcagtgagtgagcatgctacccagcctgggaaactgctttttccatggatctttgcaatccacagatcagaagatcccactcatgagaccacaccacgagggccttgggtgccaaccacagagccatgcagattctcaacagccactcagctggagtctgcctaaaactaccgagttcccaagttggggaggggtggtcatcatcactgtggctgcctgctgcctaaaccctctgagttccctgggggagggggagcaatcatcactgtggttgctggctgcctaagacaactgagcttcccaggagaggggcagtcatcatcactgcagctgcctgctgcctgaggaaactgagctccctaagaagggacagcagccatcactgtggctgctagctgcctaagacactgaactcctggggaggaagggcggcagccatttctacagatccaggctgctgnttttcctttgctgatgccaggaagactggacggcttggtcccaagangtattncccacag

SEQ ID NO: 1593 - DNA, 849 bp, Homo sapiens
  misc_feature (769)..(769): "n" may be a, t, c, g, other or unknown
  misc_feature (845)..(845): "n" may be a, t, c, g, other or unknown
  misc_feature (847)..(847): "n" may be a, t, c, g, other or unknown
gttcatttatgtctcccgtaacagtctgtgctgtccagagacccagtatccttaggatattattctcatcctcatggttgaagctgggtcactgccatgtccataatccaccctgaggaaagagcatggagagccagcagcttcatttctaaggacaggaagccaaatctgcacttttcacttccactcataatccaccctgcattccactcatcagcttcacaagtaggttttcacctggtcatagctatgcctaactacagggagtgctggggaagtgtgatcttttgttgggggcacactgggagagtgggtctgtccactgcctcccagcctcagagcagctcaccacaggagcaggagagtgaactcgtggctgtggctgtcaggcagggcctttcttgagagccagcgcaggcctgggctcctcagaggcttctggagtgagagatggcacctcagcctggcccatggaggcatgttcagggatcagcactactgtgcttcttggaggaggtgggacttgagctggacccatgggaggctggaaatttagatgagtgaaaaggaggaaaggcgaagtagagccacattacagagggcctcagagtccagataaagcagttaacatgtagtggctccaggagggaagcctgtctgtgcaccacatacccaggatgtttgtgggaaggaaggagatgtgcggaagggacccaggagacctgcaggaggcaagggctgcaacagacccctttggaagttacaggangtgaatgtgagtcattagagacattcagttctgtaggaactaacgacttccaagaggcagtaaacttaaaactcancngt

SEQ ID NO: 1594 - DNA, 847 bp, Homo sapiens
  misc_feature (698)..(698): "n" may be a, t, c, g, other or unknown
  misc_feature (781)..(781): "n" may be a, t, c, g, other or unknown
  misc_feature (814)..(814): "n" may be a, t, c, g, other or unknown
ctgagtgttaataatagctaatacacattgtaattacctggtattatagattatcatgcttaagtgtacctcaatcaccatgagtctgtatcttctaatatcttttactgactgatatggtttggttctgtgtctccacccaaatctcatcttgaattgtacttccataattcccatgtgggagggacccagtgggagataattgaatcatgggggcagtttcccgcgtactgttcttgcagtagtgaataagtcttatgacatctgatgattttatcaggggtttccgcttttgcatcttcctcattctctctctgcctgctgccatccatgtaagatgggagttgctcctccttgccttccaccatgattgtgaggcttccccagccacgtggagctgtaagtccaattaaacctctttcttttgtaaactgcccagtctctggcaacttatcagcagcatgaatggactaatacactgacccataaggaagtgtctttgtttggactaatgacattattttcctacctatttggaacaattcatttaaaacttctcaatattaagaattgtgacaaggattcttctttagttttacataatttcacattatctttttggataaataatttgagtctttatttcctcgtagtaccttggtctcttatcaccttttcttcttttggtcagccatatncagtcttttcataacattatttagcaatacttttaaagcacctactctgtgtcaaggactatgctagttgctggattattacngagaataaaatagacatttctgtctcacaacgnttagagtctagcaggggaaaatcctgtaatatc

SEQ ID NO: 1595 - DNA, 831 bp, Homo sapiens
  misc_feature (629)..(629): "n" may be a, t, c, g, other or unknown
  misc_feature (741)..(741): "n" may be a, t, c, g, other or unknown
  misc_feature (763)..(763): "n" may be a, t, c, g, other or unknown
  misc_feature (831)..(831): "n" may be a, t, c, g, other or unknown
catttctgctaaccaaagaaggaaaatgagattgtacccctttagagctggagtccaaaatagtatggcatacttaacgtttatctaacatcttaggtgttcatttcaaaattcatataaatgtctcattttcctccatactctgtttttatataaaataatggtatctctctcctcaaattatttttcacacagatttactctcctgaattttccagaaatgtagatacttttaaatcaaaggaaggctgtattttgttttgttcagaacttttctattccagaaaatcatgtcaattgacagcaaagccacttgtggtcattgagcctcctgtgtaaagcaccgacgtcattctgtagttgtcatcactgtattcagggtgattctacacgtaggagtgagcatttgacagcttccatgtcttctagtgcggctgagaatttacatattaagatacacattatttattatcaattactttcctgtttcaatgtccatttagagcactaaaaatatctttgtaggtagttgatattacttatgaattttatttcaggagagcaaaggaaaatacaagatagttgtatgaaaagggggcaccgggtgtgctagagtggctcaccaccgncctacacagtgggctaattggctggagagtagagctgactctgcacagttgcatgctgaccctctgaagaatttttttacaaaagccgtgacgtcgcgtgaagaccttggcnggaattagccaagccggttganatgcatacctttgggagtcagaacggacttccaattcacatctttggctttttatacttacagctggn

SEQ ID NO: 1596 - DNA, 805 bp, Homo sapiens
  misc_feature (752)..(752): "n" may be a, t, c, g, other or unknown
  misc_feature (760)..(760): "n" may be a, t, c, g, other or unknown
  misc_feature (765)..(765): "n" may be a, t, c, g, other or unknown
tagcagtttagtccttaatctgtggcttcttaagacctctgagttccatgttagaatattttaatgtattagtttctaggaaataggagtagctgaaaggagaggaggagtgaacattcttaagcatggagttatgttctaggctgcgattgacatatgcagtctaccactatgcaaggacgaatgaggtcagtgttgtaggaacatctggtggagtaaaggcatcccatcatctgtgaagtggagtccgcctgcctacccagaggttgctgtgaggattaagaaattacatatggaaagcaactggcaaagtgttttgcttatagaaagctctaatatgctaattgccttccccgtttctttatataatttataaggaaactaaaaaccagcgattaaaaccttagctttggtttctatatgtgtaaaatatagttcttatgtttgtctctcattaacctgtaagtttcttcaaatctgggagcatgtctaattgctgtgtatatatcttcagtcctgaagatgatagtagaaaacagttcttctttgaaggtttgttacatggatggatggatgattaacttgtgccagaacacacaggagtcaacagtgaaactgggccaaggacccatgtctcttactcttaacacagtgtttctttctagtcctgtgtttttctgtctatgtacctactatggatcatgccctgtgttttgcaatgaagacctctaactttatttccattccagganaaggaggnttcancacacttctggaacaaccagctttcttttccctttcgcta

SEQ ID NO: 1597 - DNA, 845 bp, Homo sapiens
  misc_feature (785)..(785): "n" may be a, t, c, g, other or unknown
  misc_feature (840)..(840): "n" may be a, t, c, g, other or unknown
agaaatcaccaaagacatgagcgtaagccaccatgagcactgtcaacagaaacaataatctgtagattcatcccacaaatactataaatattagaaactgttgagctatagactgggtatggtggctcatacctgtagccccagcactttgggaagccaaggtgggaggattgcttgagcccaggagttcgagactagcatgggcaatatggtgagaccccacctctattttgtcaacattgccactatttttgaatcagagaatttctttttgcctgggattaaatggaatggaatacttggcctagcttatgccacacttgccaagccatcaagttctctggagaccttcttcgactccctggtgacacaagcaaacatccccaacgttttctccatgcagatgtgtggagccggcttgcccgttgctggatctgggaccaacggaggtagtcttgtcttgggtggaattgaaccaagtttgtataaaggagacatctggtatacccctattaaggaagagtggtactaccagatagaaattctgaaattggaaattggaggccaaagccttaatctggactgcagagagtataacgcagacaaggccatcgtggacagtggcaccacgctgctgcgcctgccccagaaggtgtttgatgcggtggtggaagctgtggcccgcgcatctctgattccagaattctctgatggtttctggactgggtcccaactgcgtgctggacgaattcggaaacaccttggtcttacttccctaaaatctncatctacctgagagacgagacttcacaggtcattcgtatcacaatcctggcttancttta

SEQ ID NO: 1598 - DNA, 851 bp, Homo sapiens
  misc_feature (800)..(800): "n" may be a, t, c, g, other or unknown
  misc_feature (820)..(820): "n" may be a, t, c, g, other or unknown
  misc_feature (851)..(851): "n" may be a, t, c, g, other or unknown
tacttactactggaccctgttttctctgagcagtttaatatggtttctttactattaatctaaatttgggctaattttatatatttttcaaaaggcattgattttctaaagagttttttaatcattaattcactctggtaatataagtaatacctttatatagtcatctaaactttccaaagcacttttacctattattctcagaacagtccaggaagtaggcaaaacagacattatcaccattttatgaggtattggatgctaaatgacttgctcagcgtctcataactggtaagtagcaggatcaggtctgaaatccatttcacctggccttagatccatctttgagggtctctttatctgataggcttctcgtcttggataggcaaaggaaggatgaactggagcagaggatgtcggccctgcaggagagcaggcgggagctgatggtccagctggaagagctgatgaagttgctgaaggctcaggccacagggtcaccacatacatcgcccacccatggaggcggccggccaatgcccatgccagtgcgctccacgtctgccggctccacccccacccactgtccgcaggactcgctgagcggagtcgggggagacgtgcaggaggccttcgcacaagcagaggaaggtgcagaggaagaagaagagaagatgcagaatgggaaagacagaggtaaaggcagctcagcaggactgctcgtttaaatggggagcccgagctcatggatcagcccgccccccactttggttctgcattccttcctgccaccacctttnccagagctttcggacccgangtccctgacctacttttccatctgacaggcn

SEQ ID NO: 1599 - DNA, 742 bp, Homo sapiens
  misc_feature (540)..(540): "n" may be a, t, c, g, other or unknown
  misc_feature (623)..(623): "n" may be a, t, c, g, other or unknown
  misc_feature (687)..(687): "n" may be a, t, c, g, other or unknown
  misc_feature (691)..(691): "n" may be a, t, c, g, other or unknown
  misc_feature (731)..(731): "n" may be a, t, c, g, other or unknown
tgtttatagtacctgacagtgctgtgtttcactaatatttgttgactgaatagtgctgaggggtgtcctgttctctgacctcagtaccataaggtcatatttcttggacaacaaagtccagtagcagatttctttggtggctgctagagccatttcattaacagtattgaaagcttttgtgatattagagaaacatctctgtggtcctgttactgttggctgtgcatccttctgcatctgacaggtagaaagggatggtggcagctctagtcactgccatgttgtgatttaggaagtagatggttgtgttcagatgctctggaaatgagctggcagagattgctagaagagatggctgtggtatctagagcagccagctctcttcttcatgagaggggtatatgtctttgatgcattgtttgatgtcttccatcagtttacatgctgaaagtattggtgcagatatctgagatgtatgcttctcctccacctggatagtccaggaggtaggtcagccagacacatctacttgggcgttgnttttctaacttccctgactgcatgcacaatttgaaagatcagcagctggaatgagaactgcaggctgtggctgaggaacagangccccatgctctctttgctgcaacagagacatcttccaagtcccctggaccctgtgttgctgantcangcttgccctggtatgctagtcttgctgcttggaccctggngagccccatca

SEQ ID NO: 1600 - DNA, 785 bp, Homo sapiens
  misc_feature (668)..(668): "n" may be a, t, c, g, other or unknown
  misc_feature (713)..(713): "n" may be a, t, c, g, other or unknown
  misc_feature (718)..(718): "n" may be a, t, c, g, other or unknown
  misc_feature (780)..(780): "n" may be a, t, c, g, other or unknown
gggccatcgtgttgctctccgtgctctgcaatggactggtgctgctgaccgtgttcgctggcgggcctgtccccctgcccccggtcaagtttgtggtaggtgcgattgcaggcgccaacaccttgactggcatttcctgtggccttctagcctcagtcgatgccctgacctttggtcagttctctgagtacggagcccgctgggagacggggctaggctgccgggccactggcttcctggcagtacttgggtcggaggcatcggtgctgctgctcactctggccgcagtgcagtgcagcgtctccgtctcctgtgtccgggcctatgggaagtccccctccctgggcagcgttcgagcaggggtcctaggctgcctggcactggcagggctggccgccgcgctgcccctggcctcagtgggagaatacggggcctccccactctgcctgccctacgcgccacctgagggtcagccagcagccctgggcttcaccgtggccctggtgatgatgaactccttctgtttcctggtcgtggccggtgcctacatcaaactgtactgtgacctgccgcggggcgactttgaggccgtgcgggactgcgccatggtgaggcacgtggcctggctcatcttcgcagacgggctcctctactgtcccgtggccttnctcaactttgccttcatgctgggcctcttccctgtcacgcccgangccgncaaagtctgtcctgcttggtggtgcttgcccttgcctggctggccttaaacccaatggttgnacctg

SEQ ID NO: 1601 - DNA, 768 bp, Homo sapiens
  misc_feature (3)..(3): "n" may be a, t, c, g, other or unknown
  misc_feature (739)..(739): "n" may be a, t, c, g, other or unknown
  misc_feature (752)..(752): "n" may be a, t, c, g, other or unknown
  misc_feature (763)..(763): "n" may be a, t, c, g, other or unknown
aantaatttgattgattgcaattttacagttgccttattcattcattcaccttcttggaaagtccctagttatataagtttttggctacttccaattggttgagcttaagttttgtttttctttaatacaggcatttacaagaaatggctcaacataagtttcccttgtgtttgtaaatcaaggttgaggtcacttatgaggcctaactggtttcgtctgctcagagattcttcaggcctggtctccattttaatttacttcaacatatgtctgaggttatgctggctgttggctgggatctcggctaggattgtcagcaggaacacctacgtggtttctccatgaggttgctctgcttcctcatatccaaggtggctggattctgagtgactcctaagacaatcaagtggaagatgtataaccttttttgaccttgcatcacttccaccttacctacaggcccacccaagttcaagaggaaggaatacagactccacctcttaatgggaggagtgtcacactaaagaagagcatgtggtgtggaatatcttgttacaactctcttgaaaaaagtacaacctggctgggcgccatagctcacgcctgtaatcccagcactttgggaggccgaggcaggcggatcacctgaggtcaggagttcaagaccagcctgaccaacatggagaaaccccatctctactaaaaatacaaaattagctgggtgtggtggcgcaactnacgtggcttccanctacttgggangctga

SEQ ID NO: 1602 - DNA, 756 bp, Homo sapiens
  misc_feature (679)..(679): "n" may be a, t, c, g, other or unknown
  misc_feature (738)..(738): "n" may be a, t, c, g, other or unknown
  misc_feature (742)..(742): "n" may be a, t, c, g, other or unknown
tatgcttttctgtacactgctaagttacagcatttgggtttggaattttcagtagatgtttgtttgtccctggattggtttttttttccttctgtttagtgaacagaaacagattccatgccctcagggtatggtagcaccagccactattaagaagcccaaaggacagaacctgaagctttgacaatgtaccctagggctggggggagttcaaaggccaaagacgttcagcaccagggaagctggaaggagccagcagggtgggaccacggtgatgaggaagtgcctggggagggaaattttggtgtatacagcattctactaacagtctttccacccttccccctttttccaggtttggacagtgccaataggtatgtctaggctttgtgacttttacgttttccctcttgaaatgccctgcaaggatgttaccgagaaatgccctgaatttctgaatcatcttatggggcagaagaattggccatttggaggatgttgttttattttgggtgttttgtcttgttctcctattgtaatatgacacacgggttctatctctggttgctgtcagtattgagactggaaaactcagtgttgccacctttcacagtatctacacagtctcttctctggttagcatcctgaggaagaacactgctctgagaaggccgccttnctcattccagggcggaatctggtcactcatccagcccagacccagcaggagcctttttnctgngtgtgaagctcggc

SEQ ID NO: 1603 - DNA, 832 bp, Homo sapiens
  misc_feature (667)..(667): "n" may be a, t, c, g, other or unknown
  misc_feature (677)..(677): "n" may be a, t, c, g, other or unknown
  misc_feature (721)..(721): "n" may be a, t, c, g, other or unknown
  misc_feature (808)..(808): "n" may be a, t, c, g, other or unknown
  misc_feature (829)..(829): "n" may be a, t, c, g, other or unknown
  misc_feature (832)..(832): "n" may be a, t, c, g, other or unknown
atatcggtgaaagaccagaggaaggctatcaaggccctgttggcgtgggtgcagaggaaaacgagaaagtatggcgtggcggtgcaggactttgcgggcagttggaggagtgggctggctttcctggcggtgatcaaggccattgaccccagcctggtggacatgaaacaggccctggaaaattccacacgagaaaatctagagaaggctttcagcatcgcacaggatgccctgcacatccccaggctcctggagccagaagacatcatggttgacacaccagacgagcagtctatcatgacttacgtggcacagtttctagaacgttttccggagttggaagccgaagatattttcgattcagataaagaagttcctatcgaatccacttttgttcgcatcaaagaaactccttctgaacaggagagcaaagtcttcgttctgactgaaaatggggagcgtacctacactgttaaccatgaaaccagccacccaccaccctccaaagtctttgtctgtgacaagcccgagagcatgaaggaattccgcctggatggtgtttccagccatgcgctgtcagacagctccaccgagttcatgcaccagattattgaccaggtcctgcaagggggcccaggtaagaccagcgacatcagtgagccatctncagaatcctncattttatcatccagaaaggagaacgggaggtccaactctttgncgatcaagaaacagttcactttgaggcttacacctacaaggatcctttctgcagtaagacctgtcctttgctttgaaggacccaaantggcaaaggaatcattaggcnggn

SEQ ID NO: 1604 - DNA, 801 bp, Homo sapiens
  misc_feature (562)..(562): "n" may be a, t, c, g, other or unknown
  misc_feature (678)..(678): "n" may be a, t, c, g, other or unknown
  misc_feature (713)..(713): "n" may be a, t, c, g, other or unknown
  misc_feature (776)..(776): "n" may be a, t, c, g, other or unknown
  misc_feature (791)..(791): "n" may be a, t, c, g, other or unknown
gtcaagtcctatcaattttgttgaaaacatagcttttctgtttgttgttttctttttatttccactgatagccctctagttcatggtttgactttctcctaccttatttaatgcaataatttcctaacaggtctctctgctttcagtcttaccctactgagctgcaacttatacctgacacactgctgtacatcagtctttctgaagcacacgtctaagctgggcattttcctgcccaaatactttcaagggccacccaatgcctaaagcttacacaatgtatttagggacctgctatggtctgaatgtttgagtactggtgaaattcatatgttgaaacaatcaccaatatgatagtattaagaggtgggggcttttgggggcgattaagccatgagggcagagccttcgtgaataggatctgtgcccttataaaataggcttaagggaggctgttggcttttccaccaaatgaggactcacagaaggtgccatctataaggaataggccctcaccagacactggatctgccagtaccttgatcttggacttcccagcctncaaactgtgagaaataaatttatattggttataaattaccaaatctaagatattttggtatagcagcctgaatggaccaagacaggttctctacctctgtccccaaatgacccttncaattttatttctcaagagtttttggttctcactncagtctttacttaagctaccaccacataatcccatgctatatttttatatctaaagaccgcangtaccaaaaatcctntactcaaggg

SEQ ID NO: 1605 - DNA, 750 bp, Homo sapiens
  misc_feature (240)..(240): "n" may be a, t, c, g, other or unknown
  misc_feature (416)..(416): "n" may be a, t, c, g, other or unknown
  misc_feature (548)..(548): "n" may be a, t, c, g, other or unknown
  misc_feature (632)..(632): "n" may be a, t, c, g, other or unknown
  misc_feature (725)..(725): "n" may be a, t, c, g, other or unknown
  misc_feature (730)..(730): "n" may be a, t, c, g, other or unknown
  misc_feature (735)..(735): "n" may be a, t, c, g, other or unknown
gtagtggggctggagcagagcctgccgcgaacccccggagcccacgatccctcgtgccatccctcgaatccaccagcacgagcgtcccacccgcgcctgggaccatggccactgactcatgggccctggcggtggacgagcaggaagctgcggctgagtcgttgagcaacttgcatcttaaggaagagaaaatcaaaccagataccaatggtgctgttgtcaagaccaatgccaatgcanagaagacagatgaagaagagaaagaggacagagctgcccagtccttactcaacaagctgatcagaagcaaccttgttgataacacaaaccaagtggaagtcctgcagcgggatccaaactcccctctgtactcggtgaagtcttttgaagagcttcggctgaaaccacagcttctncaaggagtctatgccatgggtttcaatcgtccatccaagatacaagagaacgcattgccactgatgcttgctgagcccccacagaacttaattgcccaatctcagtctggtactggtaaaacagctgccttngtgctggccatgcttagccaagtagaacctgcaaacaaatacccccagtgtctatgtctctccccaacgtatgagctcgccttnaaacaggaaaagtgattgaacaaatgggcaaattttaccctgaactggaagctagcttatgctggtcgaggcaataaattgggaaagaggccngaaanatcantgagccagattggca

SEQ ID NO: 1606 - DNA, 767 bp, Homo sapiens
  misc_feature (476)..(476): "n" may be a, t, c, g, other or unknown
  misc_feature (538)..(538): "n" may be a, t, c, g, other or unknown
  misc_feature (585)..(585): "n" may be a, t, c, g, other or unknown
  misc_feature (627)..(627): "n" may be a, t, c, g, other or unknown
  misc_feature (677)..(677): "n" may be a, t, c, g, other or unknown
  misc_feature (738)..(738): "n" may be a, t, c, g, other or unknown
  misc_feature (760)..(760): "n" may be a, t, c, g, other or unknown
gtattaagccagtttgccgggcaggtctgacacatgtgggaaccacctttgacttcctggggtaccttgactcaatcattttggacctcagtttttttcaatctgtagatgttggggttgtagttaatggtctccaatgccattttggccttttagaaaagtgtgtttgtgtgtgtatgtgtatttgcaatttgacacatcttttttctgacatacctgttttcaacaagtatttttagaaaaatttgtgaatgtgtttagaagaattcatgtcaagatacatatatcaattgtaagttttagaaatctttccttcaactgagaaaattgtaaaaattaagcttctcaatggaaaagaaaggtaattttaagctcctctccttcaaaaaagttcttacttgctaatagtgtgtatcagggaagggtcaaatccattaaaactctcccaagtggaacaagtgacctgaattacttgnttgcttaagtcaaacaggaaagttcttcttcctttgaactgaaataattccaggaaatgcantaaagaagctgagggagaaagaatgcatcgaggagagactgcttttncagcccaacctgtcacctacagtcttcacagctcccaagctntggcagtacctgttacgtacagtttatgtgcttgataatattcagggtgntaaatcattcacgtctataccttgatggcttctacaaactggcgttttttaatttttatgntggaaactttacttttaacatngcccctg

SEQ ID NO: 1607 - DNA, 730 bp, Homo sapiens
  misc_feature (555)..(555): "n" may be a, t, c, g, other or unknown
  misc_feature (714)..(714): "n" may be a, t, c, g, other or unknown
  misc_feature (720)..(720): "n" may be a, t, c, g, other or unknown
  misc_feature (728)..(728): "n" may be a, t, c, g, other or unknown
ctctttggccaagccctgcctctgtacagcctcgagtggacagccagaggctgcagctggagcccagagcccaagatggagccccagctggggcctgaggctgccgccctccgccctggctggctggccctgctgctgtgggtctcagccctgagctgttctttctccttgccagcttcttccctttcttctctggtgccccaagtcagaaccagctacaattttggaaggactttcctcggtcttgataaatgcaatgcctgcatcgggacatctatttgcaagaagttctttaaagaagaaataagatctgacaactggctggcttcccaccttggactgcctcccgattccttgctttcttatcctgcaaattactcagatgattccaaaatctggcgccctgtggagatctttagactggtcagcaaatatcaaaacgagatctcagacaggaaaatctgtgcctctgcatcagccccaaagacctgcagcattgagcgtgtcctgcggaaaacagagaggttccagaaatggctgcaggccaagcgcctnacgccggacctggtgcaggactgtcaccagggccagagagaactaaagttcctgtgtatgctgagataacaccagtgaaaaacctggcatggagcccagcactgagaactttcagaaagtggtagccttcttccaactgggtatacccacccattttcnaatagnaatcattnaa

SEQ ID NO: 1608 - DNA, 703 bp, Homo sapiens
  misc_feature (495)..(495): "n" may be a, t, c, g, other or unknown
  misc_feature (566)..(566): "n" may be a, t, c, g, other or unknown
  misc_feature (685)..(685): "n" may be a, t, c, g, other or unknown
  misc_feature (692)..(692): "n" may be a, t, c, g, other or unknown
  misc_feature (703)..(703): "n" may be a, t, c, g, other or unknown
tattgagtaataacagcaaaaataaaaaaaaccgtggtaaaatgtcttacagttgggaagtgcctaatgaagtatgatttatccatactatgtaatattacataaccatcaaaaatcatatttaaagataatgacatggggaaatgcttactatctatgaaaaaagtaaaatatgaaactgcatatattgtctcagtcttatatgtttggagctattttaaatagtgttgctttgaacattcttatacatgtcttgtggtaagcatatatatgcctttctgttggggaaatatctaggaaaggaattgctgggtcgtatagatacacatttgtccagccttagtagctattgccaattagttttctagttttaccagtttgcccattcctagcgcatgaactcccattgctgcatatcattatcgatgcttgacatgtctgttttgtgttttcattttagccattctggtggatggcagagacactctttgtggntataatttgcatttccctgacaagtaattaacttgaacacttttctatatgtttattggttatttgactgncttctttggtaaaatgctttgaagaggaacattttcaattatcagaagaaaaacattttatttttctaataacattccaaacaattatgatgacgcttttctaagggccatactttgantagtgangctttattggn

SEQ ID NO: 1609 - DNA, 704 bp, Homo sapiens
  misc_feature (661)..(661): "n" may be a, t, c, g, other or unknown
  misc_feature (670)..(670): "n" may be a, t, c, g, other or unknown
  misc_feature (680)..(680): "n" may be a, t, c, g, other or unknown
ctcaagatgagtaaaaagcccccaaatcgccctggaatcacttttgagattggtgctcgtttggaggcactggactacttacaaaaatggtatccatcacgaattgaaaaaattgactatgaggagggcaagatgttggtccattttgagcgctggagtcatcgttatgatgagtggatttactgggatagcaatagattgcgaccccttgagagaccagcactaagaaaagaagggctaaaagatgaggaagatttctttgattttaaagctggagaagaagttctggctcgttggacagactgtcgctattaccctgccaagattgaagcaattaacaaagaaggaacatttacagttcagttttatgatggagtaattcgttgtttaaaaagaatgcacattaaagccatgcccgaggatgctaaggggcaggattggatagctttagtcaaagcagctgctgcagctgcagccaagaacaaaacagggagtaaacctcgaaccagcgctaacagcaataaagataaggataaagatgagagaaagtggtttaaagtaccttcaaagaaggaggaaacttcaacttgtatagccacaccagacgtagagaagaaggaagatctgcctacatctagtgaaacatttggacttcatgtanagaacgttncaaagatggncttttcacagccagagagcccatt

SEQ ID NO: 1610 - DNA, 782 bp, Homo sapiens
  misc_feature (697)..(697): "n" may be a, t, c, g, other or unknown
  misc_feature (735)..(735): "n" may be a, t, c, g, other or unknown
  misc_feature (757)..(757): "n" may be a, t, c, g, other or unknown
aaaccccagagctaatagaagacaagacaaaaacaagctcagagcagaactaaaggagacagagacacaaagagcccttcaaaaaaaatcaatgaatccaggagctgtttttttgaaaaaaatcaacaaaatagatagaccaccagcaagactaacaaagaagaaaaaagaagattcaaataaacacaataagaaatgataagggggataccatcactgatcccacacaaatacaaacaaccattagagaatactataaacacctctatgcaaataaactggaaaatctagaaggaatggataaattcctagataaatacacacttccaagactgaatcaggaagaagttgaatccctgaatagagcaataacaagttctaaaattgaagcagtaataaatatcctaccaatcaaaaaaagtccaagtccagatggatttacagctgaattttaccagaggtacaaagagaagctggttccatttattccgacactatttcaaacaactgaaaaggaggaacttctccctaactcatgctatggggccatcatcatcctgataccaaaacctggcatagatactacaagaaaagaaaacttcaggacaatatccctgatgaacatcgatgcaaaaattctcaacaaaatattggcaacccacattccaatagcaccaaccaaaaggatttatcccgnccggcccgggcgccggtgggcttcacgcctggtaaatncccaacactttttgaaaaaggncccaaggccgggcccggaatcaacg

SEQ ID NO: 1611 - DNA, 327 bp, Homo sapiens
  misc_feature (189)..(189): "n" may be a, t, c, g, other or unknown
  misc_feature (199)..(199): "n" may be a, t, c, g, other or unknown
  misc_feature (223)..(223): "n" may be a, t, c, g, other or unknown
  misc_feature (305)..(305): "n" may be a, t, c, g, other or unknown
  misc_feature (317)..(317): "n" may be a, t, c, g, other or unknown
  misc_feature (324)..(324): "n" may be a, t, c, g, other or unknown
tctgagagaggagccttagccctggattccaaggcctatccacttggtgatcagcactgagcaccgaggattcaccatggaactggggctccgctgggttttccttgttgcttttttagaaggtgtccagtgtgaggtgcaactggtggagtctgggggaggcctggtcaagccgggggggtccctganactctcctgngcagcctctggattaagcttcagnacctatgccatgaactgggtccgccaggctccagggaaggggctggaatgggtctcaagtattagtagtagaagtgattacntatactataganactcagngaa

SEQ ID NO: 1612 - DNA, 711 bp, Homo sapiens
  misc_feature (559)..(559): "n" may be a, t, c, g, other or unknown
  misc_feature (695)..(695): "n" may be a, t, c, g, other or unknown
  misc_feature (702)..(702): "n" may be a, t, c, g, other or unknown
  misc_feature (710)..(710): "n" may be a, t, c, g, other or unknown
tgcttgatttaaaaatttcagtcttgttaaatttatctcataggattctgacttcctcctctgttatcttgaatttcattgggcttgctcaaaacaggtattttgaattctctgaaaggtcaagtatctgtatcactctgggattgtcactggtgccttatttagtttatttggtgaggtcatgtttctcgggatggtctcgatgctttggatgtttgttgatgtccgagcattgaacggttagatatttgttgtggtcttcacagtcttggcttgtttgtacccatctttcttgagaaggctttctaggtattccaagtgtgttgtgtgttgtaatctaagtctttggttactgcagctgcatctgcattagggggcacctcaagccgagtaatgctgtgactcttggcagatgcgtggaagcactgtcttggtgatctggggtaagatccaagagaattccctgcattaccaggcagagactcttttccccttctcttgccttcctgcaaacaaatggagtctctctccatactgagctccctggatcctggggcangggtgacacaagagcccatatggccaccaccactgggactgcactggatcagacctaaagccagggcaacactgggtcttgcctaaagcccacagtgaccactggctgctattgctgatgttcacccaaggcccangggctgntcaatcanc

SEQ ID NO: 1613 - DNA, 726 bp, Homo sapiens
  misc_feature (638)..(638): "n" may be a, t, c, g, other or unknown
  misc_feature (661)..(661): "n" may be a, t, c, g, other or unknown
  misc_feature (707)..(707): "n" may be a, t, c, g, other or unknown
gtgatgcggatgactctgaacgtaatgacctggcggcggagggagatggtgcgctggctggtcagctgtgccacagagattggcccgcaagccctgatgaatatcatgcagaactggtattccttattcacaccagtggaggcggctaccatcgtggcagtgacgggcaccacacacgccactctgctgcgactgcagctggacacatcgcggagggaggagctctgggcctgcgcccgcaccctggccttgcagtgcgcgatgaaggaccctcagaactgcgccttgcctgccctgaccctgtgcgagaagaaccactcggccttcgaggcggcctaccagatcgtgctggacgcggcggccggcggcctgggccacgcccacctcttcactgtggcccgctatatggagcaccgcgggctgccgctccgggcctacaagctggcgacgctggccctggcgcagctcagcatcgccttcaaccaggacagccaccctgccgtcaacgacgtgctttgggcctgctctctcagccactccctgggccggcacgagctctctgccatcgtccccctcatcattcgcagcatccactgtgccccaatgctgtccgatattctgcgccgctggactctctnggcgcccggtctgggccccttangggcacgccgggcccggcaagccactgggtgccgaccgggcgccgntctgccagcttctggacgc

SEQ ID NO: 1614 - DNA, 846 bp, Homo sapiens
  misc_feature (837)..(837): "n" may be a, t, c, g, other or unknown
gaggtgaaattcatcatagaaaaggattccctatttaataaatggtgctgggaaaactggctagccatatgtaatagaccaatggaacagaacagagccctcagaaataacaccacacacctacaaccatctgatctttgacaaacctggcaaaaacaataactgggaaaaggattccctatttaataaatggtgctgggaaaactggctagccatatgtaatagaccaatggaacagaacagagccctcagaaataacaccacacacctacaaccatctgatctttgacaaacctggcaaaaacaataactgggaaaaggattccctatttaataaatggtgctgggaaaactggctagccatatgtaatagaccaatggaacagaacagagccctcagaaataacaccacacacctacaaccatctgatctttgacaaacctggcaaaaacaataactgggaaaaggattccctatttaataaatggtgctgggaaaactggctagccatatgtaatagaccaatggaacagaacagagccctcagaaataacaccacacacctacaaccatctgatctttgacaaacctggcaaaaacaataactgggaaaaggattccctatttaataaatggtgctgggaaaactggctagccatatgtaatagaccaatggaacagaacagagccctcagaaatacaccacacacctacaccatctgatctttgacaaacctggcaaaaacaatactgggaaaaggattccctatttaataaatggtgctgggaaaactggctagccatatgtaatagacccatggacagacagagccctnagaataccc

SEQ ID NO: 1615 - DNA, 846 bp, Homo sapiens
  misc_feature (795)..(795): "n" may be a, t, c, g, other or unknown
  misc_feature (800)..(800): "n" may be a, t, c, g, other or unknown
  misc_feature (817)..(817): "n" may be a, t, c, g, other or unknown
ttttccccggcgtggtctcactcgcgatttaaggcataggtgtcgccgagccgggaggctgggagtcgccaggcgtgcgggggagaggcctgggccgcgccgcggcggggggtggaggaagagggcaggcgaggcgggaaggtgggctctggccgccgggagccggggacggagccgccgccgttgcccctagcggggagcagccgggaggagggggccgcagtcgggagaggggaccccaccatgcccaaagtcttcctggtgaagaggaggagcctgggggtctcggtccgcagctgggatgagctcccggatgagaaaagggcagacacctacatcccagtgggcctaggccgcctgctccacgacccccccgaggactgccgcagcgacggcggcagcagcagcggcagcggcagcagcagcgcgggggagcctggaggagcagagagcagctcgtccccgcacgcccccgagagcgaaacccccgagcccggcgacgccgagggccccgatggacacctggcgaccaagcagcgcccggtcgccagatcgaaaatcaagttcaccacaggcacgtgcagcgactcggtggttcacagctgtgacctgtgtggcaagggcttccgtctgcagcgcatgctgaaccgtcacctcaagtgccacaaccaggtgaaaagacacctgtgcacctttttgcggcaagggcttcaacgacaccttcgacctgaaaaggcacgttcgacacacacaggcattcgtccctacaaatgcaacgttttgcaataagccttnaccancgcttgtttttggagtnccacctgaagaaattcattgggtcaacac

SEQ ID NO: 1616 - DNA, 785 bp, Homo sapiens
  misc_feature (748)..(748): "n" may be a, t, c, g, other or unknown
  misc_feature (754)..(754): "n" may be a, t, c, g, other or unknown
  misc_feature (764)..(764): "n" may be a, t, c, g, other or unknown
gtgttgatatgtgagaatgtgtgtgtatgtcactgtggggaggtggctccaggcttcctggtgtgcccggggtggccacagtaaggaggctgcactcaggccctgcccgtactcctgccctccccgggtggcccaaccttgtgtgactgcaagtgactggaggaggccagggggttggaggacgtgtccaggtcctatgtcacaggccaggggcacatccacacacctgcgcccctggctgagctgtgttgtcagggaccctcagcacctgggaaggtgtggggaggccaagaggccaggtcctaggaaggcttgtagtggacccttcatctgcccaggggatccatttgtggggtcaagggaggtcctccagccaggcccaccccgaccccggccagagcatcttccccacccctgggctcccacccagctgcccactggcccacgtccctacctgtccccggttcttgccgctccctgtcctgggaggcaggttgggatctggccttacttccagtaaaatgacttctctttcatattaggccaaggcgagagagcggagacatttatgaaactttgtttaatgtactgaaaagccatcggccagaacatttaggaaattgattttcctggcattgatgaactcgttttattttaccccagtattaattacttttttttaaaacaaattaatttaagagtcgtaaaacctaacaagtgagccaaacgtccatagatcgtgtcctgnttccgncccttcccanaattgacccccttccttttat

SEQ ID NO: 1617 - DNA, 841 bp, Homo sapiens
  misc_feature (740)..(740): "n" may be a, t, c, g, other or unknown
atggcatgaacccgggaggtggaggttgcagtgagtcaagatcgtgccactgcactccagcctgggtgacagagcgagactccgtctaaaaaaaaaaaaaagaaagtcacctgttaaagattacacagcaaactgccagcatccaaagcctgtcctcttccctcttccatttgaataggctccttccagccaacattcatgtatattctatccaggctccaccttccccttggaaactgcagctgtgtttgctgaaaaggcaagtggggacagcttgtttcctcccaacctcaggtaccttcctctccaactgctgctcctaaatctcagaatatatggtgttgcttgcttctcctccgaaccgccccctcccctcagggtggggatagggcatggaaatggcctttggaagttaatgggattcttggggtcagattggattctccagaaccttggggaaaggaaagtcaggtttctagtaaataaataacatcctggaatggccctagcataggctatttgtaggaggaaaggagagaagtagagaagcaaatcttgactatttcccccaagaagtgccaagtggttttggaacttttttttttcggttttgaacatttttaagggaaagtttatcctactctaccatatttaaatagcatacgctcaaagaacgacttgatttcctttaggccaaagagaagagatggccttggttgttttcctagtgataagagtcnaggattaattggtaaatctctttttgaaactgagagatgccagggcaaggtggctcatgcctataccccagttactcggaagcttaggcaggaaaattgtt

SEQ ID NO: 1618 - DNA, 702 bp, Homo sapiens
  misc_feature (619)..(619): "n" may be a, t, c, g, other or unknown
  misc_feature (626)..(626): "n" may be a, t, c, g, other or unknown
  misc_feature (698)..(698): "n" may be a, t, c, g, other or unknown
gatgttattgtcagcactatagagtggcagggtggagtcttaccctgttgtgaaacacctccctccctctctaggtgttctccccaactgcctgctagggagggtactcccctcaggtagaattaagagggctgagggtcaggggccatgggccaaggaggtcagtcagatctccttggatctggaggctctggctttcagccagaggcagggggagaaagatgatgtctcatgatgccagcgcttcctcttcactggcgtctgacccaggagcagtccagaatcagcttctctgacctcactccaactcacgtgtctttgacactttaagggacttcctgttttagggtcttctggctgggtgtcattgaatgggcagtgattctctaactttagactgatgttccccagcctttgtttggggactcggaggcagagtagacagttacccttacccctgggttggggagggtcatattcctggtatccccaggaggtcaacaggggcttcatttttctgagggactagagggtcttgtggagctcctgggacagagatctagatccagagagaacattcgtccttccgatctcagctcagctctgagagcccttccanagagcancttccgagggcttcagaacccttcgaaaagcccttccagagagcaaccccccaacttcccaagctggctggnactt

SEQ ID NO: 1619 - DNA, 806 bp, Homo sapiens
  misc_feature (639)..(639): "n" may be a, t, c, g, other or unknown
  misc_feature (745)..(745): "n" may be a, t, c, g, other or unknown
  misc_feature (767)..(767): "n" may be a, t, c, g, other or unknown
  misc_feature (773)..(773): "n" may be a, t, c, g, other or unknown
aaagataaaaggtttctaaaacatgacggaggttgagatgaagcttcttcatggagtaaaaaatgtatttaaaagaaaattgagagaaaggactacagagccccgaattaataccaatagaagggcaatgcttttagattaaaatgaaggtgacttgcactgagcgggacctgcgagcagcgcgggcggcagcccgggggaagcggtgagtcgcgggcggcaggcccagccagtccgggaccatgtctggagaactaccaccaaacattaacatcaaggaacctcgatgggatcaaagcactttcattggacgagccaatcatttcttcactgtaactgaccccaggaacattctgttaaccaacgaacaactcgagagtgcgagaaaaatagtacatgattacagaaaatgaattgtggagagcaaagtacatctatgattcagcttttcatcctgacactggtgagaagatgattttgataggaagaatgtcagcccaggttcccatgaacatgaccatcacaggttgtatgatgacgttttacaggactacgccggctgtgctgttctggcagtggattaaccagtccttcaatgccgtcgtcaattacaccaacagaagtggagacgcacccctnactgcaatgagttgggaacagcttacgtttctgcaacaactggtgccgtagcaacagctctaggactcaatgcattgccaagcatgtcttaccacttgataggacnttttggtccctttgcttgccgnaactgnttgctaattgcattaaaattccattaatgaggc

SEQ ID NO: 1620 - DNA, 781 bp, Homo sapiens
  misc_feature (602)..(602): "n" may be a, t, c, g, other or unknown
  misc_feature (715)..(715): "n" may be a, t, c, g, other or unknown
  misc_feature (724)..(724): "n" may be a, t, c, g, other or unknown
  misc_feature (747)..(747): "n" may be a, t, c, g, other or unknown
acttacatctttaccaccgcgtctattcctctctcaccccgcccccatggcccaagtctttagcctggcattcacgtaccctcactggcaatcttggggaaagcctcagaaaatggtacagcagaaagcccagcgtggaggagccagttgggagactcagcatgtgggcaccctgcttctctgcgcagagcctcctctgtcataggtagatccagcccatctcaggttacactacagtctgtaacccctagcctctccctcctcgcgcccctctggcctccatcactgtcgtgccggtcgtggggacagatgggagggaattacggtatttacagctgctcttcgccggctcttgctcccccgcgtgtcgacaaccgaaactgcagcgaggcccagaggcctctgcccactcccctcggagttccaggaggacgctaagcgcgagaagccaggctcagggaaactgaacgcccatacgctcctagtccctctcacctggatcctctgcgtcaggttacgtgcttgcgctatttttccttttgtttctttaaatttttttttgtagagacagtgagccgtgtgtgtggggggggttggaaggnaggtctcaccattttgcccaggccggtctcgaactcgtgggctcaagccttaccacctgccttagcctccaaagtgctgggactacaggtgtgagccaccacgcccagcctgnttgcgctgnttttgaggctttccgccaaatgntttctttcttggcaagaaagtcaccccctaaaat

SEQ ID NO: 1621 - DNA, 826 bp, Homo sapiens
  misc_feature (654)..(654): "n" may be a, t, c, g, other or unknown
  misc_feature (677)..(677): "n" may be a, t, c, g, other or unknown
  misc_feature (686)..(686): "n" may be a, t, c, g, other or unknown
  misc_feature (794)..(794): "n" may be a, t, c, g, other or unknown
  misc_feature (814)..(814): "n" may be a, t, c, g, other or unknown
gtgggcttatctacctttgatttttgaggttgctgacctttgagtgaggtttttgtggggtcttttttgttgatattgttgtagttttctgtttgtttttctttttaacaatcaggccactctatctatcgtaggactgctgtggtttgctgggggtccaatccagaccccagttgcctcagtttttcctgtacctggaggtatcaccagtgtaggctgagaaaaagcaaaggtggcagctagctccttccactggaagctccatcctagggggatactgaccttttgccagcccacacacacctgtaggaggtggctgaagacccacattgggaattgtcacccagtcaggaggaacgggatgagggacccacccaaagaagcagtctggctgctttttggtagagcaggtatgctgtgttggaggaggtcccttccttgtttggaccacctatattctccatagctggcagactagagcagctgacttgactgaaccatagaggtggtggctgcctctcccccccaggaactcagagttgtctctgatggactctaatccactgccattggctggctgggattccacgccagtcggtcttaacttgtgaggtgctgtggaagtggggcccacagaacgtcgctgcttgactncctggattcagcttccttcctanggatatatncagatggatttcccacctttctgggaatcctggggctggtgtatttaaaactccgggtctctgcatgacctaagtggctactttgccgggactcccatacttggtatnaaccaagcctgtgcatggcnataagggacttc

SEQ ID NO: 1622 - DNA, 783 bp, Homo sapiens
  misc_feature (610)..(610): "n" may be a, t, c, g, other or unknown
  misc_feature (681)..(681): "n" may be a, t, c, g, other or unknown
  misc_feature (742)..(742): "n" may be a, t, c, g, other or unknown
  misc_feature (748)..(748): "n" may be a, t, c, g, other or unknown
  misc_feature (782)..(782): "n" may be a, t, c, g, other or unknown
gttaacagtagttacaatattatttcttgaagtcccgaattctaagaccgatgctgatgatccttctctcctttcccctcagcttgatatatggtccaaatccaactatcaagtattccagaaggtaagttttactttttgcttcttactcaagcggcattaggaaaacgtgaatgctttgaggtttaaacattggtctcaaatcagaggcttttgaaaaagtgaaaaaagccagacagaaaaggatgctcactgtctgattccatatgtatgacattctggaaaaaaactgtattctgaaaacctagttttaaaactcggtttctcagagccctagcggtctccactggtgcccaagggatgggccaagggaagcaggctggcactccctcaccctgccccttccccactttgtgctctggggacactgtatctttttcagatattgggcttccttatgaaaaactgttatgggaaatgtcagacgaaatgaaaagtgaccagagaaaattcatttccccagctcctgacagtgcagggccccttccctggactaactcgggccctgtggctgatgaggattctgtccccaccggcacacccccaccantccccacagtactcagggccagctccctgcagggcagcagccggcttcttatgttctcatccatcttctgnctctggtctcatccagtagtgaaataagagagttggccatcatctcattcggtccctcatncagctnaacaacaggtgtccacttcccaacactttgggang

SEQ ID NO: 1623 - DNA, 462 bp, Homo sapiens
  misc_feature (447)..(448): "n" may be a, t, c, g, other or unknown
  misc_feature (457)..(457): "n" may be a, t, c, g, other or unknown
ttccttgggcaaggccaaattcttcacactttctattcctagtcagctgaattttgcttttttgttttgttttgttttgctttgttttgttttgttttgtttgagacagagtgctgctctgttgcccagactggagtgcagtagtgcaataatagctcactgcagacttgacctcctgggctcaagcaatcgtcccatcttagcccccagagtagctgggactatagacttacaccaccacacactgttaatttaaaaaaatttttttggtagagatgagatctcactacattgcccaggctggtcttgaactccttgtcttaagtgatccttccacctcggcctcccaaagtgctgggattacaggtgcgagccactgcctggccagctgaatgtttttacatgtttaatatttcttatctgaaatgcttgggaccagaagtgttnnggatttcanacttt

SEQ ID NO: 1624 - DNA, 797 bp, Homo sapiens
  misc_feature (630)..(630): "n" may be a, t, c, g, other or unknown
  misc_feature (676)..(676): "n" may be a, t, c, g, other or unknown
  misc_feature (707)..(707): "n" may be a, t, c, g, other or unknown
  misc_feature (732)..(732): "n" may be a, t, c, g, other or unknown
  misc_feature (787)..(787): "n" may be a, t, c, g, other or unknown
ggagctccaaatgtcgttgggtggggaagcaaaatgtagagaaacatttaaagcacactgtaataataaatgcaattataaactatatggaggagggtgcagaggagggaatgtgtctggtgtgtgatgtgtgtgtgtgcagtgggggtatcacagagagtatgacatctgagttgagggtagcaggtgcctggagtctcaggtggctgctcacccatctgtgcaggtgtctctggggctgctggtctcacctgtggtctgcagtagacacaattggctgagcaggatatgtgatactgtgtggttggtgtggagttttgaagaaggggctgtgtttgggccacgtaggctctactcagagacctgaaaccacttcagaatggtgcatatgtcgaaagagctggctgggggccttgcccaaaccaactgaggtcttaaagtccggggaaaaaaagtctgggttccaactagaattctagaaatatttctagaacacacagagagggaataagtccctctatcacccttattaccaagccttgtggttccctgtgattttagataatgtctgatatttttctggctatttgcctagtaggatttaaaaaatattttcaaagtgaagctganagagaatcttggaaacacacatacctgttgatcatgggccctgcanaattggcccttgggggctttatttggtatgngtgcctgggtggctttaccacttanactctatcatgggcccccatgaagctccattctcaatactgaataatattacttnccttggtgag

SEQ ID NO: 1625 - DNA, 780 bp, Homo sapiens
  misc_feature (654)..(654): "n" may be a, t, c, g, other or unknown
  misc_feature (737)..(737): "n" may be a, t, c, g, other or unknown
  misc_feature (756)..(756): "n" may be a, t, c, g, other or unknown
  misc_feature (779)..(779): "n" may be a, t, c, g, other or unknown
tctgagcatccgaagcgcggccaggtatgcatctagggcaccggggtcctggtggcgcgccagtgggccccctccctccacccctgtgactaaaccaccctccctacacggttgaatgacaagttcaaccttccctaaaacccccggtgacgagtccagccgcgcgcccattcttcacgcaggggcgggacggactttcaaagacttggagttcccacgggtgtgggttcgagaccttcctctgccagttcccagctccgctaccctgagcaaatgacttacgctccattggattttccgcaatgtggctgaaggtggggggcctacttcgggggaccggtggacagctgggccagactgttggttggccttgtggggccctggggcctgggccccaccgctggggaccatgtggaggttcttgggcccaaaagttttaccaggatgggcctgggagaggcctgggtgaggaggacattcgcagggcacgggaggcccgtcccaggaagacaccccggccccagctgagtgaccgctctcgagaacgcaaggtgcctgcctcccgcatcagccgcttggccaactttgggggactggctgtgggcttggggctaggagtactggccgagatggctaagaagtccatgccaggangtcgtctgcagtcagaagggtgggtctgggctggacttcaacccctttcttgtcggaagccaatgcccaaccggattgtgcanaccttatgtacagttcganggggccgcccttaaggttgggcna

SEQ ID NO: 1626 - DNA, 695 bp, Homo sapiens
  misc_feature (624)..(624): "n" may be a, t, c, g, other or unknown
  misc_feature (650)..(650): "n" may be a, t, c, g, other or unknown
  misc_feature (671)..(671): "n" may be a, t, c, g, other or unknown
aggcaggcggatcacttgaggccaggagttcgagaccagcctggccaacatggtgatacccgtctctactaaaaacacaaaaattagccaggcatggtggcacacgcctgtaatcccaggtacttggaaggctgaggcaggagaatcatctgaacccaggagacaggttgcagtgagccgagatcatgccactgcactccagcctgggcatgagactctgtctcaaataaatagataaataaatgattttaaaaaaataaaagctgaggagtgacttggttagatccgtagtttaaagaagtcattttggggccaggcacggtggctcacgcctataatcccagcactttgggaggctgaggcaggtggatcgcctgaggtcaggagtttgagaccagcctggccaacatggtgaagctccgtctctactaaaaatacaaaaaattacccagccgtggtggcttacacctgtaatcccagctactcaggagggtgaggcaggagatttgcttgaacctgggaggtggaggttgcagcgagccaagatcatgccactgcactgcagcccgggcgacagagagactcaaaaaaaaaaaaaaagtcgttttgggaaccagtcaccgnttctttttgatagcccctggttttgntaggggaagcaaggggttcancaaaatgaatatacttcctggctt

SEQ ID NO: 1627 - DNA, 661 bp, Homo sapiens
  misc_feature (592)..(592): "n" may be a, t, c, g, other or unknown
  misc_feature (597)..(597): "n" may be a, t, c, g, other or unknown
  misc_feature (605)..(605): "n" may be a, t, c, g, other or unknown
agaccagttgagggctgagaggtttcagacatgacgcccccgtgccccaagttcatccgtgtacagtgcccaagggcagagacatgttcctctagaaccatcgttcattcgtcagctctcggaaacaaagcactggtactgtgctgagcactgtggcaccggctctgctgggctcctggatgctccaaggccctgctccctggctgactgcccattttctgtcctcctcccggcttcaggtgcgagacaagaagcttctcaatgacctgaatggagccgtggaggatgcaaagacggcccggctgttcaacatcaccagttctgccctggcagcctcctgcatcatcctcgtcttcatcttcctgcggtaccccctcaccgactactaaggcccgccaggcacggctgctggcggagacaagcactgagacatgtttattctcatggtccctgaaacgcaggatcccatgaggttggggcagggcagggcttcttgtcctggggcccccttgagctgtgaactgggcagcaaggccatcagaagctgagtacagcaagggggcagtgagcttggccctcagtccaccccctncgctnctggcctncgcctgctgtgtctggggcctgggggcttctccctcgctgctgaccctggctttca

SEQ ID NO: 1628 - DNA, 802 bp, Homo sapiens
  misc_feature (710)..(710): "n" may be a, t, c, g, other or unknown
  misc_feature (752)..(752): "n" may be a, t, c, g, other or unknown
  misc_feature (759)..(759): "n" may be a, t, c, g, other or unknown
cccggcgctcggagcccgagtccgcgggaagatggcggcgccgctcatccccctctcccagcagattcccactggaaattcgttgtatgaatcttattacaagcaggtcgatccggcatacacagggagggtgggggcgagtgaagctgcgctttttctaaagaagtctggcctctcggacattatccttgggaagatatgggacttggccgatccagaaggtaaagggttcttggacaaacagggtttctatgttgcactgagactggtggcctgtgcacagagtggccatgaagttaccttgagcaatctgaatttgagcatgccaccgcctaaatttcacgacaccagcagccctctgatggtcacaccgccttctgcagaggcccactgggctgtgagggtggaagaaaaggccaaatttgatgggatttttgaaagcctcttgcccatcaatggtttgctctctggagacaaagtcaagccagtcctcatgaactcaaagctgcctcttgatgtcctgggcagggtctgggacctcagtgacattgacaaggatgggcacttggatcgagatgagttcgccgtggccatgcacttggtgtaccgagccctggagaaggagcccgtgcccttcggcctgccccgtccctcatccacccttcaagagaaagaagactgtgttccctgcgccgtccccgtcctgctgncagccccaccaaaagacagcttcgttcacgccgtcccacggnaacgtancagccttaacagacaggagctgtccccaacacagcttaacaac

SEQ ID NO: 1629 - DNA, 751 bp, Homo sapiens
  misc_feature (642)..(642): "n" may be a, t, c, g, other or unknown
  misc_feature (739)..(739): "n" may be a, t, c, g, other or unknown
  misc_feature (742)..(742): "n" may be a, t, c, g, other or unknown
  misc_feature (749)..(749): "n" may be a, t, c, g, other or unknown
gcatgcgcatagctaaccgcacccggttcagctcgcctttcttggccagaggcgccggttggactcacgggcggggcatgatggtggtgggtacgggcacctcgctggcgctctcctccctcctgtccctgctgctctttgctgggatgcagatgtacagccgtcagctggcctccaccgagtggctcaccatccagggcggcctgcttggttcgggtctcttcgtgttctcgctcactgtatcctccctgcagttggagggggcgggccacgtaggcatgtgcccttccccttccccacacagctctgtccccgttgcacaccctactccttaactccctcaaccaggccttcaataatctggagaatcttgtctttggcaaaggattccaagcaaagatcttccctgagaatgcttaggtgaaaggttgttaaggagaaatatatttactgaagctgtctgaagacagatgacgcttttcgattctgcaccttgtatagctcctggagttggagctggaagagaaggcctttgaaagcaagaaactttggtaccttctggccagctcccagggaaggtttgaggggaacaggcaaatttgggctgatgttttgcatctattcctgggaagcggtccttgntccaccagaagaacagcaggaccaagttcactatggagttctgatgtgaaagttaactcaatattagagaatctacttatttgagggaattgggaanaanctaaatnct

SEQ ID NO: 1630 - DNA, 764 bp, Homo sapiens
  misc_feature (670)..(670): "n" may be a, t, c, g, other or unknown
  misc_feature (690)..(690): "n" may be a, t, c, g, other or unknown
  misc_feature (747)..(747): "n" may be a, t, c, g, other or unknown
agctcaaaagcagtcatagatgatacatatacagtggatgtggctgtgttcaattaaaactttttttgttgttttttaagacacggttgtctcactttattgcccaggctggagtgcagtggcatgattatagctcattgcctccttgaattcttggactcgagcaatcctcttgcttcagcctcctgagtagctgagactgcaggcatgtgctgttagcacacccagctagtttttaaatgttttgtagacatagggtctcaccatcttgctaaggctggtctcaagtgatcctcccacctctgcctcccagagtgctgcaattacaggtgtgaaccaccacaggccctcattaaaactttatttgcaaaaacagatggtggatagtaattgtttgttcacccctgctcaaacacaccttgttaaagcacacacataccaccgacctttgttcattgctgatgctcttactgataacccaccctcccagtgaagttgcttactagagtaagctcacagagggcagactctttggttttgcatctataccctgagctggtgagtagtatttttttttcataccctgagctggtgagtagtatttttttttcaatcaacttggaattaagaacttgtggaaaactggacatttcgctataggaagcattgngatagggaggtattatgtanaaagtctgctctaggaaatggaacattaacttttcatttgagtggcataacttaatntaagtttggatggaaag

SEQ ID NO: 1631 - DNA, 816 bp, Homo sapiens
  misc_feature (728)..(728): "n" may be a, t, c, g, other or unknown
  misc_feature (757)..(757): "n" may be a, t, c, g, other or unknown
  misc_feature (792)..(792): "n" may be a, t, c, g, other or unknown
taggcagcagtgtgcctgggagacaagcagagatctcacggattcctttatttttcctgccatagcagcaaattttccttggagcactatttgaaaattaacattactgaaaaaattaagcccacttaaagggactctagtttttatctaaattataaaaggtgagaagacagttctgaaaaaaatgtatcaccttgaaactagaatgctttagttaatggggtaagctagaagtaagctgcctttgataactcatgtaagagcagcatatgaatggatgataactgtctttcttccatttaattcagctacttcctattcaatctcaaatctcagttggaaagcaatttccctcacttgacccatttttcttctgcattatatctttcttctggttcttcaacacaaaaagtttgaaaagacttgtaagcagattcagacacctggtttgggctaagcgtatttcattatttggctttccagttggaaggataacagttttacttctttacattttgttttgtttcttggttctttttgagacaggttctcgctctgttgcccaggctggagtgcagtggtacagtcacagctcatcgcagcctcagcctctcaggctcgggcggtcctcccgcttcggcctccagagtagctgggaccacaggcatgcactatcatgcctggctaatttttaaaattggttttgtagagacagggtcttcctatgntgctggggattgcaagtgtgagcaacctncctgctgctgctttactttgatatcacactttcangagagatatatgttaaatgactga

SEQ ID NO: 1632 - DNA, 860 bp, Homo sapiens
  misc_feature (715)..(715): "n" may be a, t, c, g, other or unknown
  misc_feature (819)..(819): "n" may be a, t, c, g, other or unknown
  misc_feature (833)..(833): "n" may be a, t, c, g, other or unknown
cagtaaatgctccccccatcctctccaggcccaaaccactggaattgtcctttactcctctttctgtcttatattcatgtctgtcagctaatatacctgaccacttctccccaccttcactcctgtccacccttatctccttcacagaccattatggcaggctcctcagtgatctctctgctctcacccctgcccccagagtgttccttacatgcagctggagggatgctgtgagcacctgtatcaggtcatatccctcccctgctcagaacacttccaaggctacatcttgctcggggtaaaacccagagtcctctgcaaggccctgcattgtctgccctcatcacctctctgacatcatctactcttcttactccctgtgctccagccacactggcccgagggcctttgtgcttgctcttttctttgcctaaagaactcatctatcaaatagcccagacttgttccttcctctttaggtctcccctgagatgtcactgccttcctgagatcttccctcaccacccttctaaatttgtgacttatagtcacatctatctttgcttctttaactttatccttagcattaatcatattactgtttaacactctgtagaatttatctgtgtttatggtctgtctcccctgacccttacctctaggagactgttgacttcatcagggaaggggcttttgctacttcctccgttatctncaacacatagaaaagtgcttggcacacagttagggctcagtaactacttatcaaataaactattgaagagcacatatctgggatcccagcatggcaagggactntggcgatccctttntacagaactccaaggagctggcttaaa

SEQ ID NO: 1633 - DNA, 727 bp, Homo sapiens
  misc_feature (592)..(592): "n" may be a, t, c, g, other or unknown
  misc_feature (631)..(631): "n" may be a, t, c, g, other or unknown
  misc_feature (683)..(683): "n" may be a, t, c, g, other or unknown
  misc_feature (698)..(698): "n" may be a, t, c, g, other or unknown
tattgtttaatgtagtagactacatgggaaaataactctactttgaactttttaatttaatataaacatccccttgttgctggacaacaagttttgtttacactgccactaacagaatatcataatatgaaacatgatattcatttgaatatttgaggggtacttcattataagggagtgggattccttttctagctttcttaggcagagtctctcccatctacaacaataaggccatgctcaagtctccagaacaatgatcatactgtattactatttttcactatgtttccagacagactggtaaattcctttttgtttgtttctttttgttaattctaacgttaattgaaaacagtggtttttgttgttgttgtttttgtttttgttttgagacagagtctctctctgtcacccaggctggagtgcagtgacgcgatctcggctcactgcaagctccgcctcccaggttcacgccgttttcctgcctcagcctcccaagtagctgggactacaggcacccgccaccacgcccggctaattttttgtgtctttagtagagatggtgtttcaccgtgttagctaggatggnctcgatctcctgacctggtgatccgtctgcctcggcctnccaaagtgctgggattacaggcatgagccaccatgcctggctgaaaacagtnttttaagagcaatgntctgagctctttttgagctttactcatgg

SEQ ID NO: 1634 - DNA, 755 bp, Homo sapiens
  misc_feature (690)..(690): "n" may be a, t, c, g, other or unknown
  misc_feature (746)..(746): "n" may be a, t, c, g, other or unknown
  misc_feature (750)..(750): "n" may be a, t, c, g, other or unknown
tgaaaatgtaaccagcagatgacgtttcttccatctcccttgcaggcacagggccatgggtgaccacggtggccgccgggaaccagcccaccctgatcgcacactcctatggagtggcccagcctcccaccttcagcccggctgtgaacgtccaggccccggtcattggggtgaccccctcactgcctccccacgtggggccccagctcccgctgatgccaggccactactcgctccctcagccgccctctcagccactgagcagcgtggtggtcaacatgcctgcccaggccctgtatgccagccctcagcccctggccgtgtccacactgcccggtgtggggcaggtggcccgcccaggacccaccgctgtgggcaacggccacatggcagggcccctgctgcctccaccgccgccagcccagccgtccgccactctccccagtggtgcccctgccaccaatgggccccccacaaccgactcggcccacgggctgcagatgctgcggaccattggcgtggggaagtatgagttcaccgacccggggcaccccagaggtaagtcctgctgcacgtgcctccccacgggcctgcgtctgcacctccctgcgcggtcactgcaacaccaccgggacagggggtgcttcatgccagctccttcactggccttcccaacccaaaggcttgcantggaagccttcacctgcccaaagacaactggcctgaaaatggggggaagggaaggngggnaaggt

SEQ ID NO: 1635 - DNA, 800 bp, Homo sapiens
  misc_feature (690)..(690): "n" may be a, t, c, g, other or unknown
  misc_feature (765)..(765): "n" may be a, t, c, g, other or unknown
  misc_feature (789)..(789): "n" may be a, t, c, g, other or unknown
  misc_feature (799)..(799): "n" may be a, t, c, g, other or unknown
tgctttagctattcagcaatattgagaaaaaacatgaacacatttatgactttgccttgaccattgacttttctaaaatgtgcttccttttcctttatttccctttttttatacaaagaaaatagcccaaatttctcctcttaggtcattccttaacctctcagagaaccagtttccccatgaattgggaataatgctctatttacagggctgtttggattaaataagatgctgtttataaagtgtctgtgccagggcaaagcatgtggtaggtgcttggtgacagcatgatccctgtcaccactctgtcaagtccagtgttgctgagatgtcacacctgacaccctctaaggctaccctgattgccaggagtggcccagggcccttctgcagtctccgggtgcctttagttataacctcttgtctgggtcagaccattagctttcatgtctgcttctagctacaactgtagcctcccttccttttgccttcaaatctgccacagctgcccggcaacaaaaaagattcctaagcatctcgaggtcctgtttaaatgggttagggtccaagcaagccctgagacatcaagtggttgggtcttttatacctttttcatctctacagccctgttctcttcctaaggccaggcccacaggggatactgaggaaccaccagccccttcaggcggnacagcagaccctgaagagaactgctctaacttaagtaccttctgacttaccatttttccagcctctgggtgtggntctgatgaaccttaaacttgaaangccaggccana

SEQ ID NO: 1636 - DNA, 845 bp, Homo sapiens
  misc_feature (762)..(762): "n" may be a, t, c, g, other or unknown
  misc_feature (807)..(807): "n" may be a, t, c, g, other or unknown
  misc_feature (845)..(845): "n" may be a, t, c, g, other or unknown
ctgacaatatgactttctgatgtactaagtacattttagtggtcaatgttctctacattaaatggcttttgttttggtaaacccatatgtttggagtattaatggttgtatttctaatttgttaccctggcccaaatgatgaagtaatagaatgttgcatatttccttccacttaacatttaatttgtgttaatgaaaccaaatgtcacttttaactctggaacttctaaaatgaactacaccgggaagccctctgtattctttgtggtttcccatgttccatgagccagcaaccgggtgttcacttgcagtgactctggtttactcagcccctggggatgcattactgctcggaaatgggaagggagagtagcaggtggtgcgtaattgagagctgtgtttgattgggactgacctggtgcccctttcctctgccgggttgaatgagagtttaaaggaggaactgctgctgctaagaacaaaatgaacccgagtgcctcttactgtttgtcccgactgtcagtgcatagggattaactaacatccaggaacttttagctggcctctgctttgttcttcaacattcggaccttcagtgagctctagacctgcacaaacgacctgcagcaaatggcagctttcatttgggctgaggaagaggaatattggagagaatgaggagaaggaaataaatatctttcctttttggcccttcctgctttatctttctccatctttatgcctttattaatgaggattttncaaatatcgggcttcaaaaatgccataagaagacttcatttctgngggtttaatgtcataaaaatctccttatgggaaaaacn

SEQ ID NO: 1637 - DNA, 828 bp, Homo sapiens
  misc_feature (741)..(741): "n" may be a, t, c, g, other or unknown
  misc_feature (751)..(751): "n" may be a, t, c, g, other or unknown
  misc_feature (809)..(809): "n" may be a, t, c, g, other or unknown
agagtgtgacagaaatctaaaagatcaacttcatcgtgcaggaaggagcatagaaaaatagagaaaagaagaaaacagcaaaccattctgagtaccgtggaaacaaactaaaagtgggcttagaaggaaaacagaggaagaaggtctgagtagtcccagggacgccagaggccaagatgggaaagccacccaggcgagacaggggagatggaagccacagggaatcactatcacatacctctgctggacctgaatggtcctggcgccagctagagccatctggtcgaccttagacatgtcaaggcaggagccatctgatcgaccttagacttggcaagctggtggctaagtccagtgctcactgccgacatctgtctcaaaataaacaaaaagtccaacagtgaatatttaacaataacaaaaatataataccaaacaatattaaagaccaataaataagtgggagtgaacaaaggtaaaaggtaactaatatcacaattaaaatattctgctatctctcactctctctcttcccctttccatttgtcacacccaggctggaatgtgacaaaaaaatataaaaggtcaatttcatcatgcaggaatgagtgtagaaaaagggagaaaagaacaaagaagaaaaacaacagcaagtctctctaaaacttcagttagtttcactgtagaaaaaaaaattgaaagtggggttaggaaaaaaaggaaggaggaggataagttcangtagcctganggactagggaagcccagatgggaagaccacctgggtgacctgggaagatcgaggaccncagtgaatcatgatcacat

SEQ ID NO: 1638 - DNA, 849 bp, Homo sapiens
  misc_feature (433)..(433): "n" may be a, t, c, g, other or unknown
  misc_feature (731)..(731): "n" may be a, t, c, g, other or unknown
  misc_feature (824)..(824): "n" may be a, t, c, g, other or unknown
tttaccattttttctttatgtcatccctcatagagacaatttttggagtagatttcatttaaaagaatacattgggctgggtgccgatagctcacgcctataagcactttgggatgctgaggcaggaggattgcctgggcccaggagtttgagaccaatctgggcaacatagggacaccctgtctctaccaaaaaaaaaaaaaaaaatttaaattagccaagcatggtggcacacacctgtcctagatactcaggaggctaaggtgggaggatcacttaagcccaggaggttgaggcagctgcgagccatgattgcactgctgcacaccagccttggggacagagcgagctctgtccaaaaaaaaaaaaaaaaaaaaaaaaaagaggctatgaggctacatacttccaacagtgcaaagcaaggggctttganatgtttcttgacatggtcccagtaaagtgttggacctaaaattcaaaccaaattagatttctttataactggtgagaagtcttaataaaatagttttccttaataaaatttaactatttcagtatgtctgcttactgaagtttggaaatgaaaatttcccatttgttttctctggcacatgagtttatcagcctgctttgcaagtgctttaaggcaaataaatgttaatttgattgctttttgttgatttgatagcttggatgcttgggccacctgttagtaattttcttttacttgnaacacttgcctgctgctgaatactaggcagtgagtcttattgagttgatgatccagggggttttatttgggaaattcctctggtggacatggntcaggttaagacaagaattgtttta

SEQ ID NO: 1639 - DNA, 770 bp, Homo sapiens
  misc_feature (731)..(731): "n" may be a, t, c, g, other or unknown
  misc_feature (743)..(743): "n" may be a, t, c, g, other or unknown
  misc_feature (750)..(750): "n" may be a, t, c, g, other or unknown
tgtaagaacagccaaggacagagagtcatggttgagcagagtgaaaaactgaatggtgtccttgaagcgagccgcctctgggataacatgcggaagctgggggagtgcacagaagaggcgcaccagatgactcatgacggctacttgaaactctggcagctgagcaagccttcgctggcctcttttgacgccatctttgtggatgaggcccaggactgcacaccagctatcatgaacatagttctgtctcagccatgtgggaaaatctttgtaggggacccgcaccagcagatctataccttccggggtgcggtcaacgccctgttcacagtgccccacacccacgtcttctatctcacgcagagttttcggtttggtgtggaaatagcttatgtgggagctactatcttggatgtttgcaagagagtcaggaaaaagactttggttggaggaaaccatcagagtggcattagaggtgacgcaaaggggcaagtggccttgttgtcccggaccaacgccaacgtgtttgatgaggccgtacgggtgacggaaggggaattcccttcaaggatacatttgattggggggattaaatcatttggattggacagaatcattgatatttggatccttcttcagccagaggaagaacggaggaaacaaaacctcgtcattaaagacaaatttatcagaagatgggtgcacaaagaaggctttagtggcttcaagangtatgtgaccgntgccgangacaaggagcttgaagccaa

SEQ ID NO: 1640 - DNA, 704 bp, Homo sapiens
  misc_feature (668)..(668): "n" may be a, t, c, g, other or unknown
  misc_feature (684)..(684): "n" may be a, t, c, g, other or unknown
  misc_feature (687)..(687): "n" may be a, t, c, g, other or unknown
atagtggaggaagcagtgcaggagctgaactctttcctcgcacaggagaatatgaggctacaggaattgacagatcttcttcaggaaaagcatcgcaccatgtctcaggagttctccaagttgcagagtaaagtggagacagccgaatcacgagtgtctgtcctggagtccatgattgatgacctgcagtgggatattgacaaaattcgaaagagggaacagcgactcaaccgacacttagcagaagtcctagaacgggtgaattccaaaggttataaggtgtatggagcggggagcagtctgtatggcggcacaatcactatcaatgctcggaagtttgaggaaatgaatgcagagcttgaggagaacaaagagttggctcagaaccgtctctgtgagctggagaaacttcggcaagactttgaggaggtcactacacaaaatgaaaagctgaaggtggaattgcggagtgcagtggagcaagtcgttaaggaaactccagaatatcgctgcatgcagtcacagttctccgtcttgtataatgagagcctacagttgaaagcacacttggatgaggctcggaccctgcttcatggcaccagaggaacccaccagcaccaggttgagcttattgagcgagatgaggttagtcttcataagaagctgangactgaagtaattcanctngaagatacattggccca

SEQ ID NO: 1641 - DNA, 828 bp, Homo sapiens
  misc_feature (753)..(753): "n" may be a, t, c, g, other or unknown
  misc_feature (820)..(820): "n" may be a, t, c, g, other or unknown
  misc_feature (824)..(824): "n" may be a, t, c, g, other or unknown
ttttttagatttatcaactaatgagaatgatcgatttaatgaaatttgttatttctacatcagttattttttctccacactttttatatagatacttatcatcagcatttgtctacctatgaacttcatcaagtaaatttagcttcataaacatcataaaaagatcaatgaatactaccacatattcttttaactaaatgggatggtctaggatcttgtaacatattgcacaatgaagtttcctgttgaatgactgtctggctaaaagtacttcttgtccttaaaaatcatattgtacattcattccttcttaagtttcagaaaatttatctaggatatcatcatctgaagattcataacctgagatttcactactacctgcctctttacattcaccatctaataactgtgaaatatctttctttgtcagttttcttctctttgccattatgggtagaaaatgaaatattctgaattttcaaccgtgtttactgaaaccctcaaaaatacaaagataggatttccagccttcttttcaaaagatgagacaataccaccaaccaaaaaaagcctgggacctgatggattcacagccagattctaccagatgtacaaacaagagctggcaccattcctacagaaactattccaaaaaactgaagagaaaggactcctccacaacttattctatgaggccagcatcatcttgataccaaaacctggcagagacacaccggagaaagaaaacttcangccagtatccttgatgaacattggtgtccaaatcctcaacagaatcttgcaaactgaatccacagcncatnaaaa

SEQ ID NO: 1642 - DNA, 804 bp, Homo sapiens
  misc_feature (742)..(742): "n" may be a, t, c, g, other or unknown
  misc_feature (761)..(761): "n" may be a, t, c, g, other or unknown
  misc_feature (786)..(786): "n" may be a, t, c, g, other or unknown
gacatgctcagcaacatgccaggcacagctgcaggctccagtgggcgcggcatctccatcagccccagtgctggtcagatgcagatgcagcaccgtaccaacctgatggccaccctcagctatgggcaccgtcccttgtccaagcagctgagtgctgacagtgcagaggctcacagcttgaacgtgaatcggttctcccctgctaactacgaccaggcgcatttacacccccatctgttttcggaccagtcccggggttcccccagcagctacagcccttcaacaggagtggggttctctccaacccaagccctgaaagtccctccacttgaccaattccccaccttccctcccagtgcacatcagcagccgccacactataccacgtcggcactacagcaggccctgctgtctcccacgccgccagactatacaagacaccagcaggtaccccacatccttcaaggactgctttctccccggcattcgctcaccggccactcggacatccggctgcccccaacagagtttgcacagctcattaaaaggcagcagcaacaacggcagcagcagcagcaacagcagcaacagcaagaataccaggaactgttcaggcacatgaaccaaggggatgcggggagtctggctccagccttgggggacagagcatgacagagcgccaggctttatcttatcaaaatgctgactcttatcaccatcacaccaagcccccagcatctgnttacaaatcagggcacaangaatgtgtcttaaaaggctttcttnacccaaccccggccccaa

SEQ ID NO: 1643 - DNA, 553 bp, Homo sapiens
  misc_feature (508)..(508): "n" may be a, t, c, g, other or unknown
  misc_feature (550)..(550): "n" may be a, t, c, g, other or unknown
  misc_feature (552)..(552): "n" may be a, t, c, g, other or unknown
aaattttttatttcattttatttttgagaccgagtcctgctctgttgcccaggccggagtacagtagtgctatcttggctcactgcaacctccacctcctgggttcaagcgattctcttgcctcagtctcctgagtagctgggattacaggcacataccaccatgcccgcctcatttttttgtatttttagtagagacagggtttcaccatgttggccaggcttgtccggaactcctgacctcaggtgatccacctgcctcggcctcccaaagcgctgggattacagttagagtctccatgcccggctgattttaaattttaaaattaagccttgtatagcctgggcaacatggtgagacccttccacaaaaatgaataaataaataaaattaaccaggtgtggtgatgtgtgcctgtagttccagcgactggggaggctgaggtgggaggatcccttgagcccaggaggtcaaggctgcagtaagctgtgatcatgccactgtcctncagtctgggtgacaaagcaagaccctatctcttaaaaaaaanana

SEQ ID NO: 1644 - DNA, 844 bp, Homo sapiens
  misc_feature (657)..(657): "n" may be a, t, c, g, other or unknown
  misc_feature (786)..(786): "n" may be a, t, c, g, other or unknown
  misc_feature (791)..(791): "n" may be a, t, c, g, other or unknown
  misc_feature (804)..(804): "n" may be a, t, c, g, other or unknown
taacctgccctgccatgggttcaatttacgtagtacactggacaatgtagcttgaatcctaaattcaaatgtgttaaatattcttagtattccgtctgtatactaacaaagaaaaaaatgttaactgactgtgccacgctctccttccagagcagtgtttcttaatttcagcactactgacattttgggccagataagtctttgctgtgggggcttgtcccacgcactgcaggatgtttggcagcacccctggcctccaccctctagatgctgggagcactctccacctccacccccattgtaacaactaaaaatgttgccagacgttacccagtgtacgctggagggaaaaatcactccagggtgagggccactgatctagaatatgatacatggcatctgtgatatgagaaaatgaccttgggcctggtcataaaagaatgtgccacctcctcacctgaaacacaaccaagcagtggcccgtgactgacttggcaaaataacactttgttcagaggaagctcataaaacagttttggccgggaggatgagctaacctcataataggtacttgagagaagccaccccgctaatgcatgctgtgtaccatgattaggattgacttaactagggtgaagaaatcatataatttgctgngtctacagatatgtaagtaatccaaatgtgtgtttcttttttaagtatcaaaggataattctagaataaaattcatagcacagtcatattaaaaaacgtccacattttcaaaagctaactacatttttnctctnctctaaaaatggngacccaacactgggtctaacctgaaaatttgcatactcaa

SEQ ID NO: 1645 - DNA, 752 bp, Homo sapiens
  misc_feature (720)..(720): "n" may be a, t, c, g, other or unknown
  misc_feature (728)..(728): "n" may be a, t, c, g, other or unknown
  misc_feature (749)..(749): "n" may be a, t, c, g, other or unknown
gatgaggatggaggccggggaggcagcgccgccggcgggggcgggcggccgcgccgcaggcggctggggcaagtgggtgcggctcaacgtggggggcacggtgttcctgaccacccggcagacgctgtgccgcgagcagaagtccttcctcagccgcctgtgccagggggaagagctgcagtcggaccgggatgagaccggggcctacctcattgaccgtgaccccacctacttcgggcccatcctgaacttcctccggcatggcaagctggtgctggacaaggacatggctgaggagggggtcctggaggaagccgagttctacaacatcggcccgctgatccgcatcatcaaagaccggatggaagagaaggactacacggtcacccaggtcccacccaagcatgtgtaccgcgtgctgcagtgccaggaggaggagctcacgcaaatggtctccaccatgtctgatggctggcgcttcgagcagctggtgaacatcggctcctcctacaactacggcagcgaggaccaggcagagttcctgtgtgtggtgtccaaggagctccacagcaccccaaacgggctgagctcagagtccagccgcaaaaccaagagcacggaggagcagctggaggagcagcagcagcaggaggaggaggtggaggaaggtgaggtggaacaggtgcaggtggaggcagatcacaggagaaaggtcccgtncgaccctntcaacctgagctgacttgcantga

SEQ ID NO: 1646 - DNA, 445 bp, Homo sapiens
  misc_feature (423)..(423): "n" may be a, t, c, g, other or unknown
  misc_feature (425)..(425): "n" may be a, t, c, g, other or unknown
  misc_feature (440)..(440): "n" may be a, t, c, g, other or unknown
aatttagaatgtcttacactgtacctattttttcctgtgtaagtctcaaaaacttgatttagacttgaaggttttatgaatgtccctacttttttgttttaagagggaggaagagggaaggagagggaggccatttgattgagaagggcataaatcgcagtggatgagttaccacaaagtcagtccatatgggttacaacagttcaatcaagaactaggccaggcacggtggctcacgcctgtaattccagcactttgggaggctgaggcgggtgtatcacctgaggtcaagagttggagaccagcctgaacaacatggtgaaaccccctttctacaaaattagctgcgcgtggtgctgcgtgcatgtagtctcagctacttggggggctgaggcaggagaatcgcttgagcctgggaggcanangttgcaatgagccangatcg

SEQ ID NO: 1647 - DNA, 858 bp, Homo sapiens
  misc_feature (770)..(770): "n" may be a, t, c, g, other or unknown
  misc_feature (830)..(830): "n" may be a, t, c, g, other or unknown
  misc_feature (837)..(837): "n" may be a, t, c, g, other or unknown
tcttgcattctgcctagcatcttacattagctcttacatgtctgtctgttgacttactgttgactgaaccagcagggcattggagagaagtaagagctagatgtagtggtggattctgtggtccaaattcatagatcacaaacttcatatgtaccagagtatgtctaggtactgggagatgttctcaattctgaccctctgagagggcaaaggatgtagcatctcttctctgagttggttgtcagaatgcccatggtaccatttcaccactctgtccccaggagcagtcattggaaggttgacgtaaatagggttgtatgggaagacacagcccaaggttagatgttggtgaccttgtctagaagacagagagttcccctttcctgaaaaaaggaagtaaatgattaaccacttctcattaaacactcaaatacaacatttcaatactcatggttttgagatttcaaaaccagacagtgctttgctacttacacatgtcttatgacaccaagccaagctcctggatggttgctggctctgttaaatgactaattatgcaaggagatgtcatttctaggtacgttaaagtgaagagttacccttactcaattttcagttggaataaaaacaactgtaacatattctggggtttctttttttttttctcactcgttttagtttgatatcaaatcaaataatgatcatatccattgcatcagtggatatgccctcaagataatatggatttagaaccagaactttcataatgnatttctattgaaatgttagttcataagccatgattgggttttcatgcccatgtgtgaaangtgcctncttaaaccttgtatgatttgc

SEQ ID NO: 1648 - DNA, 799 bp, Homo sapiens
  misc_feature (614)..(614): "n" may be a, t, c, g, other or unknown
  misc_feature (638)..(638): "n" may be a, t, c, g, other or unknown
  misc_feature (657)..(657): "n" may be a, t, c, g, other or unknown
  misc_feature (721)..(721): "n" may be a, t, c, g, other or unknown
  misc_feature (750)..(750): "n" may be a, t, c, g, other or unknown
  misc_feature (757)..(757): "n" may be a, t, c, g, other or unknown
gtccgtggccagagctgcagagagacaaggcggcggcggctgctgtgctgggtgcagtgaggaagaggccctcggtggtgcccatggctggccaggatcctgcgctgagcacgagtcacccgttctacgacgtggccagacatggcattctgcaggtggcaggggatgaccgctttggaagacgtgttgtcacgttcagctgctgccggatgccaccctcccacgagctggaccaccagcggctgctggagtatttgaagtacacactggaccaatacgttgagaacgattataccatcgtctatttccactacgggctgaacagccggaacaagccttccctgggctggctccagagcgcatacaaggagttcgataggaagtacaagaagaacttgaaggccctctacgtggtgcaccccaccagcttcatcaaggtcctgtggaacatcttgaagcccctcatcagtcacaagtttgggaagaaagtcatctatttcaactacctgagtgagctccacgaacaccttaaatacgaccagctggtcatccctcccgaagttttgcggtacgatgagaagctccagagcctgcacgagggccggacgccgctnccaccaagacaccaccggcgcggnccccgctgccacacagcantttggcgtcagtctgcaatacctcaaagacaaaaatcaaggcgaacttatccccctgtgctganggtcacagtgacgtacctgagaaagaaangccttgngcaccgagggcctgtttccgagatcccccacgtgcaaaccgt

SEQ ID NO: 1649 - DNA, 841 bp, Homo sapiens
  misc_feature (811)..(811): "n" may be a, t, c, g, other or unknown
  misc_feature (824)..(824): "n" may be a, t, c, g, other or unknown
  misc_feature (836)..(836): "n" may be a, t, c, g, other or unknown
taaaaacaactcttaaggataaaacaaatttcagattaattatgaaaacaagaatgtggcagggcatggtggcctacacaagcaatcctaacactttaggaggccaaggtagaaggattgcttcagcccaggagttcaagaccagcctgggcaacacagtgagatcttgtctctacaaaaacaattttaaaaattagcctacatggcacaaacatcattttgtttgtacactacctatctgagagaaatgacttgaaaatgtgatattatcagctggatcagtcatctgatatgagctataaacgtgcagcacaaatgtcactcagagactgaaaaatgagtaaaaatcaataatttcttagggaaaaaagactgcctagaatcttattaaaaaacattctgggggtctatcagttagaaatattttggttacactgacagataaccaaattcaaatgggcttagagcaaaaaatgggagggcatagaggacacttacttgttcacataactggaaagctccaaggtcagttggtttcaggtaaggcttgatccagcagttcagcagtattactaaggacttgcctttacccatattcttccccatgcctgaatgtccaggtaagagtcattggtcattgtaaagatttgtccagcttccattcttcattcctaatctgagtttgttttccttttagagaataactccctagtgtgttaatcttagtaagaaggtaattattccaggcaccagtttcatctctactggaaagggaaagaaacagattcaccttttccctttggcctttccnttcccttcccatnccctaagtttantgagc

SEQ ID NO: 1650 - DNA, 745 bp, Homo sapiens
  misc_feature (696)..(696): "n" may be a, t, c, g, other or unknown
  misc_feature (702)..(702): "n" may be a, t, c, g, other or unknown
  misc_feature (708)..(708): "n" may be a, t, c, g, other or unknown
tgtttgcctttgaagatccttcaaacccaatgtctcaattcacctggactgttttaccccaagggttcagggacagcccccatctatttggccaggcattagcccaagacttgagccagttctcacacctggacactcttgtccttcagtacatggatgatttacttttagctgccctttcagaaaccttgtgccatcaagccacccaagcgctcttaaatttccttgccacctgtggctaccaggtttccaaaccaaacgctcagctctgctcacagcaggctaaatacttagggctaaaattatcctaaggcaccagggccctcagtgaggaatgtacccagcccacactggcttatcctcatcccaaaccctaaagcaactaagaggattccttagcataacaggcttctgccaaatatggattcccaggtatggtgaaatagccaggccattatatacactaattaaggaaactcagaaagcaatacccatttagtaaggtggaaacctgaagcggaagcagctttccaggccctaaagaaggccctaacccaagccccagtgttaagcttgccaacggggcaagacttcgtatatatcacagaaaaaacagggatagctctaggagtccttacacatgtctgagagacgagcttgcacctgtggcatacctgagtaagaaaactgatgtantgggcnaaaggntggcctcattggttatgggtaatggcagcaatagcag

SEQ ID NO: 1651 - DNA, 766 bp, Homo sapiens
  misc_feature (692)..(692): "n" may be a, t, c, g, other or unknown
  misc_feature (723)..(723): "n" may be a, t, c, g, other or unknown
  misc_feature (743)..(743): "n" may be a, t, c, g, other or unknown
gatttggccagcaagctgaagtttgccagcccccgagctatagtgatagtatccacctttgttgagtctctctgtagcacctgtccctgggctaaggcgaggtgactttcctgaggctttgtggcaggctgatgaatcctttccacccctccacataattgtgtctcttgcaggattccaggaaggctatccttacccctatccccataccctgtacttactggacaaagccaatttacgaccacaccgccttcaaccagatcagctgcgggccaagatgatcctgtttgcttttggcagtgccctggctcaggcccggctcctctatggggtatgtaggtggagaagaccactgagttgctttacgtggtgttggtctcctcccttaaggttactgctcagaggaagaaaagggatataggggaactgatttcttgactgaggagttttagggaggagtacttcagcccaccctgtggagatgagccaacatcactagggggtgactgcctgtgcttcacctaagtagctcacttgatcacagtagcccacatgtttttactgaagtccccactttctaagctatgccatagaattacagggaggccatgcagcttatcagcattacacagcactaagtggtggagataggactgcagctaggtctgccccactctgaagtcttcagttgnttgtgctgcagcatgctgcctctggtcttgngtggcagaagtggagcacangcaggaggaagtggagcaataga

SEQ ID NO: 1652 - DNA, 762 bp, Homo sapiens
  misc_feature (674)..(674): "n" may be a, t, c, g, other or unknown
  misc_feature (702)..(702): "n" may be a, t, c, g, other or unknown
  misc_feature (755)..(755): "n" may be a, t, c, g, other or unknown
agcccggtaagccctcctcctcttcccctgcagcctcagggctggagccacagctgggagggctcccagatcctgaccatatcctcccagaggctgagccaggcctgggcactgtcccctcaaatgtgagaatactgggcagggggaggggagaaaggagggaatggagggctgagcctggaggcatgaaaggggcaacctaggcagcggtatgggggagtgctcagagcttggagtcctgtggaaggcagagaactgccccagcccctgcctctcatcccccaccctctgtgtccctggccgagaggttcctggaggacatttttccagcaaaagagggagggtggtgtctgggcctagatccttggatgggcttttctctgcctgcttgtggggtgcctagggcgagtgggcttttggagacaatttctggcctaacctgacttggacagcagcccccagaggcacagctctcccctcaggcatgggggcatgattccacctcgctagcccacatgtgttcttcacggagggctgctggcccgtctccctggggttaccctgagcagcagagctgtgtttgttgagactccatggggtggagggattgcgatgttgtcctctcagttcccggggctgatgtggaagctcaaggcttgccctggattcttcanggtagccctgccatccctagtgagtcantgagttgggaagtttgggggcttggaaaaatcaggtagggaaggacacagctnggacctt

SEQ ID NO: 1653 - DNA, 863 bp, Homo sapiens
  misc_feature (658)..(658): "n" may be a, t, c, g, other or unknown
  misc_feature (834)..(834): "n" may be a, t, c, g, other or unknown
  misc_feature (846)..(846): "n" may be a, t, c, g, other or unknown
  misc_feature (854)..(854): "n" may be a, t, c, g, other or unknown
taaaatcttaaaaattcttaaaaagctctcttgaatttgacctctactaccttccaaggaccttggaaagacttaagtatgtgttagaactctcctgaaggcttggtcttcctttagtgacattaacactcaggtttgttattccagtgggcagccccagttcatgcaaactgacctgttgtgtctggtgtccttagactttgatatgcaggccaaagtccaagggatatgcaaacataacacacacctgtacttccataaaaaccagcagaattgtagatcagctcattttactgaaattttaaaccctgtaaaaaaaaaaatactatgcttgaagaaagaaatcctggtgcatataaaaactacaatgagtaacagtaatacaggtaagaatcaagcaggccttgagcaaaacagtccattattactgtgtaaactatgttgctatgatacttattttgagcctttatgcaccagcacatacatagtaagacacacaagatagttcaacaaaatctaagtaatatacaaacactgtaagagcttttccaaccaaagaaactttaatgtagatctgaaatgagccatcatgatacagaaaaagatgattatcatttcgtgtcctttccaagtagaactatctgataaccttttctgnttgtatcagaagagatttcaactcaacatgaaaattctactacttggaattatttgaaaaatcaagtatttgaaggaaaaaattatttttcatctaaagaagcattacatttccttttgctagaaacgattgacaatgatggaatttttcctgacatataattaaatatggacctnttcaagtggatngcaactgnatcccaacc

SEQ ID NO: 1654 - DNA, 918 bp, Homo sapiens
  misc_feature (774)..(774): "n" may be a, t, c, g, other or unknown
  misc_feature (825)..(825): "n" may be a, t, c, g, other or unknown
  misc_feature (834)..(834): "n" may be a, t, c, g, other or unknown
  misc_feature (909)..(909): "n" may be a, t, c, g, other or unknown
ccagcctagactctatgattgacagggtgaccagctgtcccagtttgccctggggcacaggattattcgtgctgaaaatgagaaagtcctgggcaacctgggatgaattggccaccttcactattgatccaacttcccaaatgctttgtctacattgctggtatctggctcggaggaagccctgtgggaaaggctgtgagtgtgttgccccaggttccacaggacacttagagtttgggggacacctgccgtcaacgcactgcaacaatctttagggatgttaattgttcctcaggaggcatacgtaggaatcacatccaccttaaacatgcccacttatggcatttgggctcacacagccaaacagctgccattgtctgaagtaacgcatgggctgttgggctcctacggtgtgacagacatacttctctgcatcatccatgtaccagcctgttttcttctcactgcagcccaatcagctaattatcatcatttccatctttcaaaaacaaatgcttaaagatgccattatttaccccagggtcacagatggtaaaagtgacagaaccacaggccaaacacttgttgttttaccatgtgactccaaggagcatgaaatctgaggctcttcatccatgagattttccagccactcacgtcccttcctctgttggagatgaagcctcttcagagtggaaggcagtgtacctagcttggatcaggatgcctggactttgcttcctgcttcttccagataccgggtctatgacttgnatcaaggtcatcttttaaccccttctgagccttacttttccgcattcttgngaaatgggncatcattaatggcttggcctttaccttcttgccttaagcttggctttgaggaggaaaattggaaatgatggcctnttgaaactt

SEQ ID NO: 1655 - DNA, 704 bp, Homo sapiens
  misc_feature (682)..(683): "n" may be a, t, c, g, other or unknown
  misc_feature (686)..(686): "n" may be a, t, c, g, other or unknown
gcaaagctaatagctttaaacaaaaacaaaagcaatacaaagaaaccagatcaaaacatataccacaagaagaattatacaagaaaataatatctattttccatactagcaaataaatagaagacattgtggcctccttaaaataaaaggtcaaggccaggtacggtgtggctcacacctgtaatctcagcagtttgggaggctgcggcgggtggatcagctgaggtcgggagtttgagaccagcctggccagcatggtgaaaccccctctctactaaaaatacaaaaattagccgggcatggtggtgggcgcctgtaatcccagccactcggtagactgaggcaggagaatcacttgaagctgggaggtggaggttgcagtgagccgagattgtaccactgcactccagctagggcaacagagcaagactctgtctcaaaaaataaaataaataaaataaaataaaataaaatgaaagttcaaaaactagataacaggattgaataagtgataagacaaataaggagaaataaaattgtctgtgagagaacaagaaggaagtagaagaagaaaataaaactctaatgggaccaaaaaccatataggaagcaaaaagctgggagaggaaggagaagaacttctactgatattaccacaattgtgaattagaaaaatcaagcnnatnaaaatttaaaaaaaccag

SEQ ID NO: 1656 - DNA, 712 bp, Homo sapiens
  misc_feature (551)..(551): "n" may be a, t, c, g, other or unknown
  misc_feature (642)..(642): "n" may be a, t, c, g, other or unknown
  misc_feature (655)..(655): "n" may be a, t, c, g, other or unknown
  misc_feature (670)..(670): "n" may be a, t, c, g, other or unknown
agaagcaaaagagcagagctaccatgtcctcttggagcagacagcgaccaaaaagcccagggggcattcaaccccatgtttctagaactctgttcctgctgctgctgttggcagcctcagcctggggggtcaccctgagccccaaagactgccaggtgttccgctcagaccatggcagctccatctcctgtcaaccacctgccgaaatccccggctacctgccagccgacaccgtgcacctggccgtggaattcttcaacctgacccacctgccagccaacctcctccagggcgcctctaagctccaagaattgcacctctccagcaatgggctggaaagcctctcgcccgaattcctgcggccagtgccgcagctgagggtgctggatctaacccgaaacgccctgaccgggctgccctcgggcctcttccaggcctcagccaccctggacaccctggtattgaaagaaaaccagctggaggtcctggaggtctcgtggctacacggcctgaaagctctggggcatctggacctgtctgggaaccgcctncggaaactgccccccgggctgctggccaacttcaccctcctgcgcacccttgaccttggggagaaccagttggagaccttgcacctgactnctgaggggtccgntgcaattagaacggntcatctagaaggcaacaaattgcaagtactgggaaaagatct

SEQ ID NO: 1657 - DNA, 605 bp, Homo sapiens
  misc_feature (568)..(568): "n" may be a, t, c, g, other or unknown
  misc_feature (583)..(583): "n" may be a, t, c, g, other or unknown
  misc_feature (588)..(588): "n" may be a, t, c, g, other or unknown
tctgtttatatttcggtagccccatggggcgggtggccacagtttcagtgcagatgtaaatccggaagcctccagcacctgcagctcatagacagctctcgcccaccttctcccaggaccaagccagtcctgtccagtccagtgtctgagcagagtcagaatccacaccacccgccgcctgggctcagaaagttctgctttaagtcattatttctccactgtacgatggggaatgcggtgtgtgggggccatttacccaccaacacagcagctgtgaggcacacacggctattgaaaattcatggaaattgctgggtgtggtggctcatgcctgtaatcccagcactttgggaggccgaggcaggaggattgcttgagtgcaggagttccagaccagcctgggcaacatagcgaaaccacatctctacaaaaaaatcctccaaaattaaaaaaattagcccgagcatgttgttgcatgcctgtggttccagctactcaagtgatccttctgccttgggtttccgagtagctgcaattacaggtgcacaccaccacacctggctaattnttatattttttgtanagacngggctgggattacaggc

SEQ ID NO: 1658 - DNA, 626 bp, Homo sapiens
  misc_feature (611)..(611): "n" may be a, t, c, g, other or unknown
  misc_feature (615)..(615): "n" may be a, t, c, g, other or unknown
  misc_feature (621)..(621): "n" may be a, t, c, g, other or unknown
gggtgcattttgtaacagtcctgttcattatgactgttactccttcattgctatctaaagagcgtgtaggtaggtaaggtcatatggattgggcagaagtggcagtaggagtgggcagtaaggatagaaggaacgtatctcagtgagtgtgcaagttaagtacttggcataatgtaatagtgcctttcatatcctaaggtcaaactgtgggtatctttaaactgtctagaccacacgtgcatacaaatcctcccctggggatctcctgaaatgcacattctgatttgggagctcagggagggggtctgagagactgcatttctaaccagctctcagggtcacttggagtagcaagcacctccaaaactgctggaacctggaacaactgcagggagacctgatctgcccattagaccacatctccctgagggtctgggatgcatgtgtctttgtgcctcctgtaccaagagcagtgcctgctaggaagtggatgctcaaaatgatcttttcaactgaactgaagaggctgctgtcccagagtccgtttacgttagtggccttgggaccgcaggggtgtggcgacccagtcatagcctgtacacttattcggnccancttggntatcg

SEQ ID NO: 1659 - DNA, 807 bp, Homo sapiens
  misc_feature (728)..(728): "n" may be a, t, c, g, other or unknown
  misc_feature (784)..(784): "n" may be a, t, c, g, other or unknown
  misc_feature (793)..(793): "n" may be a, t, c, g, other or unknown
agaagggcgcggagcaccggagggcacgcagctgacggagctgcgctgcgttcgcctcgtttgcctcgcgccctccactggagctgttcgcgcctcccggctcccaccgcagcccacccggcagaggagtcgctaccagcgcccagtgcgctctgtcagtccgcaaactccttgccgcccgccccgggctgggcaccaaataccaggctaccatggtctacaagactctcttcgctctttgcatcttaactgcaggatggagggtacagagtctgcctacatcagctcctttgtctgtttctcttccgacaaacattgtaccaccgaccaccatctggactagctctccacaaaacactgatgcagacactgcctccccatccaacggcactcacaacaactcggtgctcccagttacagcatcagccccaacatctctgcttcctaagaacattcccatagagtccagagaagaggagatcaccagcccaggttcgaattgggaaggcacaaacacagacccctcaccttctgggttctcgtcaacaagcggtggagtccacttaacaaccacgttggaggaacacagctcgggcactcctgaagcaggcgtggcagctacactgtcgcagtccgctgctgagccttccacactcatcttccctcaagcttcagcctcataccctcatcctatcaaccttaccacctgaggtcttttctggcttcgntactaccaaccatagcttcactgtgacagacccaacccactgggagcttcaactgnaccagagtncccgacagaggagt

SEQ ID NO: 1660 - DNA, 775 bp, Homo sapiens
  misc_feature (749)..(749): "n" may be a, t, c, g, other or unknown
  misc_feature (751)..(751): "n" may be a, t, c, g, other or unknown
  misc_feature (753)..(753): "n" may be a, t, c, g, other or unknown
atgaatgaatgaatgatagtctcgagctgtttaacttcatctctcttatggtttgcatataagattgtgcagtggggctgggcgcggtggctcacgcctgtaatcacaacactttggaaggccaaggcaggtggatcacctgaggtcaggagttcgagaccagcctggctaacatggtgaatggtgaaaccccatctactaaaaatacaaaaattagccaggcgtggtggtgtgtgcctgtagtcccagctactcgggaggctgaggcaggagaatcacttgaacccagaaggcagaggttgcagtgagctgaggcaggctgcaccattgcactccagcctggacaaaaagagcgaaactccatctcaaaaaaacaaacaaaaaaaagattgtgcagtgtagttgtaagattggggagaccaaactgttaaagcgattattgactggggaactggagatggttgacatactttgtcctcaccaagcccctttcagttccttattcacaatgagccactagtgggtgtacttggttctagtgggtatatgtggttttattcaactatgttagggtggataaaggtttacattattgccgattgtattcatatgaccatttactattccgagtcactacatgcagctaagcttacagttgctgagtataaagcactgccttgaagccctatagatggcgttagttctgacttctttttaccatgtaagatgcatcacgtgtgcttgtgctnanangaactaaagggaccagccattt

SEQ ID NO: 1661 - DNA, 755 bp, Homo sapiens
  misc_feature (719)..(719): "n" may be a, t, c, g, other or unknown
  misc_feature (731)..(731): "n" may be a, t, c, g, other or unknown
  misc_feature (751)..(751): "n" may be a, t, c, g, other or unknown
caatgttagtatgtatgtaaacatgatagtacagccatttttttcatatgtgagtaaaaataaaatagtatttttaaaaatatagtttgagcactgtataggtcctttttttgttcagactttttccaaaaatctaaacataattaatatactctttcagccacatgaataaataatgagtgtttcttgtaggtattggtttggagattgttttacggtagtatgaactgttaactggaaaagaaacctgagattgcagtcagccaagattgtgccactgcaccccagcctgggcaacagagactccgtctcaaaaacaaaaaagaaaagaaaccaagaaacctcaggcatgaacctaatttaatctccatgaaagaggtactacagttctagaatataccctttatgttcaggaatgcagtctatcattcagagttaatttctttctaggctctttgacaatcagtttttccctggatcagttcagtacatatgcattgagcacctgtgtgccagtcagccgagctatcacattgcacaattctaagaagcaccattcatgtctcatcatatttctatgctctgggagttgcctttcacatagaatatgtgtgattgttatccctagaattgtgcagtgaggcaattggctaggtgctgtgctgctttttctttctttcttttttttttaagagacggagtcttgctgtgttgcccantctggaatgcantggtggcatgatcttgcctnactg

SEQ ID NO: 1662 - DNA, 802 bp, Homo sapiens
  misc_feature (722)..(722): "n" may be a, t, c, g, other or unknown
  misc_feature (727)..(727): "n" may be a, t, c, g, other or unknown
  misc_feature (777)..(777): "n" may be a, t, c, g, other or unknown
gtaatgatttttttctattttcttttttctatttctataatgacttttttctatttcttttttctatttacttaaaaaaataagatgctatgtttcgtttttattgaagtaaaattcttaaagaatgaaaaaattatattagaaattgtacgattaggccgcgcacagtggctcacatctgtagtcccagcactctaggaggccaaggcaggaggatcacttgtcaggagtttgagaccagcctggccggcatggtgaaaccccatctctactaaaaatacaaaattagtgggtgtggtggcacatacttgtgattccagctacctgggaggctgaggcaggagaatcacctgagcccaggaggcggaggttgcggtgagctgaaatcacaccattgcacttcagcctggatggcagagcaagaccctgtctcaaaaagaaaaagaaaatgaaattgtatgattatctttaggtttttgggtacaaatgtagatcctcaaaaactttatcagaaatttggaaatctgtaaataagttatatgtatctccttttaaaatccaatattagtaagctatatgtataaaaacaaagctagtgtatcttgaaaagtttttatttctttattccttatccctccttatcccactgaactattgaagaacttcttatagatttaccttcccattagtgctgtagtacagttttcttttatctccattgncttgngtttcctggctaaattttacttggtataaaactattgggtcacttttggnctagaatagaactttcatagtataa

SEQ ID NO: 1663 - DNA, 740 bp, Homo sapiens
  misc_feature (607)..(607): "n" may be a, t, c, g, other or unknown
  misc_feature (699)..(699): "n" may be a, t, c, g, other or unknown
  misc_feature (703)..(703): "n" may be a, t, c, g, other or unknown
  misc_feature (738)..(738): "n" may be a, t, c, g, other or unknown
cttagctgcctctcagcagcagaaagatatctcaaactgatgtttcagtaaaatatgtgcgcattaaaaactgatttttttattgaaaatgacgacaacagcagagtttaaggatacaaatccttgccatgagccaccacagaaaggcatatactcaacctttatttatacgtacaaaaaacttctgccacagacttctatacataacctttatgatgtgtaatgtatatgaaatagtaattaaaccacccatctttgctgccttttatacttttctagtgttctccaaaaagcaatacaaattatacatttttgttcttgcatagtatatcattctatcattttgagatttaacattttaacactatcaccattaagtatgaccctgtgaaatttcatctaacaccaaagaagacaatagcataaactgtcttggttctgttgattttgtacatgtcttcaggttttatatgtgtgttattaagacattttgtactgtagatttactgactctcaattctggtattgactagagccaaactccctatagtacttgggggcatggttctattcagttctcaccccagttttcatggttttctgttgntctgttctgccatctgatctagagtcgcctggcactgccagtgttccgcttagagttcagaactcttggcgacgatcccaggttttctccantcangtaaactgcatactgggtagctggatttcttttgngc

SEQ ID NO: 1664 - DNA, 790 bp, Homo sapiens
  misc_feature (754)..(754): "n" may be a, t, c, g, other or unknown
  misc_feature (761)..(761): "n" may be a, t, c, g, other or unknown
  misc_feature (769)..(769): "n" may be a, t, c, g, other or unknown
gagcttccctaggaaggaaggacacccttttcctggaatgctctcctgctctgccacagctttcagtcaattatcactgcctttagaatgcttatcagcactccagcccttcagaagtgtccttctcctcctctggtgtcaaactccagagtttacttttggaattaaggtttattttccttaggttttaggaagtagcttttgaaccttagaagagtcagtttcctttactaactactgaatgaagttaggcattcaaaacttgggtagtcatgatttgaagtgtcacttgcggccaggcacagtggctcacctgtaatcccagcattttgggaggttgaggcgggcagatcacctgaagtcaggagttcaagcccagcctggccaacatagtgtctctactaaaaatattaaaaaaaaaaaaaaataaccgggcgtgatggcaggcgcctgtaatcccagctactctggaggctgagacaggagaagcacttgaatccaggaggcggaggttgcagtgagccaagattgcaccattgcactccagcctgggcaacagagtgagactccgttccccaaaaaatgaaatgtcaatttcattgagactgtatgaatgcctgacatgcacttgaaagtgatgtttattttataattttagcccttcttcactaccccaaacttccagtgcatttaaaaaatttattggcctaaccattctcatggggtaatatatcatgaccatcaaaagatgacnctaaagngaatcctncatgtatagctgggctttctg

SEQ ID NO: 1665 - DNA, 756 bp, Homo sapiens
  misc_feature (393)..(393): "n" may be a, t, c, g, other or unknown
  misc_feature (396)..(396): "n" may be a, t, c, g, other or unknown
  misc_feature (695)..(695): "n" may be a, t, c, g, other or unknown
  misc_feature (739)..(739): "n" may be a, t, c, g, other or unknown
  misc_feature (747)..(747): "n" may be a, t, c, g, other or unknown
tataggttttgagtagaaactattaccctcacacctggaaagagtaagttagatctactcttacttcactttcttatcctcattgtcgtcattatcactgaagatgcataacgctgtttaaagtctgaaggatgatacagaactgacggtaaacctctctgaaccatgtttaactgcctaaggctagacacgcagtgatatcagaattaatattgttttctttcaaatgaaggattctgagctgtggaccagagtgaggatgtgtatttatgggcttctaggtggtaactgttcttgtgtctaaaccttaattaacataacactctttcacacgaataaaactttcattcattatggttttggcccataaaagttgaagttttttgtttttgnttntatttttttcaccaaatcagccctacagcgattcctccacccccattagcaaataccgtaatatatgtctctagtaatcatcctctcacaattctgcttttcctaattttgccgtgagtcaagtttcttgaccacaatgttatgctgaggaagatctaatgttttccatggagcagaaattgttagtcctcaactccaaggtctgccttgtcaagccctgttttccgtgtcttcataaaccttgtcaggcatttatttattcagcacatatctactggtctctgccaagaattcataanggatctgatgaattatgtcccttctgggtggaattatttccttntacatttntgcaaaacc

SEQ ID NO: 1666 - DNA, 720 bp, Homo sapiens
  misc_feature (679)..(680): "n" may be a, t, c, g, other or unknown
  misc_feature (716)..(716): "n" may be a, t, c, g, other or unknown
gcagcctcagtcccgccgccgcccgctgcgtccgcccagcgccagctccgcgtcccgaccggcccgcggcagcctgcgccgcgccatggccacctccccgcagaagtcgccttctgtccccaagtctcccactcccaagtcgcccccgtcccgcaagaaagatgattccttcttggggaaactcggagggaccctggcccggaggaagaaagccaaggaggtgtccgagctgcaggaggagggaatgaacgccatcaacctgcccctcagcccaattccctttgagctggaccccgaggacacgatgctggaggagaatgaggtgcgaacaatggtggatccaaactcacgcagtgaccccaagcttcaagaactgatgaaggtattaattgactggattaatgatgtgttggttggagaaagaatcattgtgaaagacctagctgaagatttgtatgatggacaagtcctgcagaagcttttcggtaggagagttgagtgctgcaatggatgtgtgtttaattgcaggtggttggatcacctacttgtagctagaaggagttattctcagtttacagtggcttacctggaaatggattacaaatgtgtggagcatggaataacagctcaatgaaggctttagatgtctcttggaatgtttcatatgaatgaattgtannagggaagtcttcatgactaggtgggcctgctccttntagc

SEQ ID NO: 1667 - DNA, 753 bp, Homo sapiens
  misc_feature (697)..(697): "n" may be a, t, c, g, other or unknown
  misc_feature (711)..(711): "n" may be a, t, c, g, other or unknown
  misc_feature (750)..(750): "n" may be a, t, c, g, other or unknown
gctccagtcgcctccgacctcggcgctgggcgggcgcgccgggcctggggaaggggcgggcgcggggacccgatgcgcgggagcggaggccgagatggcttcggcgggaggcgaagactgcgagagccccgcgccggaggccgaccgtccgcaccagcggcccttcctgataggggtgagcggcggcactgccagcgggaagtcgaccgtgtgtgagaagatcatggagttgctgggacagaacgaggtggaacagcggcagcggaaggtggtcatcctgagccaggacaggttctacaaggtcctgacggcagagcagaaggccaaggccttgaaaggacagtacaattttgaccatccagatgcctttgataatgatttgatgcacaggactctgaagaacatcgtggagggcaaaacggtggaggtgccgacctatgattttgtgacacactcaaggttaccagagaccacggtggtctaccctgcggacgtggttctgtttgagggcatcttggtgttctacagccaggagatccgggacatgttccacctgcgcctcttcgtggacaccgactccgacgtcaggctgtctcgaagagttctccgggacgtgcgccgagggagggacctggagcagattctgacgcagtacaccaccttcgtgaacccggccttcgaggagttcttgccttgncgacaaaagaagtntgccgatgtgatcattccacgaggagtggacaatatggnttg

SEQ ID NO: 1668 - DNA, 761 bp, Homo sapiens
  misc_feature (695)..(695): "n" may be a, t, c, g, other or unknown
ttacaggcatgagccactgcgcccagccaacaccatttgttgaaagcactcttgcaaaaagcagttgactttactcatttgaggctatttctggattttctactttgttccactgatacttgtctatcccttcaccagtaccacactgtcttgattattgtagctatatataataagtcttgaaatttggtggtgatccctctcgctattctttttgtcagaattgttttagctattctaaattcctttgtcttttcatataaagtttagactaaccttccctggatctgcaaaacatcttgtagagattttgatagaaatggtgttatatctgtatatcaatttggtggcaattgacagctttactaattctttcaacacgtgaatacagagaatcttccatttatttaggtcttctttgatatcttttatcagtattttgttgttttcagcatacggttcctgtatgtgttttgttagatttacacgtatttctttttgttgttcttgtttttaggttttattttgcttcgtttttgtttttaacagagatgggggtcttgctttgttgcccaggctggtcttgaactcctggcctcaagtgatcctccggccttggtctcccaaaatgctgggattacaggagtgagccactgagctcggcctcttttttttttttttttttgagtgattgnaagtggtattggattggattcctttcttttcttttcctttctttctttcctttcctttcccccctt

SEQ ID NO: 1669 - DNA, 773 bp, Homo sapiens
  misc_feature (723)..(723): "n" may be a, t, c, g, other or unknown
  misc_feature (728)..(728): "n" may be a, t, c, g, other or unknown
ctgagtgggtggacgtggtcgtggatgacctgctgcccatcaaggacgggaagctagtgttcgtgcactctgccgaaggcaacgagttctggagcgccctgcttgagaaggcctatgccaagtgagtagcggctgagggggcaactccagcttccagctccccctaggggtgggggctcatgactgtcttctcagagggtcctgcttgatgccagagtgctgacctggagctgcccacagggtaaatggcagctacgaggccctgtcagggggcagcacctcagagggctttgaggacttcacaggcggggttaccgagtggtacgagttgcgcaaggctcccagtgacctctaccagatcatcctcaaggcgctggggcggggctccctgctgggctgctccatagacatctccagcgttctagacatggaggccatcactttcaagaagttggtgaagggccatgcctactctgtgaccggggccaagcaggtactgccctgggtggggccttccctgaagggcggttcctgccccctggcctgtccttgcctctctggcacctgaccagggctgtggaaggtgctggctcctcctttccccttctgcagcaccttatctctcttctggggacacccatctgagatgcctatcatgtcctgccctgactgactgtagttcatgtgtgcagcttgcttgcctgggcttgtgaattccaagangacangcttcatctgggttgctgaacaaggctttgaaaagggaaattttt

SEQ ID NO: 1670 - DNA, 720 bp, Homo sapiens
  misc_feature (692)..(692): "n" may be a, t, c, g, other or unknown
  misc_feature (714)..(714): "n" may be a, t, c, g, other or unknown
  misc_feature (718)..(718): "n" may be a, t, c, g, other or unknown
acattccacagcagcgcgctcacgcgtgttcgcactcaggacagccacgcagctgctggtgtcgcccgtgtgctcctgcggtgtgggatggtcgcggtgtgggacggtctgcggtggtgtcttcgcgttccccagggagtgtgccctgtgcatctccatggtacctgaagtccaggaagctgcctgcggatgttgcagttgggattacggggcagatgcagtggtcggtaggagcgagtgttcggggaagctgtaggtgttcgtggcgcgttggctttctggtaattcctccggctgcactagacatgccgcactgtgtgtccttccgtagcattgagagagaagagggaggatgcccaggtaaaagatgggaaatagcctagaatatcaactgtgatggtccctggtggggctaatggtggcaaacttttctgcttttttgtaaagaaataacacagggtcctaaaagcccgtgtatcctggaagcagggggtctgcgtcggaacagccgactctggaagggcgttggctatgtccctggacgtctcctgcagctcctcccatctcccctgagtctggcccagctggaaaggatgtgggggccacaggttaagtggccaccctggggcctgtgttcccagactgcctgctgtgctgggagttctgtcccgggagagacacagcttcgtctnggcttgcggccgtgtccccaangctntg

SEQ ID NO: 1671 - DNA, 706 bp, Homo sapiens
  misc_feature (686)..(686): "n" may be a, t, c, g, other or unknown
  misc_feature (689)..(689): "n" may be a, t, c, g, other or unknown
  misc_feature (697)..(697): "n" may be a, t, c, g, other or unknown
tgtgcaaatgggtatgtattttttcatactcatctttactgttagcccttcatccctctacaaaatgtttaatgttttaaacagatttactccctacagtctgcttgggttagtagtttatatagatttaatttagcattttctcaagtactgggctttttttctggcagaatttttcaaatagccaaaacataattttccctctgaatattaaaaaacaccaacaaaaaagatttttgcacgacaaataatttttacacatgcaaaaaagtaattttcaaaagtaagcacttctgccagatgatgcttaataagtctgtcctaatggtatttatcttaatgcttactttcaggaacagtggataataccatattcagtccccctgacaaacccctgaaacaggtaatgtcattagtcctactttctggaggaaatgaaggcacagagaagataagtaacttgcctgaggttgcacagccaatatgcagctgagtgggagttgagtgctaggctgttggatttcagagcctgccctcttaaattgctacgtgacactgactctcatatgtatttatgttttatcaagcttaatataggataaattgtcgtgcttagggatgtagtctcaaagagtggaaattcagacattagtagaaattcaggtatcaggacagttggggaccangangccaaaanggggtatgg

SEQ ID NO: 1672 - DNA, 757 bp, Homo sapiens
  misc_feature (667)..(667): "n" may be a, t, c, g, other or unknown
  misc_feature (702)..(702): "n" may be a, t, c, g, other or unknown
  misc_feature (746)..(746): "n" may be a, t, c, g, other or unknown
taactcatgaaacttgagaacacgagaacaacaaaaatactttccttgaacattttcagctagaatgacacggcattctcctacataaaacattataattttcccactactccaaaggaatccaataaataattttacagtgaaggggcctggatcaaaactggcagtgacacctggcccctgacaagcctgagtcacaggtccctgtgcaggtcccagcgtccagtcctccaagaaccagcactgccggagcctcgctgtggtttcttccttccccgatgggaccagctggaatttccaagctgcttcacagaggccaaagatgacaacacgagaggtggtcaaagccaaggtttccctgcgctgcctttgtcttcttcccatggcctggcctgagtgctgcagctgggccccaggagatgagctcctcgcccaagctggagagcatccgctgcacccgccatgccgggaagagctcgggtgggctttctccatagcaattcttcgcaatggggtcccaatcggtgggatgaggccctgggatgaggtcctgcatttggccggacatgactcaatactgatcttcgactgccatgaagaggttctggaacaccacgatgctccaggagaagctcctggctgggctgcaggcagcaagagacatggncagcagcccgtcacagcagcactgcttcacactanggctgtggacgttacaagcctggaccagcaaatccttcttttgnaaacatagctt

SEQ ID NO: 1673 - DNA, 676 bp, Homo sapiens
  misc_feature (616)..(616): "n" may be a, t, c, g, other or unknown
  misc_feature (655)..(655): "n" may be a, t, c, g, other or unknown
  misc_feature (666)..(666): "n" may be a, t, c, g, other or unknown
gagtaaacttttctctgcttctagaaaactgacttctcaatctctggaagttggaggttttgttgtggcaatttgcttgtgttgttttttaatgtggactgcgagaaacaggggcagttgaggtcatgttgaaatctgctgtggttggttctgatgtgctttctagtatgttctttctttagtgggaccaacagggttataataccttcctctgagttggaagataggcgcttctgacttattgccaagctcgggtaactgagctggactgcctctttttcttctctttccccccacatatgtgtgcatatctaaggtgaccacctatagaccgcatgattcctggtgactcaaggatgagggtgggagcaacagtaccagtggggggtggtaatgtggtcagctctgcaataagtgaaaaagcagacaagaaaatatgcagggaaagactgtgagtaggactggagtctcttttgattggtacaggttcttattgacaaaaagcatgtcatgatatatcctaggaaaaatacttgaatttagcatgaacttttccgtgagtggttcctcaaaaattttcaagagtagaagaacagcagtggactggcagatgcanatgttgacaggaagaagaccccctgctcaaaatactatncagtgagcctnaggatatatt

SEQ ID NO: 1674 - DNA, 681 bp, Homo sapiens
  misc_feature (490)..(490): "n" may be a, t, c, g, other or unknown
  misc_feature (625)..(625): "n" may be a, t, c, g, other or unknown
  misc_feature (643)..(643): "n" may be a, t, c, g, other or unknown
  misc_feature (681)..(681): "n" may be a, t, c, g, other or unknown
gatttttttgtgaaactcagtgcttcctaagatgaaaatgtgttcatgctaagactggtttcttccttagcactttgtctggcttagtggagtttgatggctattacctggagagcgatccctgcctggtgtgtaataacccggaagtaccgttctgttatatcaagctgtcttccattaaagtggacacgcggtacaccaccacccagcaggttgtgaagctcattggcagtcacaccatcagcaaagtgacagtgaaaatcggggatctgaaacggaccaagatggtgcggaccatcaacctgtattataacaaccgaaccgtgcaggccatcgtggagttgaaaaacaagccagctcgctggcacaaagccaagaaggttcagctgacccctggacagacagaggtgaagattgacctgccgttgcccattgtggcctccaatctgatgattgagtttgcagacttctatgaaaactaccaggcctncacagagaccctgcagtgccctcgctgtagtgcctcggtccctgcaacccaggagtctgtggcaactgtggagagaatgtgtaccagtgtcacaaatgcagatccatcaactacgatgaaaaggatccctttctntgcaatgcctgtggcttntgcaaatatgcccgctttgactttatgctctatgccan

SEQ ID NO: 1675 - DNA, 546 bp, Homo sapiens
  misc_feature (157)..(157): "n" may be a, t, c, g, other or unknown
  misc_feature (271)..(271): "n" may be a, t, c, g, other or unknown
  misc_feature (277)..(277): "n" may be a, t, c, g, other or unknown
  misc_feature (285)..(285): "n" may be a, t, c, g, other or unknown
  misc_feature (452)..(452): "n" may be a, t, c, g, other or unknown
  misc_feature (507)..(507): "n" may be a, t, c, g, other or unknown
  misc_feature (531)..(531): "n" may be a, t, c, g, other or unknown
aaaaagtcgaaccaacaagccttgaggtctaactctgttcaacattaaagggaagagtgagtctaagaagacttcaggtttctagcttggccaaaccaattgagctttaagtgaaatgtgcgatatggtaacagagaaggaaaaagacataacgatngatttgagctgctggtgggaaattctggtttagtgcccagctggctgtacaggctggttggactttaggagggaggtttgagctggaaaataaagatggagagttgtctttcanttttanatcatcantgaggtcataagggtagatggagtttacctgggaaaattaagtagctattcgatttggcttattattatgttaaaataatacttctctagtgaagtacttaatatgccagatactgtgccaagcattttatatacatcctctcttttactaagccctcatagggcangtattttgattccaatcatactgattggaactcctaagaaggtatcttgcttaangtcccacaaccgaataggtggcanatccagggtaattca

SEQ ID NO: 1676 - DNA, 709 bp, Homo sapiens
  misc_feature (634)..(634): "n" may be a, t, c, g, other or unknown
  misc_feature (658)..(658): "n" may be a, t, c, g, other or unknown
  misc_feature (686)..(686): "n" may be a, t, c, g, other or unknown
agaaaaaatgatgcccaggttgggctccccggcccaccggccgaggagaggcctgcgctgcacacgcgcagaccgagcatccgcgtcaagaggcgaagagagcgcgcgctccccacgtcctgcgctcctggctgccgggcattcgtctcagccgtgactctcgccaggccggggctggcgcgcccacgtctgaagagcgatgccccgggagatcatcaccctgcagctgggccagtgcggcaaccagattgggttcgagttctggaaacagctgtgcgccgagcatggtatcagccccgagggcatcgtggaggaattcgccaccgagggcactgaccgcaaggacgtctttttctaccaggcagacgatgagcactacatcccccgggccgtgctgctggacttggaaccccgggtgatccactccatcctcaactccccctatgccaagctctacaacccagagaacatctacctgtcggaacatggaggaggagctggcaacaactgggccagcggattctcccagggtgagaaaattcatgaagacatctttgacatcatagaccgagaagcagatggaagtgacagtttggagggcttcgtgctgtgtcactccatcgctgggggtacnggttctggcctgggctcctacctnctggagcgactgaatgacaggtaccccnaagaagctagtgcaagacttatt

SEQ ID NO: 1677 - DNA, 753 bp, Homo sapiens
  misc_feature (671)..(671): "n" may be a, t, c, g, other or unknown
  misc_feature (677)..(677): "n" may be a, t, c, g, other or unknown
  misc_feature (729)..(729): "n" may be a, t, c, g, other or unknown
ctggacctgggaggcagaggttgcagtgagcccagacggcaccattgcactctagcctgggcaacaacacgaaactccgtcccaaaagaaaaaaaaaaaaaaaatcccaaggggctgcagctgccaaacccaataccctctatttaacccctactctgttttacaagagaaataaaagaagtatcagcagagctcaggtgctaacacctgttgagggctgacctacaaaactctgcctacaaaactctcttagacaggtgaatatgccactagaagttaggttgctggtagacctgggggtccctgcgggagggtgatggtttctttaccaccccacaggagatttcagtggcaaggcatgcctgcagtgggctttgggccatgcatcttccaagtccataggtcttcacctgggtggcagtgagaaaaagtagaaagtaatgagcctcctgtgtctctggaaggttctagggatagggtagagggaagaagagaacaaacaagcctggcttgtgctgaagtgtggtaggcactaccctgtttgcgtgaagagaaaacaaagcacctgttagtagggaggctttagggggaagccccgtcttgggggcatttctgggcagattgtgaattggaggaatctctttaactgaagtactctggctggaccctgnccttgngtgaccatgtctcctattgcaccagcatttgaattccatggcttaagaaggntctggaccatttattccagactgt

SEQ ID NO: 1678 - DNA, 779 bp, Homo sapiens
  misc_feature (597)..(597): "n" may be a, t, c, g, other or unknown
  misc_feature (615)..(615): "n" may be a, t, c, g, other or unknown
  misc_feature (663)..(663): "n" may be a, t, c, g, other or unknown
  misc_feature (742)..(742): "n" may be a, t, c, g, other or unknown
  misc_feature (761)..(761): "n" may be a, t, c, g, other or unknown
  misc_feature (778)..(778): "n" may be a, t, c, g, other or unknown
tatttaaattttatgaattaatttgaatgttttttacactaactaacttttcccaataaagtccactatgaaaccacgacatccaagagcccaaagtcgtcttctctgccttcaagtcatagatttgcccgcagtatctgtggtgctctgggccctcccggtgtccgtctcttccaggatggggatgcccgggagggaaactgtctgtggctctaggctgcacggctcgtgccaacccatcagggagggccatgcccgttgtcctattgagtgccccaccctgcacccccaccttgggaattcacatgtccattccttgaggttcatgtcaacctcggaggcatccctgtcttcattatagctgacccctctcctgcgtccttctgtcagcatatcccttctgcatccttcccgtcacacatacataccaagctatgatgattgattgatagtggccttcgagatgaaaaccatccttaaccccatgatccttcccagctggcatccccaccctaagcaaggttccctaaagagaagcttgttgacattttctccccttcctacttacagtcagctgtcaccttgctccttcacctncctcgtcaaggtgactgncttcactgcagcacactggcaattgcttgagacctaccgggcaaccgnctgggggcttgcggggaagaagaggaggacaaggctctgacctgttacttggtttcaggaaaccccgttaggttttgcngcttatgggggctcctttnctttccgggctaaaagnt

SEQ ID NO: 1679 - DNA, 837 bp, Homo sapiens
  misc_feature (739)..(739): "n" may be a, t, c, g, other or unknown
  misc_feature (794)..(794): "n" may be a, t, c, g, other or unknown
  misc_feature (817)..(817): "n" may be a, t, c, g, other or unknown
agaatatgatgcaggtcatcaaaatctgagttccaaatatgttttgaacaatagaaaacatgagaaaaactacataaccttccaaaaccattactttgaattgtgacatttatttgaaaataaaacttccagatattttatttaaaggatcttatgttgtttgagtcacacttcgtcattatcagtccttcctgtcagggaaaagtgtgtttgggagaaatacaaagaaaagctttgagttgccaagatagcatttactaaatttggtcataaaaaatgttctgaaacttactttctgtatgctgttctagaggcagctcaagaattacagaaatttccttttttctacactcttaatttttctactttatgtatttctttttggctctttaaaaggcaacagattaaaaaaaattagaggaaaaacatttgttctactaatgtgtcacttgagaatcccagacaatacatagtatcattgagctaaaatgtgttgtagcctatagaacttagcacttctctcaaagagagaaggggagacccaatgagagaggcagacatggggtgaggccaatgaacactcagaaattaaaaagaatagttctaccttcttgacttatgtgtagcaactaaatcacaattagagaaagatacatgtgtgagtgtgtgtgtgtatacttgtgtgtgtgaaggtgtgcatgtgtacaaggaaaatggaaaatgcatttctacctagtgncataatgaaactaggttttcggccaagatattttcctttgcctttgcatatctgnggcctactgggcccttatattgnacctgtgtagaaaggaacct

SEQ ID NO: 1680 - DNA, 770 bp, Homo sapiens
  misc_feature (542)..(542): "n" may be a, t, c, g, other or unknown
  misc_feature (721)..(721): "n" may be a, t, c, g, other or unknown
  misc_feature (729)..(729): "n" may be a, t, c, g, other or unknown
  misc_feature (765)..(765): "n" may be a, t, c, g, other or unknown
gacgcacttcgccgccggccgacgggcgccattgtgcggcgcgcgccgggtgagtgccgcgcgaaacctgcgtccgtcgggggctgcgctgggcgggtccagaaccgttagttgggggcgagcgcggcctctgcattttccgccgagctcgggtaccctgagccggccgtgcctgcagtcctcccgccgctctgtgggatggggtcggtgacccggaaccccgaggggagacagtgctttcagggcgccgcggtggagagaacagatcgcctccggaagcgtggggtctgggccagggaggcgatcccctccgatgcgcgggacagaggaggctcggtgtcctctcggggaggggaaaactggtcctatccagtcctgtgggagtcctatgactcactctgggcgttttccagtttgggtggacttgtcatttcccgctgagggagccgttcctgggcggaggctgcggtagctccccagcggacaccttaagcctctccctcccctcccaacttcggtttcctcaggactctgcccacttncaccagagacacattgagaaggaggaaactatggcctccaggctttcgacggcctggtcctgtgtgagtagaggcttctttagcttttgagtccgtactgacctgggaggatccgatggtggtgagataccaccttcctgagatacccccatcttcaaagcaccttggggaaggggtanaaattggntgggcattaaaaatcctgctgatggtggaaccccangtttg

SEQ ID NO: 1681 - DNA, 706 bp, Homo sapiens
  misc_feature (671)..(671): "n" may be a, t, c, g, other or unknown
  misc_feature (688)..(688): "n" may be a, t, c, g, other or unknown
  misc_feature (705)..(705): "n" may be a, t, c, g, other or unknown
ggcctttttttttttttttttgagacagactctcactgtattgcccaagctggagtgcagtggtgcgatctcggcttctcttaactactcagagtaaaatgtgagaagaaacaatacaaagatgggatttataacacggaagcaaaatatagagatttgaaaattctcagcctaagcatgtaaataaaaaggtatttaggaaagtaaaccaagggtgtgaccaagtgactttctgatcagagtgtggctagaaagaagccaggtgttttcatcatgacaataggagaatgaacccaatggcacttcagagagcttcaaggccgctcctcccatcacaggcccacagtgcgagggccttgaaggcaggatggtttccagggaagggcgtagaacactcatggaactttggggcttgctgcccggggctgcctcaagtctctgctccccacatcccggcacagtgctccttggctgccgtagttgtggctccagtgggcccaggtgcagtttagtccctgctctggagggcaaagtggtgaacctcagcatccacatggtactgattttgcaagtgtgcagagtgcacaagatgtggaagcatggcatccttcaaagagatttctttttttttttttttgagacagactctcactgtattgcccaagctggantgcagtggtgcgatctnggcccaccgcaaccttng

SEQ ID NO: 1682 - DNA, 494 bp, Homo sapiens
  misc_feature (489)..(489): "n" may be a, t, c, g, other or unknown
  misc_feature (492)..(492): "n" may be a, t, c, g, other or unknown
  misc_feature (494)..(494): "n" may be a, t, c, g, other or unknown
agaagctgtcggactgtgagcgccttcgaactttggaggcttggctcgtgatggaggtttttttagcatggggaccagggaggactacggtgctcgggactgggctgcggcctcctcgcggccccgagtgccctgtgaaatcagctcaggccgcgtccctctagcctgcactttccctctgttcacgctgcttccctccagggcccggcctccaagtgaaggggggcggagggcggtcacctgccagaaggtctggggcgccaaggtgtgtcccgggactcttggctccgtccaggttccaggccccgccccccagcttatccctagccggggctccccaccgtgggaacggggaccagctggccggaagcgccaaactgcgtccctgtccgagccctggggatcagtcaagccgaggagttaattatgtaatgagggggcagggggtcgaggctaatgaagcctcccggggtggggagggagggggangangn

SEQ ID NO: 1683 - DNA, 720 bp, Homo sapiens
  misc_feature (677)..(677): "n" may be a, t, c, g, other or unknown
  misc_feature (719)..(720): "n" may be a, t, c, g, other or unknown
aaaaagtaatggtaatacatgtttcttgtgaagggaaaataaacaaggtccagttttattttactagatagcaaataaaaaaaaaaagagggattagtgatttcagtcttttagaaatggttggcatctctctgccttagttcttacctcacttgtaaaggattgagttcttccttaatgttttctcctggtatgagaatgtggttatattctttcttaggtaattgatatgaatctaacctagtttttttttttgtttttttttagttactttaagttgaaatgtaaaggagcagttggttctgtacatttccaagcttctctgtaataattgatcattacaatgatgaccctaaagcatcaggaaaatactgtatactatatgctcagagatatatatatgtatatatatatatatatttgatggagtctcactgtcgaccaggctggagtgcagtggtgtagtctaggctcactgcaacttctgcctccccgggtttaagtgattctcctgcgtcaccctcttgagtagctgggactacaggtgtgcaccaccacgcccagctaatttttgtgtttttagtagagatggggtttcaccatgttggccaggctggtcttgaactcctgacttcaagtgatccactggccttggccttccaagtctgggatttcangtgtgagtcactgcacccggcctatttttctaaaaaaagaann

SEQ ID NO: 1684 - DNA, 756 bp, Homo sapiens
  misc_feature (680)..(680): "n" may be a, t, c, g, other or unknown
  misc_feature (722)..(722): "n" may be a, t, c, g, other or unknown
  misc_feature (727)..(727): "n" may be a, t, c, g, other or unknown
gtggcttgcagctcggggtgggtggctcatttcctggccgctcctgggcttcgcggaaagaagagattactcacactccttctcaagcacagaaccagttgtactgagctttttgctaagctgtttcagccaagaatggctgtggaatctggagtgatttcaaccctgatacctcaggatcctccggaacaagaactaatactagtgaaagtagaagataacttttcctgggatgagaaatttaagcagaatgggagtactcaatcctgccaagaattgtttcgtcagcaattcagaaaattttgctaccaggagacacctgggccccgggaggctctgagccgactccaggaactttgctatcagtggctaatgccagagttgcacacaaaggagcagatcttagaactgctggtactggagcagttcctgagcattctgcctgaggagctgcagatctgggttcagcaacataatccagaaagcggcgaggaagctgtgaccctgttggaggatttagagagggagtttgatgacccagggcagcaggtcccagctagtccacagggaccagcagtgccatggaaggatttaacatgtctcagagcatcccaagagtcaacagacattcaccttcagcccttaaagacacagctgaaatcctggaaaccatgcctttnccctaaaaagtgagttgtccagaccttccaaagctttttcanctatncgttgggaatggggtttcttccaggaaag

SEQ ID NO: 1685 - DNA, 648 bp, Homo sapiens
  misc_feature (218)..(218): "n" may be a, t, c, g, other or unknown
  misc_feature (564)..(564): "n" may be a, t, c, g, other or unknown
  misc_feature (585)..(585): "n" may be a, t, c, g, other or unknown
  misc_feature (640)..(640): "n" may be a, t, c, g, other or unknown
ggatgaaatgggtacgaggtatggaaaacctttgatgtctggatggctgtggagttatccatgatatgaaatagcagctgagctgttgcctgttatgaaaggtaaaagttacctgtcgaatttcaaatgatagatccaactccaggagaactgactcactagatcacctggctacttttggccatgctggttacagtgaggagaaaaaagaagtgtancccaggtaataccttcagtttttgttctctcctcccggaagaaagaaaaaaggcccaaaaattcccaaagatgagctttggttgggccaaaaatgttaaacatttatggcactctttcctcacaagtaggaggaaaaaaggttgaatcagttctcagggctggagcaaagtaaaaaagggcagaggacatccttcagttgttagcctacctgcacgccctcaaccccattccagatagggtctcctccgcaactgtaatattaaaccttttgctaaatttactgcaaggggtcgaatacatctgcagtgaggaaggtgccggccagggtggggtagcggcggcagntaatggccttgtattttgcanttattacatctatggatatacgatagaagttgatgtaaaatgttttatgcttgtnatgtcgca

SEQ ID NO: 1686 - DNA, 805 bp, Homo sapiens
  misc_feature (763)..(763): "n" may be a, t, c, g, other or unknown
  misc_feature (783)..(783): "n" may be a, t, c, g, other or unknown
  misc_feature (801)..(801): "n" may be a, t, c, g, other or unknown
ttcaaattcacttattctagtagtttgtagattcctttgaattttttatgtctgtaatcatagaagcattctatgcttgtgcagataaagcatttttcagtgttaaaagttttattgacttctttttctggagtttccatcttctcattttgtcttctccttttggtatcaagtgctaagaatagcaccacttggaaatatgacaggactgcagccagtgtggataattatcattttcaactacagatctctctcagccttgtctgcttatcacactggcttgatcgcgcccatgaagatccgcacagaggcccctgggaaccttcgtttatacagtgggagccccactcgcagcgagaaagagcaggtctccatcagctccttctactacaaggagcggaaatcaagacgatggaaaagtaagcgtgagggatcagactctggcaatcgacagatcaaggctgctgggaaagtcatcatccaggatattgcttgcctcctgcctgttcacaaatcgctgggagagctgtacatattgaatgtgaatgatattcaggaaacatgtcagaagaatgccgcctctgccttgctcgttggaagaaaggatcttgtccaggtttggtcgctggctacggtagctacagatctttgccttggtccgaaatctgacccagatttggaaacaccctgggctcgacatccatttgggcggcagctgctggagtccctgttggctcactattgccggcttccggatgttcanacactggcgatgctctgtancgtgtttgaagcccagtntcgg

SEQ ID NO: 1687 - DNA, 751 bp, Homo sapiens
  misc_feature (566)..(566): "n" may be a, t, c, g, other or unknown
  misc_feature (677)..(677): "n" may be a, t, c, g, other or unknown
  misc_feature (685)..(685): "n" may be a, t, c, g, other or unknown
  misc_feature (720)..(720): "n" may be a, t, c, g, other or unknown
agacgatgggaagatcttccatggcagtggtgtgggggacccctttgggccacgctgttacaaaggggacatcatgggctgtggaatcatgttcccccgggactacattttggacagtgagggggacagtgatgacagttgtgacacagtgatcctgtctccgactgcccgggccgtccggaacgtgcggaatgtcatgtacctgcaccaggaaggggaagaggaagaggaggaagaggaagaggaagaggatggggaagagatagagccggagcatgagggcaggaaggtggtggttttcttcactcggaatggcaagatcattgggaagaaggatgctgttgttccttctggaggcttcttccccaccattggaatgctgagctgcggggagaaagtcaaagtagatctgcaccccttgagtggctagggcctcccctccagacctgctccttctccctgctcaccctctgctgggccaggcacccagttcctgacttcccagaggcttcgtttacccagcaggcccctggaggtgtgtagtcactctgcccccactggctcangcccctgtcacgcttctctgtgcccacgtttctgacctggtgctgccactgttgtcagtccctgggcctgagtccctggttggacaggaatggacccaaagaatggtgttnggtatgtngggtggtcccacttcgcttttggtcaatgggcttntgggtcccccttttcctttaccgggccctgt

SEQ ID NO: 1688 - DNA, 841 bp, Homo sapiens
  misc_feature (585)..(585): "n" may be a, t, c, g, other or unknown
  misc_feature (731)..(731): "n" may be a, t, c, g, other or unknown
  misc_feature (814)..(814): "n" may be a, t, c, g, other or unknown
ttttactttgtgtaactgattaattgttcatttgggtagtgatattatgactatggctaaatttgcattgtcttgcctaatagacctgagcactgatgagcactgtcttccctttagatatcatagaatacagtcatggttacttggtttccaatgtgtagccttgtttggggcttgctttccaaccaggggagtaagaaggcacaggcaagagtgccagggcttgctgtcatagactgagggctctgccaagacagggattgactctggctttggattatctcctaagctttggaggggaaaggggagagaagaggactacagaaggtctagtagttgggaaatgagggggcagcccccttgtgccactgccttgagagtttcaaacctgtggcccccgcaaaaggccaataagcactcttgtgtaagggaaagggccattcaggtgggtgctgggaaagatagctaaatttacccgcctctctattcttgggttttttcctctgtgcctgcagtactttgttttcttctcattgtgaatgacctggacttatttccttgaggtccagcctgacttgggctcanggctttcatcttcccttcacgggatctgggaaagggcatgagatctggagccagacaaacctagatccagtcccagcttcaccaaatattagttgaatggcttcagacaagtcttttaacctctctattcctgaatttcccatctncaaatgggatggtgatgattaaggtgaaagaaagatgcctgggttaacagcaagaacatagactttgggtcatagacctgganttaaagtctggccttgaggccccgggc

SEQ ID NO: 1689 - DNA, 825 bp, Homo sapiens
  misc_feature (753)..(753): "n" may be a, t, c, g, other or unknown
  misc_feature (787)..(787): "n" may be a, t, c, g, other or unknown
  misc_feature (819)..(819): "n" may be a, t, c, g, other or unknown
cacgttttgaggtcccaaggggttaggacttcggcatatgaatttggattgtggggtggggggaacacgattgaacccctcactggatgaattcttgagaatgggcagccagaaaaagacctgattgaggccaaagagcaagcgatgttgggagcttaggaaagagggttctggtcgaggggccggggagccccaggtcagtgcacgcctgctgtgcgccagctgttctgattctagcctgactgaacatgacagtgtccagagagaagaggaaagcagagttcccatggtccttggagacacctgtccttgggaggcatcagagctttccccagcatttggctctagggcacttctcctctggggcttcatccagggacggcagtaggtccagtcagtgccagcctcagctccgctccactggcgccagggtcatggtttggcaggcccccaaatactgccccagtccagacaggtctgcagggagccagggcaagcccggacactaggggaggctgggggccaaggcagcctctttttctctggggacagcactggcagcccctgacccacatcatggggtgagcaagtgtccccagagctcctgtccacaggctgatggaggtgccccgggcctgggagcagcacgtcttccccagagacctcatgggctccgtagtgacatgctccctcgattcccaccgttccaggcagagctggcctccagccccacacttctctctcgtgggctgnctgttccctgctgggccgccactgcctatgacangggcaatgctgtggtccttcttggacatgatnggactt

SEQ ID NO: 1690 - DNA, 867 bp, Homo sapiens
  misc_feature (763)..(763): "n" may be a, t, c, g, other or unknown
  misc_feature (821)..(821): "n" may be a, t, c, g, other or unknown
atgcaaccaagaggcttggggctccattgcttcccccgctcccacccataggttggaagctctacccaggcacagtgaactcagatttgggccctgattgcctttgcctcagcttgcttgtaaggcagaggtttcacaagagaaacaaaatggctaccacccagcccattgcccagaatggtggttcagagattttgtccagagggagagacagtgtataagaatagagctctgaagctctctcaagaagaatggaatttatttgaaacagtgtcagaaacttcccttaattaaaaacaacatgaaccgtaagtcagctagttaatcaggtaattccaggggaagacacagctaaggagcccttctaaggtcaaaagaaaccttaaagactggcctcaaaaactagccctgcttggcttaaattataccaaactgcttagtaattaatgctccaaggacttgtggagaacagtagactgatcagacagaagccagtggagcctagtgggctagaaataataccaaaggagacaaacatcttaacagagagatcagggaaagatggtcaaagagactcctgtttaaaaccataccagggtatattctgcgtatgtccaaggctgtaccctctgaagagcaacaaaatgcttcccactgccagctatttcactaaaatagcttagtgaaaacacaaaacaaataactacgagtaactctgcatatgtccaaggcttgcaccctctgaagaacaacaaaatgcttnccactgcaagctacttcactaaaatagcttagtcaaagcagaaacaaattaccaaacnaaaccaaccacaaaaccccttttgaagacaccaccaaaaccctttg

SEQ ID NO: 1691 - DNA, 759 bp, Homo sapiens
  misc_feature (727)..(727): "n" may be a, t, c, g, other or unknown
  misc_feature (729)..(729): "n" may be a, t, c, g, other or unknown
  misc_feature (736)..(736): "n" may be a, t, c, g, other or unknown
gttgagacttccccaggatgcccgtgaaaattaaatgagataatatatgtgaaaggcgttttgtaaactgtgaaatctccataagccttcattgtttctggctttgttgatgagcgtccccacacatacgtgaatgcggtcgccctgaacgtttccccacaaatccagaatttgacagcagggatcccaggggcacttggctgtcctgtgccgccctttgcaatccgggctgaggggttttctgggccaagttaacagcggatggtgcctcacagcagaggcctgaaagcacctgctgcgtgggccataaacacagtgtgctcagacacgcagagacactggttcttacccactcccaagggtgggataacgctgcaccttgcacttgtgggatgaggaatgaggctcttctgctgggcagggcctgggcaagggagaagcttttatagaggaacccgcatggccccggagtcctcccctcttagcccctggcctgagtccccagccagcaacccagggtagctgttctgaagcagaggggctttgttccattgtgtttggaagcccagaagccaccttgtggcttagggtgacatagggacctacacacagaggagtgaacttagggttctagggactatggccgggtcaccggtggccaggggcagagatgagcacctgtccatgtaagccatatgccacccccacagggcctggcaaggtgcananggtgcangtctcggccatgtaccccttttg

SEQ ID NO: 1692 - DNA, 857 bp, Homo sapiens
  misc_feature (504)..(504): "n" may be a, t, c, g, other or unknown
  misc_feature (844)..(845): "n" may be a, t, c, g, other or unknown
  misc_feature (852)..(852): "n" may be a, t, c, g, other or unknown
gttgttggggccgtcgaggcggcggcgactctgcgtccccggctcctgatggaggcggggccgcatccccggccggggcactgctgcaagcctggggggcggctggacataaaccacggcttcgtgcaccatatccgacggaaccagatcgctcggtaccgccccgccctgcgccgccgccgccaccactcctggcctggcctggcccggcccgacagtccctgactcccgctcggctccccgcagggacgactatgacaagaaggtgaagcaggcggccaaggagaaggtgaggaggcggcacacgcccgcgccgacgcggccccgcaagccagacctgcaggtgtacctgccgcgacaccgaggtgaggccgcccgccccgcctgcctccagcccgcgcgctcttcctgcaacgcactccccttctctatagggaaaaaccacttcttactcctaaggttcagctcatctcgtctctttccggaacctccacctcagcgctnccaaatctccgctgaatgattctcaccaagaactgggacgactcataagcccccagttaagcatcgctgtcagagtatcggggagccagcaagaagtttatctgccggtttgccccaccgtgctgtattttagtaaggtgctccgctacctagcaaagagaaagtctggcacagcgatgagcgaccaagcacataattgcggaatgaacccagtaaatggcctttcccacttctctgctactagagatcacactgggtaatatatgacggcaatttttggtaacattattacttttttttaaaaaggtttttatttatttttgagactaggtctcttgtnnccccagntggaa

SEQ ID NO: 1693 - DNA, 785 bp, Homo sapiens
  misc_feature (774)..(774): "n" may be a, t, c, g, other or unknown
  misc_feature (776)..(776): "n" may be a, t, c, g, other or unknown
  misc_feature (779)..(779): "n" may be a, t, c, g, other or unknown
aatgtatagtaaatttggtattaaaattgtctcaattatttgaaatttccatttctattgtttttactctgtcatcaatttctgtctggatatgcagttacctgtagctcagaatctgactaggttatcgttaaattcaaaacccacaagaggacattatgttaacaaacctggaaaatataaatggagttttaaaagaaatatataaactaccaaaatagacttgaggaattagaaaacctgaacaaagcaataaccaaggaaagcattgaacaatattattaaacaattcgctttatgaaaggttcctgtccctgataaatattgtattaggaatgtttgcttccaaggaatgactaaagggaaaagggatttataggaaacatagagggtaatctcatagaaaacctttgcagtaagtaaggctggacttcatgtaaactgtgaagtcattaaaaagcaaatcttgttcactgtatcttttaaggtttctatggctcttgttctctgcttttctccaaatacacgttttcttagcctgtatatagttgaataatagcgacccacccgaatttacccagcatttagctccagcacttactgacatcgaattatccacagctaaatgtctcttagttcaaacgcgcaaaacacattctcattggtcaccaaatgaccagtgtgtttcctctcctcaagtgcagtgtctgcttttggtctgatgagctgtgggtggataatcagggtatgtgattgattcatagtctgtgcaanangangttgaa

SEQ ID NO: 1694 - DNA, 861 bp, Homo sapiens
  misc_feature (782)..(782): "n" may be a, t, c, g, other or unknown
  misc_feature (843)..(843): "n" may be a, t, c, g, other or unknown
  misc_feature (859)..(859): "n" may be a, t, c, g, other or unknown
tattacaatgatgcttctgtcctaagaagcttgagacaccgtcatctttgttactactatgactgtttatgttagtgcctcaccttttggtttccttgtgtgcccaaagctgctctccagagaacgtcatctcagtttcctgatcacaagcaggcttttccctgagatagatccaggcattgaatgcccagagcacatttagtatgtgcacgaatcctctagcttcctctcgcatttgtaaaagaatctgattcaccaggatgtttttggttcttttatgtaattttccatttcctgattgtggcaggtttttttttccattttctattcatctgtaactgctttggctcagccctttgtctccctactttctgccctgcagctaacttcatgagaaagtcccgtgttccctgggtctggaaacttgtcttgtcccaggagacatactctagttttcaagagacgtgaaagagcttcagcaacctcagaatgttctggtggcagcatcaaaatcatgaccatgcatgaataaggggtattgtcatgtgtgtgctgatagagcccggggaccactgaattctagccccatctctgaaatatgtgcccaccagggcagagcattttcttttaagttccgcccagcttctctgcaaagtgggccactttagttctagatttcagagatctctgtataaaccagattacgattttagggtcttgaaggagaaaaaaaaaaatgtcataaatcttattaatactaatggcttttggtttaccagcangaaataagtaaattgctctcattgggataagataaaccttttaataaccattcttatagcnctgagtagtttgaggngg

SEQ ID NO: 1695 - DNA, 759 bp, Homo sapiens
  misc_feature (669)..(669): "n" may be a, t, c, g, other or unknown
  misc_feature (710)..(710): "n" may be a, t, c, g, other or unknown
  misc_feature (751)..(751): "n" may be a, t, c, g, other or unknown
ggggggcccacattttttgtttaggataaaactagcctgagcactgttctactgaatctgaagtcaggagtatcagatttttgtgtcagtccagcccttagccagtgctaaatgactttgaatgtgttagctagtcttttgggtataatgtccacatctgagggatttgtcccttatctgaaaagtagataggtggtgagttcttcagggacaaggattcaattttattcatacagtatatatgtggatatacatatacacatttatacataaaatcccagtacctagcactgtacctggtccttggtaaggccttgataaaggtttgttagaggcgtgaatattttctgtcttcagggcactttatattctttatgaaaagcagtttatgtagtttatgttattgttttaaaaaacttaatcctaaatgtgaagtcatttcttttctttgttttgttttgttttgtttttgagacggagtctctcattatcacccagattggagtgcagtggcaccatctcggctcactgcaacctccatctcccggtttcaagagattatcatgcctcagcctccaagtagctgggactacaggtgtgcaccaccacacccagctaattttttttttttagttgagatgggagtttcaccatgttggccaggctggnctctaactcctgacctcaagtgatccgcctgcctcagcctnccaaagtgctgggattacaggtgtgagccaccatgcctggncaatagtt

SEQ ID NO: 1696 - DNA, 851 bp, Homo sapiens
  misc_feature (687)..(687): "n" may be a, t, c, g, other or unknown
  misc_feature (792)..(792): "n" may be a, t, c, g, other or unknown
  misc_feature (796)..(796): "n" may be a, t, c, g, other or unknown
  misc_feature (846)..(846): "n" may be a, t, c, g, other or unknown
gtttgggttcctgtattttcaccagagggagttagtcctgccccagttcagctggtcctcaaagtgtatatagctctttaaccatcagcaagtgtctatcagaacataatcttgatttcagctgctactaaatatctaccaggagactgcttgagagaattgcctgatgggtgctgagtccaccattcctgagatactttgaaatcagtggcttaacccaagctgtgtatcgggaccctctcaccgtggtcccaatggagtcacttttcttaggcgcccccctttaccttgggctctgagcttcctctgcctttcatctctgtgggatgaagccccaccgcccttcaggatgcaaagccctcttctctaatgtgagtgcagggccaggtgcagtggctcacgcctgacctcccaacactttgggaggccgaggcagggggatcccttgagcccaggagtttgagaccagcctgggcgacactgtgagaccctgttgcctgaattgccctgggagatttcctcagcttgtgctgggggcatgtggccccatgaagcccgtagtcactgttcaccctgagagacgctggctttcgggctcacacacctgctgcggggcagccccaggaaatggccaccccatttctcctggagctgcgcgtgttctcagaaactgtggtggccgtctgntttggttgcatcttataaacgtttacctgatgacattttcctcttcaatttaactgctagaaaatttaaagtcaggttggtggcttaccagtaatgagagtttanagtnaagtaaactttatgacatagcttaaactcttactttctttttaaccaatntgaat

SEQ ID NO: 1697 - DNA, 851 bp, Homo sapiens
  misc_feature (728)..(728): "n" may be a, t, c, g, other or unknown
  misc_feature (753)..(753): "n" may be a, t, c, g, other or unknown
  misc_feature (820)..(820): "n" may be a, t, c, g, other or unknown
  misc_feature (841)..(841): "n" may be a, t, c, g, other or unknown
gtgtaggtgcatttgtttaaaaaatataactccccattgcctctgggataaagtcttatctcagtttacatatattcttgataacctctccaactttatgtctcaccacccccactcacttcgtaattcgtgccttatcagaatggacctgttatactggcagttcaccatatataccattacattttgtttctcccatctctcaggtagacttacactttcggcccagcacatcagtcatcgcccttgcttgctttcctattcactcctgttctggaaggtgcaccaccttttcttggaaggcttcccttgctctcccaggctagatgagatgtccttccatcagttcccacagcaccctgtgcatgtatctgttgtgcacttaccaatagtatacaagggatctatgacccaagtctctccccactagcttgtaagctcctcacagacaggaaccatgttttgtctttgtactccagtgcctagtatataagagatactcaataaataaatatttgtcaaatcaactaattgattccttgtgacctaattctagagaatgggaagaaggcctgttattttgttgtcctttatggttctttaggaaagctctccaagcttggcatttgtcagggtgggaggaaaactgttgaagtattaagactggacacatggctgctaattcatcagcttatcattgaaaaagtccatagccaaaacctgactgngcacttactataggaccctgactgnctgggtcttcctgtctcctccagccagtatatttaaaaggtaatgagataatgatgaagtggtttgnaaaaaggttaagggtcaaatngaaaccattc

SEQ ID NO: 1698 - DNA, 773 bp, Homo sapiens
  misc_feature (688)..(688): "n" may be a, t, c, g, other or unknown
  misc_feature (742)..(742): "n" may be a, t, c, g, other or unknown
  misc_feature (761)..(761): "n" may be a, t, c, g, other or unknown
agtagtcgctgtcgtccgcagagccagttcctagcgcagagccgcgcccgccatgagggagatcgtgcacatccaggcgggccagtgcgggaaccagatcggcaccaagttttgggaagtgatcagcgatgagcacggcatcgacccggccggaggctacgtgggagactcggcgctgcagctggagagaatcaacgtctactacaatgagtcatcgtctcagaaatatgtgcccagggccgccctggtggacttagagccaggcaccatggacagcgtgcggtctgggccttttgggcagcttttccggcctgacaacttcgtctttggccagacgggtgcagggaacaactgggcgaaagggcactacacggagggcgcggagctggtggacgcagtgctggacgtggtgcggaaggagtgcgagcactgcgactgcctgcagggcttccagctcacgcactcgctgggcggcggcacgggctcaggcatgggcacgctgctcatcagcaagatccgtgaggagttcccggaccgcatcatgaacaccttcagcgtcatgccctcgcccaaggtgtcggacacggtggtggagccctacaatgccacactgtcggtgcaccagctggtggagaatacagacgagacctactgcatcgacaacgaggcgctctatgacatctgcttncgactctgaactgacaacgcccacctacggggacctcaaccacctggtgtccgncaccatgatggggtaccancttgctgggctt

SEQ ID NO: 1699 - DNA, 795 bp, Homo sapiens
  misc_feature (609)..(609): "n" may be a, t, c, g, other or unknown
  misc_feature (742)..(742): "n" may be a, t, c, g, other or unknown
  misc_feature (772)..(772): "n" may be a, t, c, g, other or unknown
  misc_feature (783)..(783): "n" may be a, t, c, g, other or unknown
gtcaatctataatagctccagcagagggaatgaaagtaatttagaaaaaagtttactatttgatttgtcaaagtgtgtccaggaagtaagagagcctaaccaaggggctgttgtgcatgtaagctcttcagtaaaagtggtggtgtactaagctatatttaagaaggtaatttgagattttatattacatgctagtgaatcatttttggattttgcaccagaactgagctctttggtccctgcctgtctgtggtttgtgttgcaaggtccagaggcttaaaacaaagaacaccatgggaaattctccatgagtcattccgtcagctgtagcttctgttttatagtccttcggatataactagtgttttaatgccagctctcctagccgcttttcatgctttggttctatatgctaataaaaaagtatggcagtatggctattgtagataacgttcagacttttttttctcccgattccacaatttttagttcttctaatggctctaagctagaccaattataaattgtaactggtgaaaagatttatgactgtttattttgttgtagttgcgaggtaagcgagtggtcacttaatacttttggttctgngaatcttactgtccagagaactaaagattgaattagcagttcagctggagtcagcactatgtgctaaatccctatacttaagagctcttatgtattgcagacaaatgtcctcttaactggtttggtattttgngaaaaataatataatagagcaggcagttanatcatatcagnttcaaatttaag

SEQ ID NO: 1700 - DNA, 801 bp, Homo sapiens
  misc_feature (743)..(743): "n" may be a, t, c, g, other or unknown
  misc_feature (789)..(789): "n" may be a, t, c, g, other or unknown
  misc_feature (793)..(793): "n" may be a, t, c, g, other or unknown
gaaaaacatgcagaacctcttcagccagtggctcccagggagtggcgggacagtaaagccccagaaacgggtgagcccaagactctccccacctaggacagttttctgactttggcatagggaggggaacttaaaaagaggcccatcatcctgcaggtcgagatggacaccagagtccagggaggctaaggtggctggaattcgcatcggaggatgaaggagaggaaggagctaaacagagagaagggccagaacctgcccaggggcgcctggagtctagccgtgttgcagtcggcccgtggaaacttactcctgaggctgggaggctctaaactgaacagctcccaaagatcaggtggggctggaaatcactgaagctgccaccagccaagtaacaggccccactgagtattcggggcgcccagggcattccccgaagggccatgccttaggagtggggctggactcggccaagggtaaagacgctgtcagactcgtcggaaaagtgcttcaagaacaagcttccaaaggtgggaaccagccgggcgcggtggctcacgcctggattcccagcactttgggaggccgaggcaggcagatcgccttcagagcagcctggccaacatggggaaaacccgtctctactaaaaatagaaaaacttagccgggcgcggtagcacacgcctgcggtcccagcttgcttcgggaggcttaagccgggagaatcgcttcgaacccgggangccggaactttgcaaccgaagcccaaaaccgggccaattgcacttncggncttgggcc

SEQ ID NO: 1701 - DNA, 853 bp, Homo sapiens
  misc_feature (728)..(728): "n" may be a, t, c, g, other or unknown
  misc_feature (793)..(793): "n" may be a, t, c, g, other or unknown
  misc_feature (818)..(818): "n" may be a, t, c, g, other or unknown
  misc_feature (845)..(845): "n" may be a, t, c, g, other or unknown
gaaagaaatctggtgcctgggggtccctgtgttcacccctagagtttgttttaaaatttttaattgaagcatgtgaagtgtacgtgcagaaaagtgggaacatgatagtgtatggcttggtggattttcacaaactgaacatacctgtgtaatcagcatctagacccagacccagagcatcacaaatatcccccatcctgggcttttcccagaggagatgggggcttctgaagatggacttacctgggacctgccccccatgagccaggacggtccccccacagtcagcctgtgcaaaggccccgtggccaggggtggaggagaatatgtgggtgtggacaggatgggagactgtggcctgaacaggagattttattatatctggagaccctgagagaccctgagacctggggcaccatggctggccaggtcagaagcatcctgactgcagaggtccgtgcagccacaccctcttccctgccagcaagttgtctgcggctcatcggaggcccctccgcctggagccttctatggacgtgatatgcctgtatctgtttttaattttcattcttcacttaggggaagtgaaatcgctcagagatgagatcctttaattgaaaacgaagtgtaacggaatctagtgtctttctaatgtggtaaaattcttcatcaacatcacagtcagctggcagctgaacttcagaatctcacttacagcaggcgacacnggggtacaccgatgggtcacactgggtctgggggcttcctggacttcttctgcgtgtggtctggntaggaagttgaattgttgcttccanggttattctccttcttgagtcacagtnacacgaat

SEQ ID NO: 1702 - DNA, 828 bp, Homo sapiens
  misc_feature (771)..(771): "n" may be a, t, c, g, other or unknown
  misc_feature (786)..(786): "n" may be a, t, c, g, other or unknown
  misc_feature (798)..(798): "n" may be a, t, c, g, other or unknown
aatcaaacatagacaaatgggattacattgagctaaaaagcttttgcacagcaaagaaaacaatcagcagagtgaagagacaacctacagaattggggagggggaggaatatgcaaactatccatttcataagggattaataaccagattacataaagacatctaacaactcaatagcaaaaagccacaaataatttgatttaaaacagggaaaatgatctgaatagacatttcacaagagaagacatacaaatggccaacaagtgtaggaaaaaatgttcaacatcattaatcgtcagggaaacgaaaaccaaaacctcaatgagatattatctcacctgttaaatggctactttcaaaaacacaaaaagtaataaatgttggcaaggatgtggagaaaggggaccactcatacaccgttgctgggaatataaattagtatagccactatggaaaatagtatggaggtttcccaaaaatctgaaaacacgcctaccatatgatccagcaattccactgctgggtatatacccataagaaaataagtcagtacatcaaagagatttgcattctcatgtttataacagcagtattcacaatggtcaagatatggagtcaatctaaatatttgtcaatggatgactgttaaagaaaatgtgatatgtatacacagtggaatatcattccttcacaaaaaaggaataaaatctgtaatttgcagcaacatgaatggaaatagagtcattatgttaaagtgaaataattcaggcncacaaaggccaagtnttacacgttctnacccaaataggggaactaaatgatctcaag

SEQ ID NO: 1703 - DNA, 719 bp, Homo sapiens
  misc_feature (631)..(631): "n" may be a, t, c, g, other or unknown
  misc_feature (692)..(692): "n" may be a, t, c, g, other or unknown
  misc_feature (719)..(719): "n" may be a, t, c, g, other or unknown
ggctgcccccgccctggacgccttcgtggagcgagtgctggcggccggacggctggggcgggtcgtgcttgctaacgcttcggggtccgccaacgcctcggaccccgcctgggacttcgcctctgctctcttcttcgccagcacgctgatcaccaccatgggctatgggtacacaacgccactgactgatgcgggcaaggccttctccatcgcctttgcgctcctgggcgtgccgaccaccatgctgctgctgaccgcctcagcccagcgcctgtcactgctgctgactcacgtgcccctgtcttggctgagcatgcgttggggctgggacccccggcgggcggcctgctggcacttggtggccctgttgggggtcgtagtgaccgtctgctttctggtgccggctgtgatctttgcccacctcgaggaggcctggagcttcttggatgccttctacttctgctttatctctctgtccaccatcggcctgggcgactacgtgcccggggaggcccctggccagccctaccgggccctctacaaggtgctggtcacagtctacctcttcctgggcctggtggccatggtgctggtgctgcagaccttccgccacgtgtccgaccttcacggncttacggagctcatcctgctgcccccttcgtgccctgccagtttcaatgcggatgaagacnatcgggtggaacatcctgggcccccan

SEQ ID NO: 1704 - DNA, 855 bp, Homo sapiens
  misc_feature (677)..(677): "n" may be a, t, c, g, other or unknown
  misc_feature (736)..(736): "n" may be a, t, c, g, other or unknown
  misc_feature (818)..(818): "n" may be a, t, c, g, other or unknown
gcggccgccctggcttccttctacctgtgcggccctcaacgtctccttggtgcgggacccgcttcactttcggctcccggagtctccctctactgctcagacctctggacctgacaggagacgcctacttggctctgacgcggcgccccagcccggctgtgtccccggcgccccggaccaccctccctgccggctttgggtgcgttgtggggtcccgaggattcgcgagatttgttgaaagacattcaagattacgaagtttagatgaccaaaatggatatccgaggtgctgtggatgctgctgtccccaccaatattattgctgccaaggctgcagaagttcgtgcaaacaaagtcaactggcaatcctatcttcagggacagatgatttctgctgaagattgtgagtttattcagaggtttgaaatgaaacgaagccctgaagagaagcaagagatgcttcaaactgaaggcagccagtgtgctaaaacatttataaatctgatgactcatatctgcaaagaacagaccgttcagtatatactaactatggtggatgatatgctgcaggaaaatcatcagcgtgttagcattttctttgactatgcaagatgtagcaagaacactgcgtggccctactttctgccaatgttgaatcgccaggatcccttcactgncatatggcagcaagaattattgccaagttagcagcttggggaaaagaactgatggaaangcagtgacttaaattactatttcaattggataaaaactcagctgagttcacagaaactgcgtggtaacggtgttgctgttgnaacaggacagttttttaagtgatagttcgcaatatgg

SEQ ID NO: 1705 - DNA, 781 bp, Homo sapiens
  misc_feature (720)..(720): "n" may be a, t, c, g, other or unknown
  misc_feature (752)..(752): "n" may be a, t, c, g, other or unknown
  misc_feature (775)..(775): "n" may be a, t, c, g, other or unknown
ttttcatgcttccatagaatcatccctgacctcaggaaaaaatacaaaaatggaacaaacaaaacagaatagtaaaacctgaagtaagaaaaaaagaaatgaatttgacattgtacagatcaggagaaagaaagttcattaacagtttcaagatccctgcgttttcacccagcaggaaacaaattaccatgagttaaggtggggaaattactggcaattcattgccttcttttaaagactttaaaaaaaaatgagtaaataattttagactattaccccctttccatgagagatacacagctagttaaactgccatgcatattaattttttgttttcattttattccacctaccaactacacagtgtctgctttccaaaattagtttgaaagccaatgacctgtgtttgaactgggtgaaatagcatagcagttcacacctggaataaaagaatgattgtgtgtgagtctgttaatggctgtgtagagctatatctctatatggagctatataaaaatatattttatacatgccagattcatttagacttgaattgaccctgtggtaaagcagcaggaataaaatatttttttgataaagcactcactcaaatagagaaatgagctcttgcagttaccatttaatctgtgacttctttttgagatgcagaaaaactccattataaagtgctcagttcatccagggacacagacacactgngggttataacacaccctcatctgcatggtgangtcatgagtcagctgctcttctntcaaga

SEQ ID NO: 1706 - DNA, 817 bp, Homo sapiens
  misc_feature (750)..(750): "n" may be a, t, c, g, other or unknown
  misc_feature (756)..(756): "n" may be a, t, c, g, other or unknown
  misc_feature (799)..(799): "n" may be a, t, c, g, other or unknown
gtgctaagaaaactgccccacatcatctgcagtaggacgggggagttggagccctggtcaggccactctgctactgaccacagttttctcatctctaaaaaggcgcagtaacaatataattaccgtatgcagtcccccaggatacagggtcaaaggagagcacaaccatcgcagttggaagcccatggggcagcccagtgcagatgcatctgacttacgaaacttcagtgacacctgctctgtgccagacactgaagatggagcagtgaacagcactgacccagcctgtcctcctgttgcctgcaggccagacggagtctcactctgtcaccaggctggagtacagtggtgtgatctcggctcactgcaacctccgcctcccaggttcaagcgattctcctgcctcagcctctcaagtagctgagattacagacgtgtgtcaccatgccctgttaatttttgtttgtttgttttgttttttgttttgttttgtttcgttttttgtttttttttttgagacggagtcttgctctgtcgcccaggctggagtgcagtggccccgatctcggctcaccgcaagctccgcctcgcgggttcatgccattctccggcctcagcctcccgagtagctgggactacaggcatccgccaccacacccagctaattttttgtattttttttagtagagacggggtttcactgtgttagccaggatggtctcgatcccctgacttgtgatccaccaaggnctcggncttccaaagtgctgggattacaggcatgagccacgtgcccggncaatttttatattttttg

SEQ ID NO: 1707 - DNA, 852 bp, Homo sapiens
  misc_feature (769)..(769): "n" may be a, t, c, g, other or unknown
  misc_feature (806)..(806): "n" may be a, t, c, g, other or unknown
  misc_feature (852)..(852): "n" may be a, t, c, g, other or unknown
aatgtgaatggtagagatggaaagagcaggcaaagataagaacctggtggagaatgtagaagtagaattgagagagagctagaaggagcaatgttaggattgacattgtcactccggtttctctgagaccacgtttgacattgttgtattcacataataaccatctgtttacctaagctactttgagtgaattctattcctgtaaccaaaaaaagtcttcatgagaacaccccattttacaatataatcctgtgtgcataactatgacttgagatctatttctacactgaaatctgcaatatgagattgttctaaggaaagcctctaaataaccaaaaagactagacaaccttcagtattagggtttaataaaaatagttagcattctgatatgggaaatgtattccagatggaatgttattaaggcttatcagtctagagtaaacatggatgtgtacaccaaattcttcagtatcagaaccagatggcactcaaaaaggtttaatttcattcaaataagcaatgccactttaccaactagaaaggggataaatgaaactcattacctcagtgtatggcttaggactcagataaatgcatgtgagagagatccttaataggtgattgagataaattagggaaatttaagaaatcttcttatacctttaagggagactagtgagaaagattttgctgtctaacaaaacattttcttgatgttagtattcgattccacaataagcggtatcttttattctagtgttctccnccggtagtaggtatgaatttgccctgtgactctcagnggcttggtacattcttcttatgaatcagattattttctcaagagcn

SEQ ID NO: 1708 - DNA, 635 bp, Homo sapiens
  misc_feature (583)..(583): "n" may be a, t, c, g, other or unknown
  misc_feature (594)..(594): "n" may be a, t, c, g, other or unknown
  misc_feature (633)..(633): "n" may be a, t, c, g, other or unknown
ttttcctaatctggtttcgtctgcttggttcatctgtgtgcgatggctccggactcggatcccttccctgaagggccgctcttaaagctgctacccttagacgctagagaccggggcacccagcgctgccgcctgggcccggccgccctccacgccctgggcgcgcgcttgggctcggcagtgaagatctcgctacccgacggcggctcctgcctctgcactgcctggcctcggcgggacggagcggacggctttgtgcagctggacccgctgtgcgcgagccccggggcggcggtcggggcgtcgagatcccggaggagtctcagcctgaatcgcctcctcctagtgccctgtccgcccctgcggcgcgtcgccgtgtggccggtgttgcgagagcgggcaggcgcgcccggtgcccggaatacagccgcggtgctggaggcggcacaggagctgctgagaaaccgaccgatctccctgggccacgtggtggtcgctccgccaggcgctcctggcctggtggctgccttgcacatcgtcggcgggacgcccagtcccgatcccgctgggctggtcacccctngtacccgcgtnagccttggcggggagccttccgtcggaaagcccaaccgnaa

SEQ ID NO: 1709 - DNA, 851 bp, Homo sapiens
  misc_feature (728)..(728): "n" may be a, t, c, g, other or unknown
  misc_feature (777)..(777): "n" may be a, t, c, g, other or unknown
  misc_feature (814)..(814): "n" may be a, t, c, g, other or unknown
  misc_feature (836)..(836): "n" may be a, t, c, g, other or unknown
gtttatgcttcctgtattttgaggcactgttattagatgcagaaacatttacagttttgtcctcttgattatttgacccctttatcattctgaaataacctttatttctggtaataatcattatattaaaaaccattatttggccagacatggtggctcatgcctgtggtcccagcactttgggaggccgaggcgggtggatcgcctgaggtcaggagttcgagtccagactggacaacgtggcgaaaccccatctctactaaaaagagaaaaatagcctagtgtggtggcacacgtctgtagtcccagctactcagaaggttaagtcaagataatcacttgaatccgggagttggatattgcagtgagccgagatcacgccactgcaccccagcctgggaagcagagcaagactccatctcaaaagaaaaaaaaaaaaaaaaaaacaaaacaggcctggtgcagtggctcatgcctgtaaacccagcactttggaaggccgaggcaggtgaatcacctgaggtcgggagttcgagaccagcctggctaagatggtgaaaccccgtctctactaaaaatacaaaaattagccaggcacggtggcagctgcctgtaatcccaagtacttgggaggctgaggccagagaattgcttgaagctgggaggcagaggctgcagtaagccaagatcatgccattgcactctagcctgggtaacagacaagactncatctcgggaaaaaaaaaaaaaattacttaatattaatataaaattagngttttatattagtagtataatactggttttgactagngttaaaatgacatatctttctntaccctttgctttaa

SEQ ID NO: 1710 - DNA, 775 bp, Homo sapiens
  misc_feature (614)..(614): "n" may be a, t, c, g, other or unknown
  misc_feature (651)..(651): "n" may be a, t, c, g, other or unknown
  misc_feature (694)..(694): "n" may be a, t, c, g, other or unknown
  misc_feature (730)..(730): "n" may be a, t, c, g, other or unknown
  misc_feature (774)..(774): "n" may be a, t, c, g, other or unknown
gatgagcaagtggtggggacgcccctgctggtgaaatctggcgtggagtatacacggcttgcagtggagacagcccagggccttgatgggcacagccatcttgtcatgtacctgggaaccaccacagggtcgctccacaaggctgtggtaagtggggacagcagtgctcatctggtggaagagattcagctgttccctgaccctgaacctgttcgcaacctgcagctggcccccacccagggtgcagtgtttgtaggcttctcaggaggtgtctggagggtgccccgagccaactgtagtgtctatgagagctgtgtggactgtgtccttgcccgggacccccactgtgcctgggaccctgagtcccgaacctgttgcctcctgtctgcccccaacctgaactcctggaagcaggacatggagcgggggaacccagagtgggcatgtgccagtggccccatgagcaggagccttcggcctcagagccgcccgcaaatcattaaagaagtcctggctgtccctaactccatcctggagctcccctgcccccacctgtcagccttggcctcttattattggagtcatggcccagcagcagtcccagaagcctcttncactgtctacaatggctccctcttgctgatagtgcangatggaatttggggggtctctaccaatgcttgggcaacttganaatggcttttcataccctgggatcttctactgggtnggacaagcaggaaccagaccctggccctggatccttgaactggna

SEQ ID NO: 1711 - DNA, 816 bp, Homo sapiens
  misc_feature (747)..(747): "n" may be a, t, c, g, other or unknown
  misc_feature (772)..(772): "n" may be a, t, c, g, other or unknown
  misc_feature (792)..(792): "n" may be a, t, c, g, other or unknown
ccagctcggagcaggcctcagactgtaacatgatgtttcaggtttacggtgtgagactttgtcagtgtgaaccttgagcagtttggactcaaattgtagcctcatccactgaggcatgtttgtaattagggtctggcttactcagggctttctctggaagttaacaagaactacagagtcagaaaattctgccaggagaaaagtgatgtttaaaaaatcatctaggatggccgggtgtggtggctcatgcttgtaatcccagcactttgggaggctgaggtgggaggatcacattagcccaagagtttgaggctgcagtgagccatgatcacaccactgcactccagcttgggtgacagagtgagaccctgtctcttaaataattaaaatttaaaaattaaaaaaaaaattccctatgagagaaagtacatggactttggggaaggatctgaagtttagccaggttgggacaatttggaccgaatcatttaacttaaccctgctattttcctcaactgtgcttagaaaaggggtacaggacctgatttctgtccttaagaggtttatagtccagctacaccttagcctgggggcagagtttctcaaccttagcactattgacaacttaggcaggataattcttacagtggggggtgtcctgtgtgttgtagcattggcagcacccgttggtctctacccagtagatgccagttgccccttcccagttttaacaggcaaaactgtttncagacacttgccaactcttgtgcangcaggaaggggcaagttttnccctgatggaaaaccactggccca

SEQ ID NO: 1712 - DNA, 703 bp, Homo sapiens
  misc_feature (624)..(624): "n" may be a, t, c, g, other or unknown
  misc_feature (670)..(670): "n" may be a, t, c, g, other or unknown
  misc_feature (695)..(695): "n" may be a, t, c, g, other or unknown
ctcccgtgggctccggccggctaagccgcggcggacaactatgctgaaagccaagatcctcttcgtggggccttgcgagagtggaaaaactgttttggccaactttctgacagaatcttctgacatcactgaatacagcccaacccaaggagtgaggatcctagaatttgagaacccgcatgttaccagcaacaacaaaggcacgggctgtgaattcgagctatgggactgtggtggcgatgctaagtttgagtcctgctggccggccctgatgaaggatgctcatggagtggtgatcgtcttcaatgctgacatcccaagccaccggaaggaaatggagatgtggtattcctgctttgtccaacagccgtccttacaggacacacagtgtatgctaattgcacaccacaaaccaggctctggagatgataaaggaagcctgtctttgtcgccacccttgaacaagctgaagctggtgcactcaaacctggaagatgaccctgaggagatccggatggaattcataaagtatttaaaaagcataatcaactccatgtctgagagcagagacagggaggagatgtcaattatgacctagccagccttacctgggactgccacatncccagtgaaatcagcatgtttctcggtgcagatctgaaatcacatncagcttctgatggtttcttctcctntgactgca

SEQ ID NO: 1713 - DNA, 747 bp, Homo sapiens
  misc_feature (685)..(685): "n" may be a, t, c, g, other or unknown
  misc_feature (731)..(731): "n" may be a, t, c, g, other or unknown
  misc_feature (736)..(736): "n" may be a, t, c, g, other or unknown
gatcagaagaattaatattgttaaaacgaccatcctgccgaaagcagtgtacagattcaatgcaattcctatcaaaataccaacatcatttttcacagaattagaaaaaacagtcctaaaattcatatgggaccaaaaaaataaaaaataaaaaagcaaagcctaagcaaaacaaaacaacaacaaccaaaaacaaagctgcaggcatcacatttcctgacttcgaactatactgtaagactacagtaactaaaacaacagggtacttgtataaaaatagatacatagatcaatgaaacagaatagagaacccagaaataaagccatatatctacggagtgccagctgatctttgaaaaagttaacaaaaacatgctctgcgtattctgagatgttctcaggagtatatgttagtccttctccacatacctgttttccaggttggtcttgaactcctgggtgcaagcgatttacccagcttgacttcccaaagtggtaggattacaggcacgagccatcatgcctagctaggctaccttttaaatatatatcatggccaatttttgtttattctgattatttattagttcctttttgatgtctggaagaacttattttctagccagacagactcttatatcaaatatcaaatttccagccttccaaatgggttttcctaccttgnctcaagccaaagcaaaacaaacccccaccccacaaaagaaaaacanaacanaacaaaaactt

SEQ ID NO: 1714 - DNA, 843 bp, Homo sapiens
  misc_feature (702)..(702): "n" may be a, t, c, g, other or unknown
  misc_feature (773)..(773): "n" may be a, t, c, g, other or unknown
  misc_feature (813)..(813): "n" may be a, t, c, g, other or unknown
  misc_feature (840)..(840): "n" may be a, t, c, g, other or unknown
cttttctctcgttaatctgttttttgtcatgggggtattggccatggaccttggaatgggtgaggaaaaggtactacacctctttgccctacaaaagcaggctggcaagtaggatggcccagcacctattgcatgccaagtgtcttcactcaggcagttccatccgtgtctaaacaacctcgcacttttcacttccccactttggggatgaggaagctgagactcaaaggggcagattattcgtcttagatcactcagctggcaaatggaagaaatagtgtttgaaaccacaatctgttgcagcctcccagatgggtacctgcccaccagaaggtcttatgcctagtgttccattattggaatgctaagcaggtgggagttatttatatcctgcggctcaaggtcatcaccaaggcctgatttttcacacacgtctgcaattcaaattgtaacctctgggccgggcacagtgactcctgcctgtaatcccagcactttagaaggctgaggcaggtggatcatttgaggtcaggagtttgagaccagcctggtcaacatggtgaaaccctgtccctactaaaaatacagaaattagctgggcatggcagcctgtaatcccagctacttgggaggctgaggtgggagaatcacttgagcctgcaggcggaggttgcagtgagctgagaccacgccactgccctnctgtgtgggcatcagagtgagaccctgcctaaaaaaaaaaaaaaaaagtacctcttaagctctctccttancttctgggaaaaatgagtaggggaactcattcacacttanaatctaatatagggtaataatatcctnttt

SEQ ID NO: 1715 - DNA, 840 bp, Homo sapiens
  misc_feature (806)..(806): "n" may be a, t, c, g, other or unknown
ttgagcaagtggcatgtaaactgagagtgaaataatgagaaggagccagtcatgagaaagtggaaaaaagagctttccagcgtagggaaagcatataagaaggccctgatatggagcagagctgaacatattggaggaactgaaaggaaggaagtggctggtatgtgctgggcatgagggaacacaaaataagtgaagatggaaggaacatggagccagaaaataaaattcgttgtggactgtgtatattagggttccctagagggacagaactaatggaatatacatacaggggagttgatcaagtattaactcacatgatcacaaggtcccacaataggctgtatgcaagctgaggagcaaggaaggtagtctgcaccaaaactgaagaacttggagtccgatgtttgagggcaggaaacatccagcatgggagaaagacgtaggctgggaggctaggccagtctctcatttcacatttttctgcctgcttatattctagccgagctggcagctgatcagattgtgccaacccagagtaagggtgggtctgcctttcccagcccactgactcaaatgttaatctcctttggcaacacacccacagacacacccaggatcaatactttgtatccttcaatccaatcaagttgacactcattattaaccatcacactgtataagaggttataaagccagtaaaagggtaagtggcattttaatttaattaaattgatcagtttatttattttgagatggtgtctgaccctgcacctaggctggagtatctggtacagttgtagctnacttgtacctccacttctgggttcaaggatcctc

SEQ ID NO: 1716 - DNA, 840 bp, Homo sapiens
  misc_feature (744)..(744): "n" may be a, t, c, g, other or unknown
  misc_feature (795)..(795): "n" may be a, t, c, g, other or unknown
  misc_feature (805)..(805): "n" may be a, t, c, g, other or unknown
catatttgtattgacaaagggacttttgatgccataagccttaatcctgacaatgcaattgagaagaggaagcaatatgtgaaatctctctccagggtgttgaaagtaaaaggcttttttctaataacgtcatgtaattggaccaaggaagagttgctaaatgaattcagtgaaggttggagtacagtggcaggattttggctcactgcagccttgacttcctgggctcaagcgatcttttccacttcagcctcccgagtaggtggaactacaggcacacatcatcatgcctggataatttttgtatttttagcagagacgaggttttgccatgttgtccaggctggtctggaactcctgggctcaagtgattctcccacctggcctcccaaagtgctgggattataccatgccaggccctcgttggcattttagatttgaacttctcgaagagctaccaacacccaagttcagctttggaggcagatctggaaacagtgtagcagcattggttttccaaaaaatgtgagactttttcttggacgaattcaggtagctacacagaatctacacagcaaagttaacctgacacagaaaatccttgtgcaaataaatgcttagtaagtacacaggatgcacatgttgaatagagtatactggattggtgaaagaaaataataataatgagcatctaagtgggtgggttttagagatcaatcaagaataattttaattttcttttgnatttgaaatgtaaataggtttcttttcgattaaaaaaatttcctatactgnttaacagttnaaaactttaaagtagtaaatgagttattggaaagc

SEQ ID NO: 1717 - DNA, 749 bp, Homo sapiens
  misc_feature (659)..(659): "n" may be a, t, c, g, other or unknown
  misc_feature (680)..(680): "n" may be a, t, c, g, other or unknown
  misc_feature (743)..(743): "n" may be a, t, c, g, other or unknown
aactttacgcgtagggtagacatggagagttagcatttcatatagccttaggacagagtttgttcatccctattttgatggcacggctactttatcttactgtgtttcctctgtgtccaagtatttattaatattttttaagattttcaagtcaaaatggcaatttgagtatatgtatgtagcctgacttcagaatcgggagagacttttcaaccttgagctacccactggcagcgtgagagaaggtgataggatgtcataggctcagcttacacaagtaagcatgcacaagtgtgtaaataggcaaaaacccctttccagattgcaacatttttcccagtcctgagttcagccctttctcaccaacataacaatctatatttcttttaacttttattttaggtttgggggtacatgtgaaggtttgttacataggtaaacatgtgtcatgggggcttgttgtacagattatttcatcacccaggtattaagcccagtacccaatagttatctcttttgctcctctccctcctcctaccttccccactcacgtagactccagtgtctgttgtttctgtctttgtgttcataagttcttattatttagctcccacttgtaagtgagaacatgcagtatttggttttctgtcctgctttantttgctaaggataatggcctncagcttcatccatgttcctgcaaaagacatgatctcattcttttttatggctgcatagtattnccatgg

SEQ ID NO: 1718 - DNA, 839 bp, Homo sapiens
  misc_feature (745)..(745): "n" may be a, t, c, g, other or unknown
  misc_feature (795)..(795): "n" may be a, t, c, g, other or unknown
  misc_feature (806)..(806): "n" may be a, t, c, g, other or unknown
ttattcaaacaacacgtgccatccttcaacaccccaacccacctcccgtgccccctctatgcctcacagcacctgccctggagtagctgacttactgccgttactgtctcctccaaggagtggaagctccgtgagaccagatattttgctggttttgttcactcaagtgcctagaactgtgctgagtacaaaacagatgctcccaaactacgagtaccagtgcatgctcaggagaacaaatgagcaaaccaacggtgaatgtctactatgtgccacacgtcactgctacgcactgtgagggactgagaaggtctgcctgcaggaagttcacgttctagtatggaagggaaaatgagtgcaagggcaggtgcggcagctcacacctgtaaacccagcactttgggagactgaggagggcaaatcacttgagctcaggagtttgagaccagcctgagcaacatagcaaaaccctgtctctacaaaaaatacaaaaattagctgggtgtagtggcgggtgcctgtagtcccagtactcaggaggctgaggcaggaagatcgcttaagcctaggagacggaggctgtagtgagctgagatggtgccactgcactccagatgagtacagaagaagagcaaatgtgctaaacaccaaaccatttccaaaaataccccagtgtttcagaacacacaaaccatgctctacttcacccccaaagtaccattcagccttctgtcccacgagtgtncagccccgccaagtcctgacacccaggacttcccatgcctttgggtcccnagttgtgcttnttggggaccagagatgtcaatgctgccagcaca

SEQ ID NO: 1719 - DNA, 844 bp, Homo sapiens
  misc_feature (832)..(832): "n" may be a, t, c, g, other or unknown
  misc_feature (834)..(834): "n" may be a, t, c, g, other or unknown
aacatgctgttaatacttgtaagactcctagcaaactgcatttaattttttaaattagttttagtgtacataaaggcatgtcttttccaaatactgtactttttgaagtgttctttgttgttcattaatctttgtgcgtttccctccagtctctaatagtaggttgtagcatgatttgcttccatcgtgtgaattctgttcggttttgattttcaagtatgagagtgagcgtaagctacccttataggttacctaaggtaagttagaattagaacgtctttatgctagggttactactccccaccataaccaaccatctgcaaaagcgttcagaaagaacatgctagcaaggtcaaaagcttcaaatcacgaaataagaacttgaaaacgagcaaaattgctgctgaggcgctctgccatttaactcaaaggcttcactttatttaggtttaaagtatgagtgcatattcagtggacattgagctccgaactgttcaaaatctctattcatctgcattctggagtagagctgcgggtcacattattagctccatctttggatttctgcctggacccagggcactcctaaccgttgtgggatcatataacaatcttacaggatgaattttctgttagtccaagcagaaattttggcacatgaaaactatcttaccataaacaaacaaaaaaagtacaaatggtaatctaaggaaaatagctaaaatcattaaacaactcttacagccgtttcccctggtttctctccattttttaaaagcatattttcctttactttcttccttctgctatgggaatttttcagggtctagancntttttctctt

SEQ ID NO: 1720 - DNA, 817 bp, Homo sapiens
  misc_feature (674)..(674): "n" may be a, t, c, g, other or unknown
  misc_feature (780)..(780): "n" may be a, t, c, g, other or unknown
  misc_feature (786)..(786): "n" may be a, t, c, g, other or unknown
  misc_feature (793)..(793): "n" may be a, t, c, g, other or unknown
gctgtttccctgtgggtcgggttggactgacttttgacagtcagccttcggctgcggagggggctcggcggcggccggcggagaaagttgctccgagaagaggctgggtcgagctgggccgagccgggcgcgcagggcgggcgtcgcgggcgtcccgggcggacgcggcgcggagactgccggcgcgtcccgggggttccgatttgaagaccttgcttctcatcacccactggattatgccccaggctttcctacccaatgatcctcttgcaacacgccgtgcttcctccacctaagcagccctcaccctcgcctcctatgtcagtggccaccaggtctacaggaaccttgcagcttccaccacagaagccttttgggcaggaggcttccttgcctcttgcaggggaagaagagttatcgaagggaggggagcaagactgtgccctggaggagctatgtaagcccctgtactgcaaactctgcaatgtcaccttgaactctgcacagcaagcccaggctcattatcagggtaaaaatcatggtaagaaactccgaaattactatgcagcaaatagctgtcctcctcctgctagaatgagcaatgtggtcgagcctgcagctactccagttgttccagtcccttcgcagatgggctcctttaagccaggaggccnagtgatcctggccacggagaatgattactgtaagctcttgtgatgccttcttcagttccccagctgtggctcaagctcactatcaagggaagaatcatgccaagangcttcngctggcngaagcttaaagtaacttcattctt

SEQ ID NO: 1721 - DNA, 834 bp, Homo sapiens
  misc_feature (754)..(754): "n" may be a, t, c, g, other or unknown
  misc_feature (814)..(814): "n" may be a, t, c, g, other or unknown
  misc_feature (825)..(825): "n" may be a, t, c, g, other or unknown
ttccacctgacagcaatcgagtgaactacgtctactgcaggctccaaaaagtcaggttagaacccagatgagtctgatttcacagcctgagcacctaatgtcactctgacactctgcccgccacggccctatgttgttcctggcctggccagaacctgctcatgatggcctcacatcttgcttatggaccatcctagcagtttctcatctgcgagtgactggattcatcctgcagtcagcatcctgctcacccactcctgagtggccacctaccacaagtgggaggaagtacagctcctcgtttggctccttgggcctcccagatctgtcctgactttccatcctaatcactcccagttgtcctgactgtactgtctccacagccttcccatggtgccgaagtcagagctgactttgtacagcctttgctcataccctgttctgatccttccctctgacgtcctccactgcaacccagcccagttccaacttacttgcatagagctcccataagcattcagcccatagaacccggacatctctcccttcctctggacttaactgcattgatctctttcagttatctatactctgcataaacttccttgtggcatactttacactggtgttttgtttaactgaggtactgtggataacaccaaaaccttcttgcataggtgtggaaaaggccttttgtgaactggtccctgtctggctttacatagaacaaggctacttaacttcgctaaacttnagtttctcatctgtaaaatggggaagaataatagtatctaccacatagggtggttttgangggattaatgncttaaatta

SEQ ID NO: 1722 - DNA, 797 bp, Homo sapiens
  misc_feature (607)..(607): "n" may be a, t, c, g, other or unknown
  misc_feature (753)..(753): "n" may be a, t, c, g, other or unknown
  misc_feature (765)..(765): "n" may be a, t, c, g, other or unknown
  misc_feature (795)..(795): "n" may be a, t, c, g, other or unknown
atttttgagacagtgtcttgctctgtcacccaggctggagcgcagtggtgcgatcttggctcactgcatcctccgcctccccggttcaagtgattctcctgcctcagcctcccgagtagctgggattacaggcatgcaccaccacacccagctaatttttgtgtttttggtagagacggggtttcaccacgttggccaggctggtcttgaactcctgacctcaggcgatctgctggccttggcctcctaaagtgctgggattacaggcgtgagctactgcgcctggccttcagtggcattctagaatgttctattgaagttactatgtcagtgcttggatttcttactgtcttccccattagaacgtagtatgtagtgaagaattaaagccaaacataaacatttctagttttgtttttgtttttttccaactttaattatataggctagctggaagagtgagttaatttaacttgttaatttctgaagtgagattgcaacaacccatgaaatgctctgggtttttctaaaaaaaaaaaaaaaaaaatcattcctgtggacgttctaccctcacttctattatttttcttatataatgtgaatttgngcatctcttgaaaaaaaaaaaaacctgctgtaattttttaaagctctccagaaagagagtccatggaaagaaaccaaacctggactgtgttgagttgatagacttaacaggtgacactggtaaatgctactggggtgaattcttgngggccactgatncaatttgagtcaaagaagtctttgacactntt

SEQ ID NO: 1723 - DNA, 742 bp, Homo sapiens
  misc_feature (652)..(652): "n" may be a, t, c, g, other or unknown
  misc_feature (707)..(707): "n" may be a, t, c, g, other or unknown
  misc_feature (731)..(731): "n" may be a, t, c, g, other or unknown
gcttccggcacgggatgttttcggttgtttgaccgagagagttgtaggcgcaaagctgaggaaaggagagtgtggagaggggcctggtgtggtggggcccggtgtttgggaccggagggtgttgacggctgatgagttccttgggtttgctctttcttcacctgaaaagaagactccaggaagggcagcacatgccggagaaagatgaattgcagcttgaccgcccagaggcgcggcagtgacgccgagttgggaccctgggtgatggctgcgaggtccaaggacgcggcgccgtcccaacgcgacggacttttgcccgtgaaagtggaggaagactcacccggaagttgggagcccaactatcccgcggcttcgccggaccccgaaacttctcgactgcactttaggcagctgcgttaccaggaggtggctggaccggaagaggcgctgagccggctccgagaactctgtcgtcggtggctgagacccgagctgctctccaaggagcagatcctggagctgctggtgctggagcagttcctcaccatcctgcccgaggagcttcaagcctgggtgcgagagcactgcccagagagcggggaggagcggtggcccgtggtgcggctctgcaacgagcgctcgatggaacctnatcccaagggatggtgactttcgaggacacgcttgtgtctctaacctgggaggantgggacccctgacccagcacgganggacttttgca

SEQ ID NO: 1724 - DNA, 486 bp, Homo sapiens
  misc_feature (389)..(389): "n" may be a, t, c, g, other or unknown
  misc_feature (410)..(410): "n" may be a, t, c, g, other or unknown
  misc_feature (429)..(429): "n" may be a, t, c, g, other or unknown
agttctccttagttttttaacctatttgcaatagttgctttgaagtctttatcttctagctccaacatctggggtcacttggggatattttctatttattgttttgtggggttttttttgtgttttttttttaatccccctgagctgtggtgttctatcttgtttctttgtatgtgtacacatttcttttgtaaataacatatatatattttagacagagtctcactctgttgcccatgctagtatgtagtggtgcgatcttgattcactatagcctcgacatcctgaactcaagcaatcccctcacctcagaccccagactagctgggactacagctccgcactaccatgctcacctaatttttgtattttttgtagagatgggattncaccatgttgcccaggctggnctcaatccacttgcctcancctcccaaagtcctgggattacaggaatgagccactgcagctggccaaaacatacat

SEQ ID NO: 1725 - DNA, 827 bp, Homo sapiens
  misc_feature (786)..(786): "n" may be a, t, c, g, other or unknown
  misc_feature (793)..(793): "n" may be a, t, c, g, other or unknown
  misc_feature (812)..(812): "n" may be a, t, c, g, other or unknown
tagaaccagactagagaatatgatgcaggttcactggctttatggtctttctaatgctccctgccctgcatccacgccatggaagaaccagacaaggggaactgggagcctggaaaccagacacacttacccagggccaaggccactgccgccctctgataggggcagacagaacagaaagagaaatcccatctgtgatgtttgcaggagagtaactgagttgagaaatggtccgtgagtggctgtcacctgccaatcaggcctttagtccactttcaggggggaagagaaggaaggtgggatggtaataggtccagagcgtttatgtaaagaccctttctcgtggaaagaaaatgtgtgagaggtaagaatccccctttcacatttaagaaagttgccaagaatttaataagcactcactttgtgtatcagtgctcttcatgcattcattcaataaatcaccaactatctattgatcacctgttttgtacccggttctcttctcaggctcttgggttcaaaacagaaagagattccttctctcatggaacttacatttttggactgaggagagacagacagtaagcaataatcatgataagtaaggaaatcatagactatgctagaaagcggtcattgttatagaaaaacaatagtaaccttagactcgagggaagtgggaggagtgagccatggggctttctggggaaagagcattccaggcagagcgacagctggtgcaaagaccctaaggcaggagcgtgcctgaagggtgtgagaaaagcnaggagtncgatgtgtgcacagaaaanggcatgcattctgga

SEQ ID NO: 1726 - DNA, 836 bp, Homo sapiens
  misc_feature (738)..(738): "n" may be a, t, c, g, other or unknown
  misc_feature (754)..(754): "n" may be a, t, c, g, other or unknown
  misc_feature (783)..(783): "n" may be a, t, c, g, other or unknown
gaatgtgagtatagaagacgagtccaggcaccaggagcataatagcggtcagagaaccaagtccaggaccccaggcagattagctagagttcaggcagggtgtcagcgccagtggggaagaaagaaaccaaggagctggaataccgtctgtaagttgagacagaaggatagccatatggcctggaaaaagatgacaagtttgaggaaatagtttgcatgtcagagggaacactcgagggaccctggccagagggagggatatatccagacaccccatgtctgagtcaggataggctcaaaggttgcccagcactggacatcttcaaagatttttattactgtttattgcgtcaggtgaaatcaacaacagctaagaaaaaggagaaacacattacaatgtaactagtataaacagtggaaaatcactgtggtttgaagaaacaagtttaactaaagaaatctgaggtctgtgtctcctaaagagaggtgactgtggaacagtaacacagaatatcagatttcaatcttcatgtttctccttttgatgggcacacaatccaaattcgagattttaaggtcctgcacaatttcgtttcacccacgtgtccttccttattccccggcccctttcatgagacgtgctcccttcctcctccagtgccttaatgcagcttctccagcttccgcagctctttactccaatcccagccatctgggctcacttcagatcacaccttnccttatggagatgacnaaatctgctctactgtaatgatgctggcnaagcttaattggtcttcacttattcatggctgttggtttatcttcccacttaa

SEQ ID NO: 1727 - DNA, 696 bp, Homo sapiens
  misc_feature (627)..(627): "n" may be a, t, c, g, other or unknown
  misc_feature (669)..(669): "n" may be a, t, c, g, other or unknown
  misc_feature (674)..(674): "n" may be a, t, c, g, other or unknown
ctcagtgttaagaggtggcgacttgctcaggcttctaaaggacaggtgtttgggagcctcttgccggaagcctgctgtgggggccctctgtccctgctcctcgccggcccccatccccaagggtgcagcagaagccaggttttccctgtccctgtccgggctgtctctgttccttctattttgctgattttcagaaaaactagatccggcacctttgtggtgcacagtccccaccagcgggaaccagtaggtgacaggctccattcaacaggacaggcaggttagggacacccctggctggcagcagccgttcctgctcctacccagccccggttactccttctgggacctcaggcaagtgacttcgcctcccctcactggtctcccctgtgaacaggggctccagctgttcttcctgcacaggccatcgagccagtaaaatgaacttggcacccagcgcatccatacggagggtcttggagaacaacttctcttcggaccttagagtttctaaggtgattctagaattccatgccggcaagtttggcaaactgcagcttcagggaatagcccctacaagactaccctcactgcagaccaagaactgcacaccagaaacaagctcangcatccctaggaccacccttacgtctgagcaatgggctacangtttnggggtccttacattcaccctta

SEQ ID NO: 1728 - DNA, 727 bp, Homo sapiens
  misc_feature (682)..(682): "n" may be a, t, c, g, other or unknown
  misc_feature (687)..(687): "n" may be a, t, c, g, other or unknown
  misc_feature (694)..(694): "n" may be a, t, c, g, other or unknown
aacagattgctaacccacccccagattttcagattttattttatttatttatttatttttttatctgactgattttcagattttaaaaatctatccctagattttctggggtagagtttgaaaatttgtgtttctaacaagctcccagatgacgctgctgctactgcttcagggaccacatttcaagaaccattgatataactctaaaccattcttgtcttcttcctatgtattttccacatcagtcaaagtgatcttttcaaaccataaatctggtcattctactgcatagttttgaaatccattgtcttcccattgcttttaggacaagtcaaaatcctagaagtccctacacagtcccctcctagcctactcgttcagtgacatctcacactaatgctgcccctaccctcaacccactcttcgctgcaccagccaccatggtcacctttcagttcctcaaatttatcaagctccacccttccccaaggtctttccacatactgtttcttccaccaagatgttctccctacccccaagccctccctgaccacaattttgctcggttaattcctacttctcctccttgtgcaatgcgggattggttattaggatcttaacttaaatgtcactttcctaaggaagccttttctaactgcctcagccaagacagatgtctctnggttnctaactngagcccttaaatatacccttgggttaaaggata

SEQ ID NO: 1729 - DNA, 787 bp, Homo sapiens
  misc_feature (662)..(662): "n" may be a, t, c, g, other or unknown
  misc_feature (777)..(777): "n" may be a, t, c, g, other or unknown
  misc_feature (779)..(779): "n" may be a, t, c, g, other or unknown
  misc_feature (787)..(787): "n" may be a, t, c, g, other or unknown
gtgtgattggctgttgccatggatacgctttgtgtagcggctatgggcgctgtcttacaacaaagccaaggaatctcgctgctgagggttctgtgctttattatgaagaataatggacgatgatgatgcaaagctcaaagcagaaatagaagctgaattggataaactcagcatttcctccttggaaaaagaagacaatgagagtgatgcaaaatcagaaacccagagtgatgatagtgatacagattcagttgaattaccagaatcagttcttcactgtattaacatcataaagaacaggagtaaagctgttgaagagctcattcttcaggacctggaagatactgatattttaagctatagttatggagcagtttctaataatcatatgcatttaagaacaggactatcaactgaatatgaagaaagttcagagcaattaattaagatattatctgaaatagaaaaagaagaatttatgagaagtaaaaccgattgtgccactcctgattttgttcctgagcctagtcctcatgacttgcctatggatgaacatgttttaccagatgatgctgatataaattttggatactgtgaagtggaagaaaaatgtagacagtcttttgaggcttggcaagagaaacagaaggaattagaagatnaagagaaacaaactctcaaagctcagagggatagagaagaaaaacaatttcaagaagaagaagaaaagcgacattgctggatgaaacaatttaaaggtgaaaaggaagaaatttngngaccttcn

SEQ ID NO: 1730 - DNA, 740 bp, Homo sapiens
  misc_feature (679)..(679): "n" may be a, t, c, g, other or unknown
  misc_feature (687)..(687): "n" may be a, t, c, g, other or unknown
  misc_feature (729)..(729): "n" may be a, t, c, g, other or unknown
agttgctgatggccaggtcctgctggtcagccgccttggacggagtctcgggcctgcttttccgttttctgtccccttactctggcttctggatagcctttggaatattccgggcgatagctgggcctccagagagagtgggctgcagggtgtgggcccggcctccccttgcctggcgggttttcctggtcagcgttcctgctgctccccggtcatccctcctgtgctgcagcctttttctctggttcagacccacactctgccgtcccactgcctgggcttgctgagctctccgttctggcttgaaggcctcgcccgagccctgtcaccggctctgcctgtcaggagggcccaagtgtgcggcttcggtggggctgcctgacactgacctctggggttgtaaaggtcccagagggtcctaagtcgggcctgatgtggctgagatggcaagagccggaacgtttctgtaaaatctgaaagcccttgatggggccgagggggtgaggaggattcccaccctgtgtggacaggagcacgcagcagcggagtgactccaccacgtgagtggggtccagcgggtgtggcactcgatgacaagacaagtttgagagcggcttgtctccggggacctggcgtaggtctcctctgccttaacccttggcttttgcacttcctctgnctgtcctncatacaggcttcttgccctaatgaggactggcttcttaacanggtgagcccgg

SEQ ID NO: 1731 - DNA, 390 bp, Homo sapiens
  misc_feature (333)..(333): "n" may be a, t, c, g, other or unknown
  misc_feature (356)..(356): "n" may be a, t, c, g, other or unknown
  misc_feature (364)..(364): "n" may be a, t, c, g, other or unknown
gaatgaaggtgtcagaacgaatgagattgtcctatgaaagaagaggcaggagccagggaggaggatcccacccggccggggctcagccaggaggcagggccattggggcagggtggcagtccaaggaaccgctctgggaaggtttgcaaaggtcggggtcccccctgccaggtgatcgaattatcgtggagtgtctggaaggcgggggaagttttgttgagttcaccaaataactcagaccaactggaaaccaagtggagtttctacaggaccaactagaatagggatcagctacatgggggcggggggaggggggcagggaacggtgtctgncttcattgcagctctgtctgcanagccagcnctgtgatacctcatagtatgtgctca

SEQ ID NO: 1732 - DNA, 781 bp, Homo sapiens
  misc_feature (668)..(668): "n" may be a, t, c, g, other or unknown
  misc_feature (715)..(715): "n" may be a, t, c, g, other or unknown
  misc_feature (760)..(760): "n" may be a, t, c, g, other or unknown
  misc_feature (781)..(781): "n" may be a, t, c, g, other or unknown
ttcagaaaattttcatttaactagagatttccatcctggtcagctgggtctcatttacctgattaaaataggtttgcatggataaagtcttaaagcaaattctccttaccacattttgtgtgaattttttcctctttaatactaattttagtttgttctcattacaattgcatatgtaaaaaatactttttgataaagcaactgaaactttgaagttgataatttatcacaatacttttttccccattatatcaacacttggcaaactacagactgtgagcctaatccaggttgtatttccttctgtgagtaaattttcaatggcggagccatgctcatttatttacttactgtctgtggctacaatggcagaggtaagtagttccatagagactatctggcctgcagagctgaaaacttttactctctgggcctttactgcaaatgtttgctgattcctgcattactgatatcattttcataacagtcttaaaaacttggcatttttaaacttaaatacttttttctttttgtcgctttcttctctaccctatctctgccagcagttctttgtgaattaccattgtgatcttctaaaggcaaaaaaaatggtaggtagtcaatgactgatagctatagacctatgaaactaacatttcctatcttgnctcaatattctgatgtatataatcattttaaaacataataaatttangccttttttggttttggttttaacaccaagatatgccactaatgnctgacaaggcatttaaactan

SEQ ID NO: 1733 - DNA, 846 bp, Homo sapiens
  misc_feature (660)..(660): "n" may be a, t, c, g, other or unknown
  misc_feature (691)..(691): "n" may be a, t, c, g, other or unknown
  misc_feature (695)..(695): "n" may be a, t, c, g, other or unknown
  misc_feature (801)..(801): "n" may be a, t, c, g, other or unknown
  misc_feature (830)..(830): "n" may be a, t, c, g, other or unknown
  misc_feature (840)..(840): "n" may be a, t, c, g, other or unknown
tggattaagaatcaggagaggtggggctgggcgcagtggcttacgcctgtaatcccagcactttgggaggccgaggcgggtggatcacgaggtcaggagttcgagaccatcctggccaacatggtgaaaccctgtctctactaaaattagaaaaaaaatagccgggcattgtggtgggcgcccgtagtcccagccgctcgggaggctgaggcaggggaatcactggaacccgggaggcggaggttgcagtgagctgagattgcgccactgcactccagcctggcgacagagcgagactctgtctcaaaaaaaaaaaaaaaaaaaaaaaaaaaatcaggagaggtggggtgtgttttatgactttaggcaaatcaacctaagagacagttttctcttctgcagagttttaggaaagtcacaaattaatgtacttgaagaaagtgtacaatagaatagtagtattaccaaatcctaaagttcttattgtggaaaatctctgaaatattacctgcctatgtagatgccaacccttcagcaatccagacaagcttattatcttttctggatgaattaagtgtccacagttttgtacctcttcaatgtgattactttgtaggctagactgcagactgttaattgactactttctggtccctctanctattgcttgagacagtaaaataattactgntctntagctacatccttacattttcctggtctgaaatgaaatcattttcttatgttaaaaataaagttaattactggttcaacttcccaaggggatatttaacttggcanctttttacaaacccttttttttttaaacngggggaactnttttta

SEQ ID NO: 1734 - DNA, 690 bp, Homo sapiens
  misc_feature (629)..(629): "n" may be a, t, c, g, other or unknown
  misc_feature (631)..(631): "n" may be a, t, c, g, other or unknown
  misc_feature (677)..(677): "n" may be a, t, c, g, other or unknown
gaaagtgtccttgcaaactttgttccgagtgtaatttcctagggatcctatggcctcttgagaacagcattttagggacatggatcactgctctctatagaggtagctcaactcaagagcattttacatgtaggctccagacagcaaacatgtcaacacactgacctctctgctccaggtgactgtttgctacactggggattgcacaagtcagagacttcaatgcaactggctttgtgatgggtggcaggtgtgatgtgggtcagaggtgagaggacagacagaatggctgcatggaaaagcgagcatttgctattctacagaattccataatgcactggttaatgacactaaaaggagaaataatttcacaaaatgtatccctggtcctgacaccacgtggggcgtgttttaacaaagtgagttaattggggttgcaaatagatcaagagcataaaacatctctgactcaaatgtatttttagttaataagaaagaagaggggcccagcacgggggttcatgcctgtaatcccagcactttgggaggcccaggctggtggatcatctgatttcaggagttcaagaccagcctggccaacatggtgaaaccccgctctactaaaaatncnaaaaaaaaattagcccgggcatggtggcgggtgcctgtaatcccanctcttgggaagct

SEQ ID NO: 1735 - DNA, 726 bp, Homo sapiens
  misc_feature (677)..(677): "n" may be a, t, c, g, other or unknown
  misc_feature (723)..(723): "n" may be a, t, c, g, other or unknown
  misc_feature (725)..(725): "n" may be a, t, c, g, other or unknown
ggtaggactgcggacgtatttgttttcttcaagcatttggtcgagattaagaattaaaaatgtcatccaaacaagaaataatgagtgaccagcggtttagacgggttgcaaaggacccgagattttgggaaatgccagaaaaggatcgaaaagtcaaaattgacaagagatttcgagccatgtttcatgacaagaagttcaagttgaactatgccgtggataaaagagggcgccccattagccatagcactacagaggatttgaagcgtttttacgacctttcagattctgattccaatctctctggtgaagatagcaaagcattgagtcaaaagaaaataaagaagaaaaaaacccagactaaaaaagaaatcgattcaaaaaatctagttgagaaaaagaaagaaaccaagaaggctaatcacaagggttctgaaaataaaactgatttagataattctataggaattaaaaaaatgaaaacctcatgtaaatttaagatagattcaaacataagtccgaagaaggatagcaaagaatttacacaaaaaaataagaaagagaaaaaaaacattgttcaacatactacagactcttctctcgaagaaaaacaaaggacattagactcaggcacctctgaaattgtgaaaactcccagaatcgagtggtctaagacnagaagagaaatgccatcaggggtcactcataatggcccgagacacngnt

SEQ ID NO: 1736 - DNA, 831 bp, Homo sapiens
  misc_feature (780)..(780): "n" may be a, t, c, g, other or unknown
  misc_feature (815)..(815): "n" may be a, t, c, g, other or unknown
gctggtgggctccaggtgcagagagcagggtgggcgtcagaccccaggtccactgtgcacgccctcttgtagagcccgttccgttgtccatgagatgaggagtgttcttatctctaaagtattatcatgaaaacctaacaatgtagaaagactaaagcacatgggtggtgcttcataaatagtatttctcccactttctgaaaactcctgctgaagtaactgcacaagaatccttgaacatttagaattctggttttagccataccataaagtcagtagtgcgtggtggaattctgctaacgaaaattgcgaaggatcaaggcagagtacagagctggtgtgtagcgggtaccttctgtctgctggcactaggtattttacacattaaatcagctcgttctcacatcagctcttttaaaaataaggaaatgaggagccacagtggcccaactgatgcagtggcagaagtagaatttgagcttgtgcagatgtgcctccgtgttttgtctcctgagcatgctgccccaagtttgacaataccaagatttgtactggaacattccctcccatccccaccccctagaagcccctcttcctcccttagatttgacacatagtttgaaaccactattaactaccttatgagagccactgtttgtgaagtgctgactatgtgccaggtcccgtgccgtgcaatttttgtgaattatctcgtgtctacagtgcctacaatttctctggtcaataccttcatgttactggcgaggaaagggaactcanagagagtaagtaatttgctcgagttaaagactggncaggacagccagggct

SEQ ID NO: 1737 - DNA, 774 bp, Homo sapiens
  misc_feature (580)..(580): "n" may be a, t, c, g, other or unknown
  misc_feature (598)..(598): "n" may be a, t, c, g, other or unknown
  misc_feature (648)..(648): "n" may be a, t, c, g, other or unknown
  misc_feature (720)..(720): "n" may be a, t, c, g, other or unknown
  misc_feature (733)..(733): "n" may be a, t, c, g, other or unknown
  misc_feature (772)..(772): "n" may be a, t, c, g, other or unknown
ttcggacctcaaggttccccttaacacagagcgccccgcagtcttcgcggaaagcgttcggggtaggcgatggctgcgacgcgtgcagggccccgcgcccgcgagatcttcacctcgctggagtacggaccggtgccggagagccacgcatgcgcactggtgagagtctgcccggccggcgctgctcgctgcgttccccaggcctgggcgcccggtttttcgcggggagtcccgtcatccactgcggtagctcagccgctccgcctctcttagtccccgtgattcccgccgcccaataggatcgcgccctgtaggacgctcccttgagccttggcggtggcagccttttagtctgttccggtcttccccactggttctcttgccccttgatcctgaactcctcgtagtgtttccgcggttttcctgaactcctctagacgctctcgtgattcctcagggtcccctcagaacctgacgccacccaccagaccccttaggattcctgtgaggctccagtgacccacaacccccattgtctttccacgactcttcaaaacatcctatggcttccatgggcctncagagcaccccagacctnctgagggactcccttcatccctttgattacccagagaccttcagaacttncatggagcccccgtgatcccataggacccctcaatactcgtggggttcatgtgacctcatcggaactcttangagcctaagaatncatcaggactttcgggttggggttggggttttttttttngg

SEQ ID NO: 1738 - DNA, 826 bp, Homo sapiens
  misc_feature (697)..(697): "n" may be a, t, c, g, other or unknown
  misc_feature (722)..(722): "n" may be a, t, c, g, other or unknown
  misc_feature (802)..(802): "n" may be a, t, c, g, other or unknown
  misc_feature (821)..(821): "n" may be a, t, c, g, other or unknown
tctactgtgttacactcagctgctttcacctggaaaagcagaggaatcaggctgtctcctgcagctgtcttggtccattctgctgcccaagcagtacacttggtttcagatggaaatctaggatcgcaagcatgggtacatttgtcggcagcatttggaagtatttttcgtcatcaggatggcagtcaatttgcaattcagtcatctcagtgcaaggtagtttggcaaaaagattatgacacttaatggatttttttcctcttttaaatctgtttacccagcattttgtagtataatgcaatgtaataacattgcattattttgagcatagtttagaagccaagaagatgctttcaaacagctgacataattcagttatggcccagatgtcctgccttccccatcacacattcatattaatggtcttagaaagctgtttctgaggcaacagtttcttcctcaatatcatcctactggggaaattttggcagttgatgtctaatgttgattttttttcctgatcgattttaattgttcactgggcactttggggtagaattgttttaaaaatttggttactgggaaagctagacaagcctttgctatggtgaaagagacagaaggaatatagatataatttgtaagtggttatgccattgggcttaatgctttgcatacattatctagtttgcatctnctgatcgcctttaagtttgcttacngtaaagcattattccttgcttggcaatgcacagagaaaaattatttgctgaaggaccctgcaaatgagggacaggatcanagttggactgtaaccctgncctcc

SEQ ID NO: 1739 - DNA, 831 bp, Homo sapiens
  misc_feature (784)..(784): "n" may be a, t, c, g, other or unknown
tttttataaaaaccctagaagaaaacccaggaaatactattctggacataggccttggcaaagatttcctgacacagactccaaaagcagttgcaatgaaaacaaaaattgacaagtgggatctaattaaattaaagagcctctgcatagcaaaagaaacaatcaacagtataagcagacagcctacagaaagagtgaaaatattcagaaactatgcatctgacaaagatctaatatccagaatctataaggaacttaaacagatcaacaagcaacaaacaaccccattaaaaaatgggcaaaggacatgaacagatacttctcaaagaagacatacactttgccaacaattgtatgaaaaagtgctcaacatcactaatcattagagaaatgcaaatcaaaaccacaatgaaataccgtctcacaccagtcagaatgactacaattaaaaagtcaataaataaggctgggcatggtggctcatacctgtaatcccagcactttgagaggtcaaggcaggtacatcacctgaggtcaggagtttgagaccagcctggccaaaatggtgaaaccctgtctctacttaaaatacaaaaaagtacccggatgtggtggtgggtgcctgtaattccagctacttgggaggctgaggcacaagaatcgcttgaacccaggagttggaggttgcctgagatcacaccactgcacttcagcttgggcaacagagtgaggacttcgtcttcaaaaaaaataaattaaaaataacaaatctacaaacctttancttgactgacaaggaaaaaaagaagaatgtgaatactagaatcgcat

SEQ ID NO: 1740 - DNA, 828 bp, Homo sapiens
  misc_feature (749)..(749): "n" may be a, t, c, g, other or unknown
  misc_feature (754)..(754): "n" may be a, t, c, g, other or unknown
  misc_feature (824)..(824): "n" may be a, t, c, g, other or unknown
actaagtggtgatgagcatgagtaacaattggaaatctcatacattgctggtagaaatacaaaatggtaaagccatttggaaaaacaataggcaatctcttataaacatactcgtccatttgacatagcaatcctatttttaggtatttatccaagagaaatgaaagcatatccatacaaacacccgaatgtgaatgctcatagtagcctaattcaaagtagccctaaactagaaacaatccaaaagtctaacaactggtgcatggataaacaaattgtggcccatccacataatggaaagctacccagcaatggaaaggaacaaacaagtgatacatgcaacaacatggatgaatctcaaaagcactgtggtcagttgaaaaaaaaaaaaggcaaacacaaaggagtacataccatatgattccacttatatgacattctagaaaaggcaaaactatagggacaggaaacatcaatggttgccagggactgtgggtgaggagaggagacttgactataaaggaacatgaggaaatttttcagggtgacagaaatgttctgtatcttgatatggtggtgtaaaagtgaggtataatttatatacagtaaaatgcacaagtcttaaatgtacaactcaattaatttttacgtatgtatacaccatgaaaccttcacccacttcaacatacagaccatttccttcaccctggaaggacccttgcaccttattgaatcaatacctagtcctncggangtaaccattattctgatttctaccccatagattagtttgcttgatttgatgtcatatgaatggaatcatntctt

SEQ ID NO: 1741 - DNA, 769 bp, Homo sapiens
  misc_feature (289)..(289): "n" may be a, t, c, g, other or unknown
  misc_feature (441)..(441): "n" may be a, t, c, g, other or unknown
  misc_feature (446)..(446): "n" may be a, t, c, g, other or unknown
  misc_feature (482)..(482): "n" may be a, t, c, g, other or unknown
  misc_feature (673)..(673): "n" may be a, t, c, g, other or unknown
  misc_feature (687)..(687): "n" may be a, t, c, g, other or unknown
  misc_feature (751)..(751): "n" may be a, t, c, g, other or unknown
tctcttttacttatttttcagttgggttttcgtctttttcctttagaagttcttaatatgttctgatttttaatcacttgtcagttatgtgctctgtaattattttcttcctgtctgtggcttatcttttaactttgtataggttatccttgtgaggttatgtgtgtgtgtgtgtgtgtgtgtgtattcctaaactggtttccagaaaaattatactggtttacagaacatccaacagtatatgacagtgcccagcttgccacaccctgcctgactctgggaatagttntatcatcttgcccagtggaatagacaaaaagtggtattgccccttctttggtggcttttcctagaacattcctacctctttggtatagccaaaagctggcttttccctgaagatcttactttccttgtgaccctctccaatgaagccacctnacctnctcccaactctcgctctgaactccccacgttgcttncaagcccgggctggcaacctttcccatgagaagttagtccctcctctgctcactcttggtgcccttacctgcctattgacttcaggctaactgttaacaaccttcttcatatgtcctctttttggcataattaggatttgaggattcatactgagaatccatcaatgctccggcctcacagtccctccatncttccaactctaangacttcgtcttcattcctcttagggtacctttggctttatcacttggagcaatttcacttttangatgctgaactcggagat

SEQ ID NO: 1742 - DNA, 713 bp, Homo sapiens
  misc_feature (695)..(695): "n" may be a, t, c, g, other or unknown
  misc_feature (698)..(698): "n" may be a, t, c, g, other or unknown
  misc_feature (705)..(705): "n" may be a, t, c, g, other or unknown
catgaatgtttatggcagctttatccataattgccaaaacttggaagcgatcaagccatgaaaagacattgctgagaagaagccaatctgaaaaggctacacatcctgtataattccagccgtattctggaaaaggcaaagctgtggagacagtcaaaagatcaggagttgccaggggtttgttgtcagtggttgccaaaggcaaggatgaataaggagaacacaggggattttatgtgataagtatcatacctaaaaatcccctgtgttcatatcatgtataaataaatgtacatagacatatacacatatatatatataaatcatgtgtatgcaatgacatgtatctatcctgtcattctgtattggtcaaaatatcaaaatccacagaatgtacaacacaaagagtgaactctaatgtaaactgtggactttagttaatactaatgtgtcaatattggcttatcagttctaacaaatgtaccacactaatgcaatagtaggaaaaactgtccaatctaaacactgggcaaaggattttaaaagatatttcacaaaggaagatatgaaaatggcaaatcagcatgtgaaaagatggttaatatctttttttttttttttttgagtctctctgttgcctaggctggagtgcaatggcatgattgccgcccgctgcgacctctgcctctcaaggnttncggcatntcgtgcct

SEQ ID NO: 1743 - DNA, 827 bp, Homo sapiens
  misc_feature (755)..(755): "n" may be a, t, c, g, other or unknown
  misc_feature (778)..(778): "n" may be a, t, c, g, other or unknown
ggaccaagatggcggcgccctgtgagggacaagcgtttgccgtaggggttgaaaagaattggggtgcagtagttcgctccccagaagggaccccccagaaaatccggcagctgatagatgaggggattgccccggaagagggaggcgtggacgcgaaggacacgtctgccacatcccagtcagttaatggatcaccccaagcggaacaaccttcattggaatctacaagcaaagaagccttctttagcagagtggaaacattttcttctttgaaatgggcaggtaagccctttgagctgtctccactcgtctgtgcaaaatatggctgggtcacagtggaatgtgatatgctcaagtgctctagctgtcaagcttttctctgtgccagtttacaaccagcttttgactttgacagatataagcaacgatgtgctgagctgaagaaagccttgtgtactgcccatgagaagttctgtttctggccagacagcccatccccagaccgatttgggatgttgcccctggatgagcctgctattcttattagtgaattcctagatcgttttcaaagcctttgtcacttggacctccagcttccttccctaaggccggaggacttgaaaactatgtgcttgacagaagacaagatcagtcttctcctacacttgcttgaagatgaacttgatcaccgaactgatgagagaaaaactacaatcaaattaggctcagacatccaagtccacgtcactgcctgnattctctctggtgtggcttggcntgtagttcctctttggaatccatgcagttttcctgatacatgttccaat

SEQ ID NO: 1744 - DNA, 663 bp, Homo sapiens
  misc_feature (502)..(502): "n" may be a, t, c, g, other or unknown
  misc_feature (611)..(611): "n" may be a, t, c, g, other or unknown
  misc_feature (614)..(614): "n" may be a, t, c, g, other or unknown
  misc_feature (658)..(658): "n" may be a, t, c, g, other or unknown
gggtagggactgtcaggcagggctatgagatagaggccctgagagtatgggatttttttgtgctgatcgggagaaacgtggagaggtggtgtgataggaggagctgggtcaccccattttattatatgtcatgaaactggcttccttctgcatgacctctaaagtaactactcccagtgctgagtagaaggacactgtaaataggacaaagaaagtcttgatgtggtgtcggaggctaatgaggacagaagaaaaagaggaaacattcacaattagtaaaagacttctggcttatcattgcaagagaaatgtttgggggccaggcacagtggctcacacctgtaatcccagcactttgggggtccaggcaggcagatcacttgagcccaggagttcaagaccagcctggacaatatggggaaaccccatgtctataaaaaatacaaaaattctcctggcatgttagcacacatctgtagtcctagctactaaggaggcttangtaggaggatcacttgagccccagaggtcgaggcagcagtgagccatgattgcaccactgcaccccagcctgggcgatagagcaagaccctgtctatttaaaaacaaanaanagaaaaaaaaaagtttaggttctcagccatcccctgagctttangctca

SEQ ID NO: 1745 - DNA, 586 bp, Homo sapiens
  misc_feature (539)..(539): "n" may be a, t, c, g, other or unknown
  misc_feature (551)..(551): "n" may be a, t, c, g, other or unknown
  misc_feature (564)..(564): "n" may be a, t, c, g, other or unknown
attatagtatgtgtagtgaaatggtgggattttatttttattttttattttttagagacagcgtctcattctgtcacccagggtggaatgcagtggtgcactgatagctccgtgcttgaagagccttgaattcttgggctctagcaatcctctcgcctcagcctcctgggtagctaggactgcaggcacaggccaccattcccagctaatttaaaaaattattttttttgtagacacagggatctctctgtgttgcttaggctagtctcaaagtccttggctcaaaggatcctcccacctcagcctcccaaagtattgggattacctggccaataatggaattttagaactggcaggaacgtcagagataatccaatgtgagctcttaatgatacagattaatgaagtatcaaaagatgagaggtatctaaaattcacaaaacttgttagtaacagaacgagtattagaaccagctatctaactcttagtccagtggtgtcctgtatcatacggtttcttagaaaatagatgtttccangccaggtccggnggctcacgcttgnaatctgagcacttggagaggcc

SEQ ID NO: 1746 - DNA, 711 bp, Homo sapiens
  misc_feature (678)..(678): "n" may be a, t, c, g, other or unknown
  misc_feature (685)..(685): "n" may be a, t, c, g, other or unknown
  misc_feature (689)..(689): "n" may be a, t, c, g, other or unknown
tagtgatatggacagtgaagtccaggctgagttggtctcagatgggagatgagaatcttattccgaactggagtgaaggtcactcttggctgtgctttagcaaagagagtggtggcattgtgcccctgctctagagatctgtgaactctgaactcgagagggtatctggcagaaaaaatttctaagcagcaaagtgttcaagatgtggcctgattgcttctaaaagcctatgctcatttgcatgaacaaagtggaacttatatttaaaacagaagctgagcttttataaaagtttggagaatttgcagcccaaccatgtggtgaaaaagaaaaatccattttctggggaggaattcaaggctgcagaaatttgcataagaagagcctcatgttaacagccaagagagtgaggaaaatgcctctagagcatttcagagaccttcacagcagctcctcccatcacaggtatggaagcccaggaggaagaaatgcttttgtgggccagcccagggccccactgttctgtgcagccttgggacatggtgccctgcatcccagccactccagctccagctgtgactaaaaggggccaaggtacagcttgggctgctgcttcagagggtgcaagccccaagccttggtggcttccatgtggtgttaggcaggtgtgcagaaganttgaggnttangaacctctacctagatttcaga

SEQ ID NO: 1747 - DNA, 550 bp, Homo sapiens
  misc_feature (537)..(537): "n" may be a, t, c, g, other or unknown
  misc_feature (540)..(540): "n" may be a, t, c, g, other or unknown
  misc_feature (542)..(542): "n" may be a, t, c, g, other or unknown
ttgtaatggatgaagaggcatgactcagtagatggttgatttgggaataaccacatccagtctagaagggagctgaccctcagaatttctagctatgggatagacagacctgcctaactaagagacagtttactgatagactgtggtaaattctgtatggagatatacagacaacagaaggagaacataattcctggttgggtggggaggggagggtgtgcttgtggttctcagccctggatgtgtttcggaatcacctggagataaacatatagaacctgggctccatgcctaagattctgattttcagttctgggagtataacagggccatcagaattctcttttttttttgagacagggtttcactgtcgcccaggctagagtgtagtggtggcaattatggctcattgcagcctcgacctcctgggctccagggatcctcccacctcagcctataactgggactacaggcatgcaccaccatatctggctgattttaggttttgtggagctcggatatctctgtgttgcccanaangnggccatca

SEQ ID NO: 1748 - DNA, 802 bp, Homo sapiens
  misc_feature (721)..(721): "n" may be a, t, c, g, other or unknown
  misc_feature (728)..(728): "n" may be a, t, c, g, other or unknown
  misc_feature (740)..(740): "n" may be a, t, c, g, other or unknown
acggtaatggtcttctctccttagtcctgatattgacaataaacatcaataggagaaatcaagaaaaatgaaaagcaaaagatgtctactatatacttaactacacttttcatccctattgattattgtaaataaggttaaaaaaaaaaagaggcgccaaatgtgaacaaaaccatgattgttattagtagagaacccagtctgtaaaatattttctggacaggagggaacacagggactatgccctacccactggctaccaactaaatgaggagagaccgtttcacattaccagaatccaggagcacactcagaagtaaaaggtgatattctgataatcagctgcagccatattactgaaatttgcttagttgtgatagtggctgttgttatggactgaagtgtgttcctccaatatcaatatgttgaagcccttatctccagtaccccaggatatggatatatttggagataagggctttacagaggtaatttagagtaaatgaagccattggcatgggccctaatacaatcttctgccagggtaaaagatgtaaaattctagtcccagtttcatctttatgtgactttgggtcaatctatgggagctgaaatcaatgccacaatttattgttagaaaagtcatgagaagtggactggaaatatctgaaaatctctgactgatgaaaagacagcttgtgttatcaaaaatccatctcgntaattanggttagtgtcanttgaaaccaccttcaaaaaattttaaaactctgctacaaacagcatatcttatcttaactag

SEQ ID NO: 1749 - DNA, 752 bp, Homo sapiens
  misc_feature (732)..(732): "n" may be a, t, c, g, other or unknown
  misc_feature (740)..(740): "n" may be a, t, c, g, other or unknown
  misc_feature (743)..(743): "n" may be a, t, c, g, other or unknown
atttaaaacatgagcttttcttccatacttgtgatactattctagttacattacaaaaattaatcttaggtctctacctcacatatatataaaaatgaactcagaaattgatcaaagacttaaatataaaaccaaataaggccaggctcaggggctcacgcttgtaatcccagcactttggaaggctgaagcgggtagatcacctgaggccaggagttcgaaaccagcctggccaacatggtgaaaccccgtccctactaaaaatacaaaaattagctgggcgtggtggcatgtgcttgtaatcccagctacttgggagggtgaggcaggagaatcgcttgaaccaggaggtggaggttgcagtgagccaagatcaagccattgcactccagcctggtcaacaagggcgaaactccatctcaaaaaaaaaaaaaaaactaaaaattcttagaggaaaacaggccttaatttgtgtgactccttgattaggctgtggcttcttagataggtcattaaaatcgtaagcaaccaaagaaaaaaacaaatttattggacataatcaaaatttaaaatgttcacaataaaaaatttaagacttataattcaaagcacattatcaaaaaaagtgaaaatacaacccatagaaagataaaaaatattttcaagccatgtatctgataagggtctagtatccagaatatataaagcccattacaactcaataaaaagacnaattaccnggnttaaaaatg

SEQ ID NO: 1750 - DNA, 700 bp, Homo sapiens
  misc_feature (669)..(669): "n" may be a, t, c, g, other or unknown
  misc_feature (671)..(671): "n" may be a, t, c, g, other or unknown
  misc_feature (699)..(699): "n" may be a, t, c, g, other or unknown
tggcttgaggtccgtagttgagaccagcctggccaacatggtgaagcctggtctctacaaaaaataataacaaaaattagccgggtgtggtggctcgtgcctgtggtcccagctgctccggtggctgaggcgggaggatctcttgagcttaggcttttgggctatcatggcgccagtgcactccagcgtgggcaacagagcgagaccctgtctctcaaaaaagaaaaaaaaaaaaaaagaaagagaaaagaaaagaaagaaagaagtgaaggtttgtcagtcaggggagttgtaaaaccattaataaagataatccaagatggttaccaagactgttgaggacgccagagatcttgagcactttctaagtacctggcaatacactaagcgcgctcaccttttcctctggcaaaacatgatcgaaagcagaatgttttgatcatgagaaaattgcatttaatttgaatacaatttatttacaacataaaggataatgtatatatcaccaccattactggtatttgctggttatgttagatgtcattttaaaaaataacaatctgatatttaaaaaaaaatcttattttgaaaatttccaaagtaatacatgccatgcatagaccatttctggaagatccacaagaaacatgtaatgatgattgcctttgnanggctatttttcctcctttgacccggggng

SEQ ID NO: 1751 - DNA, 849 bp, Homo sapiens
  misc_feature (730)..(730): "n" may be a, t, c, g, other or unknown
  misc_feature (768)..(768): "n" may be a, t, c, g, other or unknown
  misc_feature (849)..(849): "n" may be a, t, c, g, other or unknown
tatttagtaaatatttgataaactaatgataagccattatagcttataccattttccatttctcaacaattcaaataatcaccatgtactatgctttatgtcttgctttgcttttctgtaggaaaactttggaccttattgagaagaggaaaacacttaattgggcagaagtcctagtggcacccaccagagctctactgcattcagacactgttcacacactgaccattcatgtgtgttcagcatctgaacttggccttgtgacgtagagaccctgatgaaagctaatgtttctgttttcatgaaaatattcaatctagggaacaccttagaggaaaaaagacttttaggtaagattggtttggaaattgggaatgacccagcttgtgcctatatatgtgggcctgcaatcaacttctgtggtaggagtgagttgcctacctgaagggaaactttttacataggatttaaaaagatgatactaatttaaaaacaaacaacattttaaataggttcaaagctagtgaaagtaaaaataaactaattaatattaccccagtattaagaatttagtacacctacaaccatctgatcttcaacaaacctgacaaaaacaagcaatgggggaaaggactccctatttaatcaatggtgctgggagaactggctagccgtatgcagaaaattgaaactgaaccctttccttacaccttcataccaaaattagttncagatggattaaagacttaaatgtaaaacccaaaactnttaaatccctagaagaaaatctaggcaatctatctgggacataggcccaggccaagattttataatgcaaatcccaaatcn

SEQ ID NO: 1752 - DNA, 723 bp, Homo sapiens
  misc_feature (642)..(642): "n" may be a, t, c, g, other or unknown
  misc_feature (648)..(648): "n" may be a, t, c, g, other or unknown
  misc_feature (715)..(715): "n" may be a, t, c, g, other or unknown
gagagtagaggggatgtaaaatcattatgtggagagctggagaacaacctgatgaaggaaatcaagtgagctgggcaaggtgtggagtccatttgagattgaagatcaataaattatcgtggtattggtctgtcctgttgtgtgaattattttttaaatgtttcccggcagctcaggtccaagtgtcaggaaagcaggtagttgtatttgtcctggatggggctttcttggatgtgacagaaagacaatgaggcaagggaatttggggaaaaaatgttcagtttttaacaaatgatggacagttaggagaactaagctggactaggaagtgaaaataggtgagtctgatagagtagaatgaactgtgcttggaagacaggtgccatgggagtaatcgggtaattaagcagcgagagtctcattagggtgagagcggaggcatctgagtgagtggatctggaggtgacggtggaggtcagcgtatggttttggcagtcgtggcactcacctctctgagggcttccctgtaggagggacataaattcaggaatcatggccaaggaaacatgctgttttactggaaacttgcagttattaataaatacattacataaaagcagtgctggagcctctatggcttanggtcanggcttaagtaagacagcctatcatctgccttctaaacttgaggtggcccatttggaaaacccatttnctgaggta

SEQ ID NO: 1753 - DNA, 706 bp, Homo sapiens
  misc_feature (675)..(675): "n" may be a, t, c, g, other or unknown
  misc_feature (688)..(688): "n" may be a, t, c, g, other or unknown
  misc_feature (700)..(700): "n" may be a, t, c, g, other or unknown
tgctcaagtccctgataaaaaaataaaagcagtggtgccctcgggttcaaaaacctgaacggtggtcttcagttgttcccccaagctcctctatcagaggcccagacactccaagaggctgggaagaggcaagtggctttccctgactggcatcagactcctggatggctgtgtttctgcatactccaccatcaacaatcagaagggcactgctttcttcaagaaggggaccttgcaaagaactgtctcagatgggctatctttgagttcatcttgttctgaatgtgagtctgagtctttgtttccagatgacacagtgctgtctgagtcctctgaatcacctgcctcagagctgcagcaaagtttctgctgcccagaaactgaatgggctgcttgtaatgcagattcttctcctggacaagaagtgctgctgcttctagttcttccagttctaaccccaactgggcctttgtaagggagacttcctttaaggcttctgcaagagctgccaacgttttggatttgactttctgagtccacacacagtagtatgagatgtagagatcattcagtatgtatgctgggtcgttttcctgaaaaattttgtgaatatccaggagacactttaaaactgcacttttacttaattgcaggatctttatagtcttcccgtangccttcatcgccngtttgaaatggngattga

SEQ ID NO: 1754 - DNA, 761 bp, Homo sapiens
  misc_feature (638)..(638): "n" may be a, t, c, g, other or unknown
  misc_feature (732)..(732): "n" may be a, t, c, g, other or unknown
  misc_feature (744)..(744): "n" may be a, t, c, g, other or unknown
  misc_feature (759)..(759): "n" may be a, t, c, g, other or unknown
attcttatgtattcattaaactaggaccctgtaggatttattttaggtgttattgccttgacctagagttaatctgtatttttgaaggaaaatacgttgccttttttcacaagcactttataactcacttctccctaattcagattgcttttcttaatcatttgaagttaatgatacaattatcacatagtagccttacaaatagccataatattaaatcataatttatgtaaagtaaacatccaaattccaaaacatctgaacatgggaacaggctgattgaagtttttgtgggtcataagaccttggcaattgtttgtgagcctgatgccgacatttctcaacagtaatcaaagcacagaacaacaaccatccacatgaaaaataactcaaattgtcattgtacttcccatgctattgtcatttagcaagttatggcatgactgattcagccagtaagaaaaatgtgatgagaatattggctaggagtacagtctgcttagatcttttagttttttttccttcaaaagccaatagacttttactctttaaaataggagctatgcaaaaacgtaatatttggaatgccaagctgcctccatgattgagatacctgttttgaagttctcctctactgnaaattctaacagaattaaaaaagaatcaatgattcttggtaccttcaatgtacctaccacactactcatgaaaaaagctttaaaaattaatggnaaattggtgggnctggaaattctggcngg

SEQ ID NO: 1755 - DNA, 774 bp, Homo sapiens
  misc_feature (72)..(72): "n" may be a, t, c, g, other or unknown
  misc_feature (475)..(475): "n" may be a, t, c, g, other or unknown
  misc_feature (484)..(484): "n" may be a, t, c, g, other or unknown
  misc_feature (724)..(724): "n" may be a, t, c, g, other or unknown
  misc_feature (740)..(740): "n" may be a, t, c, g, other or unknown
  misc_feature (763)..(763): "n" may be a, t, c, g, other or unknown
gttttgttttgttttcaatctaacatagaggcagccttttaaattgactttttttcccccagtttttagttngacctattaaatatctagacagactttcatactccagtgttcctaaagatcaagcatgctacttgttgaggtgtcttaagttgcgtattttaaacaataaatattgggtaaaagtagtgaaacattagaagtatccttttaccaacactacaagaaaccaggacagaaatcacctcttccattttccttgccagtgaatcttggaaggttataaagttttttgcaagtacaggctgcttttccatgtttatagatatttgctataaaatagcctgcatcaaaaacatgtctattaactgtcttactgaaggcttgatagtgtatttttcaaagcaaaacagactttgaaggtgtctgtctgaagatttccggaccagagggaatgcatatgtggacaattcanagatctcanggaaagtaattgtgtaggctggcgatcaatttggcatgagggaaaggagagtgacaatcgatatctagctgggaggtgagagaagagcctcaatagtgacagctcattcaaccaacggaggaaaaaagtaacacccaatgggaaaaggccaccaagagcaacacttacttgccctgcttgaatttcggccctgaatcacctgggcccccattggaaaagttaccaagcttgggcttgccngtcactgagtagtaantcccatatatatcttcagtcctnacaatgcacac

SEQ ID NO: 1756 - DNA, 604 bp, Homo sapiens
  misc_feature (383)..(383): "n" may be a, t, c, g, other or unknown
  misc_feature (531)..(531): "n" may be a, t, c, g, other or unknown
  misc_feature (536)..(536): "n" may be a, t, c, g, other or unknown
  misc_feature (553)..(553): "n" may be a, t, c, g, other or unknown
gcgcggcgcggccgggactttggctttgacaccgactgcgagcgggagccgtgcggctggtgctgggtctggactggctctggcggatccccgcccgagttgggcgcaggactttttgccggggtaaacgcaactgcggcggcgccgccgcaagccccggtgcagcctcggcggcgggtttcgccgccgctgccgccgcctccgagcagccctgcggcttctattcactctgggagagcgatgctaagtttctcccatagaaagagccgggacacgcagaccgaagcggcgtagtcggcttccagggcctgaccagtgacccacacccgcgcggacgcctaggctggaggcagggggcccgtgctgtcccgggctgggctcangcttccgagccgcaggtggaagaggaaccggcgccccgcagagcggccgagaggcggccaagtgaaaggtaattttggacacgccaggcatggaagattcaggtgtttgtctatagtaacctcttcagtccctgaatcctgcaccttncgttnttctgtgcttgtacggnctactgggcttcctccctagccagagagctcttctgcagtggtgcggcctt

SEQ ID NO: 1757 - DNA, 831 bp, Homo sapiens
  misc_feature (724)..(724): "n" may be a, t, c, g, other or unknown
  misc_feature (818)..(818): "n" may be a, t, c, g, other or unknown
  misc_feature (820)..(820): "n" may be a, t, c, g, other or unknown
ataagtagatactctctgttccctcatctgtagattttttctgtgtgtgccatttagtaaggtaagattgaggtttgctctctgagaactaatgtagcatttaactctcctctaatgtggcatatagtaagaatccagtaaatcacaggtagtaatagttataatatggaaaaataggccttcgggggccatagttgagcaataccatttattactaggtaatgtatcctggatgcttctttggaaaggagtgattccttatggctggtgactcatgctctgttctcttggaagggtctttaggaagtggaaggtgtcgtgtcccatccttcacttgtctatctcacctgctttccctgcctgtatgccacctctgactttgctttcctaccacgtggcctggtcctggacatatgtggtgtttgcagcaaacagaagtctaaaaattttgaaggagggcccagccctacttctgccacttatcagacctgaattatgtggacactgctgggtttctttaaaataacttcagatctggtcttgaatggatcaagaaagattttcttaataaaacaaacaaaaacagcaatcctgtcctttatgaatttacttgttttggaaaacttaatttccacattggacaagagaaaaggtgaatcccggtaggtgagggcacaacctgggtatcactctcctctctagtgacacaagggtcaccctttgncaccctacctgtcaataccctcttacattttagaattttctggcattcaaaccttcaaattttaaaatcagaaccctggtctccactacacatncngattttccact

SEQ ID NO: 1758 - DNA, 811 bp, Homo sapiens
  misc_feature (622)..(622): "n" may be a, t, c, g, other or unknown
  misc_feature (762)..(762): "n" may be a, t, c, g, other or unknown
  misc_feature (794)..(794): "n" may be a, t, c, g, other or unknown
  misc_feature (811)..(811): "n" may be a, t, c, g, other or unknown
gaacaggactcatgatatacaaaagaacaaagacaaggaatatttattgttagaaataagtgagaagacagtggaaaatctttaaagtactgaaaaaaaattgtcaacctaaaattctattcctagagaaaatctctttcaaaaacaaaggggtgaattgaaaattaaaaagctagtgttccattatgtcagcataaagtcttatgaattttgtacatacctttggtctcctctttgtttgttttcaaattacaaatattttgaaaatcctactgtctttttaagagacaatggcagccgggtgcagtggatcacttgaggccaggagttcaagaccagcctggccaacgtggtgaaaccccaactctactaagaatacaaaaaaattagctgggcgtggtggcccatgcctgtagtcccagctactcaggaggctggggcaggagaattgcttgaacccaggaggcagaggttgcagtgagccgatatccactactgcacaccagcctgggtgacagagcgagactccatcttaaaaaaaaaaaaagagagagacaatggcctctctaagcaacatgacctacatttaaatggagtcaagtggtcctctgtttccatttgnttaatttctactttgatattttgcttgcagcttcaatattactggctcgtgtggcctgcttcatgctcctggaataaattcaataaccaccaattgccccttatgttcccagcccaggattcaaactgggcttcatgcanaatgggccctctaatggaaggatttgcttccnggatagatccaaactgn

SEQ ID NO: 1759 - DNA, 745 bp, Homo sapiens
  misc_feature (648)..(648): "n" may be a, t, c, g, other or unknown
  misc_feature (716)..(716): "n" may be a, t, c, g, other or unknown
  misc_feature (735)..(735): "n" may be a, t, c, g, other or unknown
gatgcgaatgttgtcatcagggtgggtgaggatgtactaggcactgtgctaagcattttacatatactatcttattcaagttttacagaagtctaccataaatactattaccaccccattttgtagttaagaaaactaatgataagagaggtcaggtgagtagctggtagttacatagccagtgagtggctaagcaagaattcaaatagaggctttctgaactccagggcccacacttaatctttattctgcattcctcccagggagccttcatgtgcacagcatggcactgactgcagaagtgtgcctagtattgccatagtcaaagggcacatcatgcactcagcttagaaaaagggacagttcccaaagagggggaaaaaaaaaaaaaaaaaagggacagttccttaaaaaaaaaatactttgtccccaacattccttataaaagtcaatttaatgaatttctcagactattattttagatccatcactcagtaacccttgtccatctatatccgtactcctcttcccacctccagctccagatttcctgaacttttgtttctgctgcctgttcttgtcagaaactgtgcaaccttggttctgtgggtatgtgaatgtcaggttggcagggtgcagctgtgtggntccagatgaccagaagccacaagcggttgctgcttctctcttgggattggttggggagtgaaaggcanacccgacggatgccttggntggttttggg

SEQ ID NO: 1760 - DNA, 836 bp, Homo sapiens
  misc_feature (721)..(721): "n" may be a, t, c, g, other or unknown
  misc_feature (785)..(785): "n" may be a, t, c, g, other or unknown
  misc_feature (836)..(836): "n" may be a, t, c, g, other or unknown
gtgcacaataaatgtaatgcatttgaatcatcccaaaaccatccctgcacccccggtctgtagaaaaattgtctttcatgaaacccgtccctggtgccaaaaaggttggagaccactactctaaaagataaagatggttgggcatggtggctcacacttgtggtcccagcattttgggaagctgaggagggcagatcacctgagaccagcctgggcaacatggggaaaccctgtttctacaaaaagtacaaaaattagctggacctggtaatgcacacctgtagtctcagctactgaggaggctgaggtgagaggatcccttgagactgggagcttgaggctgtagtcagctgtgagcatgtcattgcactccatcttgggcaatggagcaagaccctgtctcagaaaaaaaggattaaaaaattttagccacaatattatttatcacacctaaaaattaataatttcctaccatcaaactacttaatcaatgttcaaaaagtagaaaacacgtttgcaaaactgagcacctttttcacttaagaataagttaggtcagatatttgcctttccttggtcagctctagaccaaggggaaatgcaagatgtaactactgaaacatagtggttggcatttggtggaatatttttggttaaaacatggaagttattttatcatgagttacttctatagttctaactaattttagttagacaatgnattataaatgcagtgtagaattttgacctcaaagaatctcatctagtatcatgaaatctatgcngtatgatgtaatcagtagaatgtgcttaactgggagcctttggcatccaan

SEQ ID NO: 1761 - DNA, 800 bp, Homo sapiens
  misc_feature (725)..(725): "n" may be a, t, c, g, other or unknown
  misc_feature (758)..(758): "n" may be a, t, c, g, other or unknown
  misc_feature (760)..(760): "n" may be a, t, c, g, other or unknown
taacaaacgccggcgctgacaggggccgccagcccctccgccgcgcggagcccacgaaggggacagcgcagccggcccagagctcgggtctccggggaccgagccttatgatctcctcattgcgtccccctctgcccactggacttggacttcagatctgaccccagacctgccggctacctcgggagggcccacctccccgcccatccagcaagatgccaatcctcaagcaactggtgtccagctcggtgcactccaagcgccgttcccgagcggacctcacggccgagatgatcagcgccccgctgggcgacttccgccacaccatgcacgttggccgggccggagacgcctttggggacacctccttcctcaatagcaaggctggcgagcccgacggcgagtccttggacgaacagccctcttcttcatcttccaaacgcagtctcctgtccaggaagttccggggcagcaagcggtcacagtcggtgaccaggggggagcgggagcagcgtgacatgctgggctccctgcgggactcggccctgtttgtcaagaatgccatgtccctgccccagctcaatgagaaggaggccgcggagaagggcaccagtaagctgcccaagagcctgtcatccagccccgtgaagaaggccaatgacggggagggcggcgatgaggaggcgggcacggaggaagcagtgccccgtcggaatggggcccgnggtccacattccctgacccttctcgatgagcangncttttgggatcttgaagatctgctgtcgtgcccaaggcac

SEQ ID NO: 1762 - DNA, 747 bp, Homo sapiens
  misc_feature (523)..(523): "n" may be a, t, c, g, other or unknown
  misc_feature (627)..(627): "n" may be a, t, c, g, other or unknown
  misc_feature (709)..(709): "n" may be a, t, c, g, other or unknown
  misc_feature (721)..(721): "n" may be a, t, c, g, other or unknown
  misc_feature (732)..(732): "n" may be a, t, c, g, other or unknown
ggaagctggctggctgcctgttaagatgtatcttaggacaaagagatttgggatcctggagagcacgggggagattctgctgcctgccttaggacctttatgaacaagcgtgatgttgggagggcggctgtggctgtgtaccaggtgctgtaggaggcgctggaactggagccttgcatccgaatgacaaagtgcctgccttcccggagcttacattgagtgcggaggacagaccagggactagccagcagacagtcccatgtgtcagggtctggtgtttgcagagggtgtttgcaggggtagagcatgacaggaagtggctgttttggataagacgatcaggaaaggtacccgtctgcggaagtgatactgggtctggagtgaagcggttggaagaaaactgcacctctctggaggaagacagtgccaggcacagctgaaaatccggggctagagctactgggaggaacaggaggagcagctgggaaactgggtggccggagcagacggggagggtgagcanggagggtaaagataagcaagcaaggggctggggctgtcaccgaggtggggtgcctcggagggtgcaggagcagagtcaggatctgacttaggtttgataggctnctctggctgtcctgcgatttatcagggacccaggttgccagcaggccgaccactcaagaggccgtctacatcaatgcagtcnaaggctatgctnacttggaccanatggatggcggaaga

SEQ ID NO: 1763 - DNA, 682 bp, Homo sapiens
  misc_feature (594)..(594): "n" may be a, t, c, g, other or unknown
  misc_feature (618)..(618): "n" may be a, t, c, g, other or unknown
  misc_feature (651)..(651): "n" may be a, t, c, g, other or unknown
ggtaaacatgttgcttggaagtatgcttttccagtttcacaaaatgacaccagtggccacagaagttagtaccctttggcctctaaaaatttcgctttatgaagagaaggctactaaaagacatgtaggacttagggttcaaggtggcagactagaggagctagtgtgtactgctctcgtggagaggaaatagtgacgagtaaacatggactctctaagtggatcatctaagaaaccacgtcaggattcaggatgcatcaagggagtaatgggacatggagaacagagaaaatcgaagctgggcagctgcctgcctgggaccagcatgaagacaggagaagctcctcaacacagggaaagaattagtgagtaagagtcctcaggggatccatacttcccacagtgacctgtgcaatcctgagaatgtgaaaaaccccatgactcccttgggcctctagactgatacagagagctacccagagtttttgcagaggcaacactcaagtccgtggggacccccacaggccctggactctggaacagcctggttgaggtgccatggccctgacagaagctgcagtcatggtgctgganatggacagattgctctacttcctnttgcagaaaacctgctaaacccctggggtttangagagctttgtgttcccccaggaagcacttt

SEQ ID NO: 1764 - DNA, 799 bp, Homo sapiens
  misc_feature (704)..(704): "n" may be a, t, c, g, other or unknown
  misc_feature (742)..(742): "n" may be a, t, c, g, other or unknown
  misc_feature (781)..(781): "n" may be a, t, c, g, other or unknown
aaagtgaatagaattgttttcttactcaaaacactgtttaacatgacacttggctcctttctttgcatctctgagctcttgtaagatttgagaaacaattacattcaagggcagtatgcttaacctactgacatttgaactacaaagcaaagatgttcagattttcctgaaggatcaagtctttcaggccacagaattttctgtcctagttttttaatacagtagtccccccatatctgcaattttcctttccacattcaattacgcatggtcagctgtagtctaaaaatattaaatggaaaattccagaaataaacaattcataagttttaaattacacactattctgagtagcatccatgatgtgaattcttgctttgtgcggcatattcatgcttaaattctccccacccattagtcacttagtagccatctcagttgtcacggactgtcactgtatctcagtgcttgttttcaagtaacctttatcttactaatggccccaaagcacaagtgtaatgatgctagcaattcagatatgccagagaagctgtaaagtgctttcttaaagcgaaaaggtaaaagttattaatttaagcaagggaataaaaatcatatgctaaggttgctaagatcgagggtgagaatgactcttcctgctgtacaagatgatcatccccagagcacatagccgtcagactttncaaggtcaataccaaagaaagaatcttaaagaccgctngagaaagggtcatatactcatcatgctacagcagacttnttagcagaaactttacag

SEQ ID NO: 1765 - DNA, 761 bp, Homo sapiens
  misc_feature (681)..(681): "n" may be a, t, c, g, other or unknown
  misc_feature (694)..(694): "n" may be a, t, c, g, other or unknown
  misc_feature (755)..(755): "n" may be a, t, c, g, other or unknown
gaattataagcaggattaacgtagattaaagttgacagaatctggttcttgctctgtccctttcccatggtggccagccccagctgcccagctgctgttgtctgtaagccaaagctcctgcgtgttctccttccaatagaaaacgactgtgcggaacctcatcctccccgggcccagggtgttggtgcagctgctgagggatctggtgaggtagcctatgctcatgtgccactggagatgcccggagagttccaatgcccaggccataccagcagctccctgggtgatgtccccttggacttagtttcactctgaagctgggaagcaatagcctacattttcagttaaataaaagctggaaatgatgatctcgttaggcctgcctcctgtacttcatgctttggtgctctccttcattttcctgccaggaagactttcccagtgcctctttctatatgcttgcatcccgttctcaagtctctgaccagcggttccactttgaagtccatcccacagaagtattagctcaaggctgcaaagatacaggaatgagaacgcttgctgcaacgctgctcataacagggagaccaggaaaataacccaaagggccattcacacaccaggtttttgagatgaatgacatcatgagcaactcatgagcatgagcaccaggcgtgcctnaccatcttggctncttggtgataacgtgcagtccctaatatcagcctgacttcaaggactgagatgataagtgngaaaag

SEQ ID NO: 1766 - DNA, 823 bp, Homo sapiens
  misc_feature (751)..(752): "n" may be a, t, c, g, other or unknown
  misc_feature (812)..(812): "n" may be a, t, c, g, other or unknown
tttattttaaagcacctttattttatatcctaacaatttttatttactctggcaataaagagatagaacacccaccaacaaagtccctaaaatacgtaattgataaagcattggttatctgctaggttttaaacataatttctaagaatataaaaatttaatcaccaccatctttataattgttttaaaattacctctaatttcttcgcacaaggtccactaacaagtgcaatcacaccactgtcagatacctaagcaaagggaaaaagaaacacagtccatgaatccagacaacggaagtagaattttccaaaatgtattcattatttagatatagtcttaatgcctcccattcatcaaacatgtgttttagccatatatacctttcacccttgctacttaattgagaggaatatgccaatatatatctcaattacttaaccacaaaaagcatgaagtggtcaatagtttcaacaaaaacaaaatgaactccttatgatatgttctcattagtcatgaaaatacatttggtaaacacatagtctatatgtttgtagcctatatgtcatttacctgagtagctgaaaagtcgacacactgcaaaaatgggcagttttttcctaatgcatgtaaggacacatcagtaatacttaagcagcccctaaatcgatgatctttagcagctggcaattgagtgcaagagcaacgacttcttcgcagtgagattgcagcatcttttcaagaaacttcnngtaggatgaacaagatgaagccccggttttattctgggggaaaattaattattatcaagngcttatggggg

SEQ ID NO: 1767 - DNA, 782 bp, Homo sapiens
  misc_feature (648)..(648): "n" may be a, t, c, g, other or unknown
  misc_feature (661)..(661): "n" may be a, t, c, g, other or unknown
  misc_feature (752)..(752): "n" may be a, t, c, g, other or unknown
  misc_feature (780)..(781): "n" may be a, t, c, g, other or unknown
tagaaacagacccacactggccaccgcaccagattcaaggcatttgttactgttagggactatgatggccacatcagtttaagtgttaagtgctccaaggaggttactactgccatccaagggaccatcaccctggccaagctttccattgtccctatgcggagaggttactgggggaacaagatcggcaagtcctacaccaccccctgtatggttacaggctgctgtagctctgggctagtacaccttatccctgcccccaggaacaatggcatcatctcgactcctgtgcccaagatgctgctgctgatggccggtattgacaactgctacacctcagccaggggctgcactgccgccctggacaacttcaccaaggccaccttcaatgccatctccaggacctatagctgcctgacccccagcctctggaaagagactattcaccaagcctccctgtggaatgcactgaccatcacatcaagacccacaccagagcctccatgcagaggacccaggctccagctgtggttacagcataagctttcatacaagaataatagtgaattacacctgttaaaaataataagcagaagaaaatgaaattgaacaaaccagccaccgtagtcccttctaaagcgacgtggnctgcgggcatcantgcccttcctctctggctatagctcttcggcatctgaagaaagttatcctaactatttgggggatccaaatttgggcctgctggtatgatnatgcccctggtcgggaaggaatttaagnnt

SEQ ID NO: 1768 - DNA, 806 bp, Homo sapiens
  misc_feature (663)..(663): "n" may be a, t, c, g, other or unknown
  misc_feature (782)..(782): "n" may be a, t, c, g, other or unknown
  misc_feature (804)..(804): "n" may be a, t, c, g, other or unknown
  misc_feature (806)..(806): "n" may be a, t, c, g, other or unknown
ttggaattggagtctccatgaaccagtggtgacttccagagctctgctccttctagattccttcagagttcttgagcctcctaaaaagtataaggaggagccaggtgccatggctcatgcctgtaatcctagcactttgggaggccaaggtgggcagattgcttgagcccagtagtttgagaccagcctgggcaacatagtgagacctcatgtttacaaaaaatgcacaaagttacctgggtgtggcggtgggcacctgtagtcccagctactcaggaggctgagatggaaggactgcttgagcctgggaggtggagactgcggtgagctatgatcatgccactgcactgcagcctaggcaacagagtgagactctgtctcaaaaaagaaaaaaaaaaaagcaaaagaaaatatggaaggaaggagggtatgccttctccattgtcttggattccatacacctgctgggacaggggcctcacagctttgtctttcgcaggcctgcaccctggctcggcggaatgctgaggtgtttctcaagtacatccacaggaacaacgtcagcatgcccagtgtcgccagccacactcggggacccgagcaacaagtgaaaggtcagtgagagacctgcccagccaccagtcacttcagcgacagcccctncctgaaatataccatgtcccagttttcacacaatctcaaatttcctgctgcttctccttagaaatgaaaatgtatgatgtgggatggtgtggccagtaatgattcatgggcaatttttnaacaccccttaagatctggaangn

SEQ ID NO: 1769 - DNA, 728 bp, Homo sapiens
  misc_feature (705)..(705): "n" may be a, t, c, g, other or unknown
  misc_feature (711)..(711): "n" may be a, t, c, g, other or unknown
  misc_feature (720)..(720): "n" may be a, t, c, g, other or unknown
acgtcttggttcgggccgggcataaaaggcttcgcggcccagggctcacttggcgctgagaacgcgggtccacgcgtgtgatcgtccgtgcgtctagcctttgcccacgcaggtatgaacacccggagtgcacctggcgggaggacccccttcaggctgctttggcccgatcctgactttagtgctggccgcctttgctttccatccgctatagtggcctcctttgtccttgcgggggaaaccgaggccacagccttgcagcgcagtcctgatcgcccgacttcccgccccctgctcgtgcgggcctcactgtctccttctgggctgggggcttgcgacaccgccctccggccgactcgctcgtggggtgctggtggcagtggctgggtcactcgtgctctggtcaggagagcgggtctccggcagcctccgggcctcgtagaccgggtacccgggagggtgagggttagtgctgtcgcctccgccgtgctgactcagtcatagggcccagcacgcagcgcgaccttgggttgggaggacaaagtgtcttcccgggcgcactgaccgggcgggggtctcagctttcagtcatggcctccggtaacgcgcgcatcggaaagccagcccctgacttcaaggccacagcggtggttgatggcgccttcaaagaggtgaactgtcggactacaaaggtgaaccgcccgnccgganggggcccangtagaaac

SEQ ID NO: 1770 - DNA, 794 bp, Homo sapiens
  misc_feature (724)..(724): "n" may be a, t, c, g, other or unknown
  misc_feature (762)..(762): "n" may be a, t, c, g, other or unknown
  misc_feature (770)..(770): "n" may be a, t, c, g, other or unknown
aacccgcccgcttctcctgcctaggctcttctttctgctcctgtcgccatggccccggcctcggcgctcaagcgaccctctcgctccgcccagacccctggatgcccagctgccgcacctcccgtggccccacgctgtggctacgtgttgtctgaagacgcctggggaaaccttcagggcctctgtactggcctgtcatgtggtcaaccagatctccttgattgcacagtcaaccccgctcctgtctgtcaggctcaggaaccacttacaagctatggcaggtgatgttccagcatcccacagggaggattatgctggtgagccacatggccaagcaggactatggcttcaacagctctggggcctgcatgttcctgcattagccctactccagcaatgaggctgaagttaccagagtgacatcatggtatctggtgcaagctatagcatccacctattcttggagcacacgtggtcagacactgattggcatgtgaccaagttgatggtggtcaaaacagaactcctttcatgcccacaagcttcagtattactatgttccctgccacttccgttgaagttttgcaggattgggatgatcctttggtgtgaacgaagccccaaagaggaccacgtggagagtgcctgactgttcctgtgatgtcttctagtacatgaacaggaatgaaacccactatgtccttcatgtgaactacatgctgancgtgggtccagatgggaaaccattcttctaccctgcanaaatgggntataagtttcaaggatgtgggtaa

SEQ ID NO: 1771 - DNA, 807 bp, Homo sapiens
  misc_feature (714)..(714): "n" may be a, t, c, g, other or unknown
  misc_feature (745)..(745): "n" may be a, t, c, g, other or unknown
  misc_feature (803)..(803): "n" may be a, t, c, g, other or unknown
actttggctttgacaccgactgcgagcgggagccgtgcggctggtgctgggtctggactggctctggcggatccccgcccgagttgggcgcaggactttttgccggggtaaacgcaactgcggcggcgccgccgcaagccccggtgcagcctcggcggcgggtttcgccgccgctgccgccgcctccgagcagccctgcggcttctattcactctgggagagcgatgctaagtttctcccatagaaagagccgggacacgcagaccgaagcggcgtagtcggcttccagggcctgaccagtgacccacacccgcgcggacgcctaggctggaggcagggggcccgtgctgtcccgggctgggctcaggcttccgagccgcaggtggaagaggaaccggcgccccgcagagcggccgagaggcggccaagtgaaaggtaattttggacacgccaggcatggaagattcggtgtttgtctatagtaacctcttcagtccctgaatcctgcaccttccgtttttctgtgcttgtacggcctactgggcttcctccctagccagagagctcttctgcagtggtgcggccttcccgggagcctgatcctggcggaccatggggagcaccctgggctgcaccgctccatccccagggacccctcggacctgtcccatacccgcaagttcagcgcaacctgtaacttcagcaacattctantgaatcaggagcggctcaacatcaacactgncacggaggaagaactgatgacccctgcctggggtgaccctgccctggcaccaacatcnggaa

SEQ ID NO: 1772 - DNA, 760 bp, Homo sapiens
  misc_feature (741)..(741): "n" may be a, t, c, g, other or unknown
  misc_feature (743)..(743): "n" may be a, t, c, g, other or unknown
  misc_feature (751)..(751): "n" may be a, t, c, g, other or unknown
gggcccgcggaggaaagatactggggagtgggagccgcggggttcagagcgatgattcccccacaggaggcatccgctcgacggcgggagattgaggacaagctgaagcaggaggaggagactctgtccttcatccgagacagcctggagaagagcgaccagctcactaagaacatggtgtctatcttatcatcctttgagagccgccttatgaagctggagaactccatcatccctgtgcacaagcagacggagaatctgcagcggctgcaggagaatgttgagaagacgctgtcctgcctggaccatgtcatcagctactaccatgtggccagtgacactgagaagatcatcagagagggccccacaggtaggctggaagagtacctgggaagcatggccaagattcagaaggcagtggagtatttccaggacaacagcccagacagcccggaactcaacaaagtgaaactgctctttgagcgcgggaaggaggccctggagtccgaatttcgcagcctgatgacgcggcacagtaaggtcgtctcgcccgtgctcatcttggatctgatcagtggtgacgatgatctggaggcccaggaggacgtgaccctggagcacctgcccgagagcgtgctccaggatgtcattcgcatctcccgctggctggtggaatatggccgcaaccaagatttcattgaacgtctactaccagatacgcttcagccagcttggacccgntncatcaaanggacttgaa

SEQ ID NO: 1773 - DNA, 842 bp, Homo sapiens
  misc_feature (791)..(791): "n" may be a, t, c, g, other or unknown
tatgtgtgaagtctttacggtcagaggacattgacaaaatattttagattgaaagcctgttctccttgatgattcagtataacttcttttgactgcgcttttagttcttgcaaaatagatcttgtttagatgagattccagcatgactcctttgtaatttttcatatttttgctattacatctcaactcttgaagagctatttctgtgaaaaccaaacatgcagtcaaggcacattccacgtgtggctgatggggttatcatagttacaaatcatatttatccacagtgataattatcttccttagcgttttgttctacttcagagctcatttgtgggccttaccacctgtttcttacatatggggaaagagtctcttattctcttttggaatatagatctaagagtagatttatatcaggatttgaaagatgaatctttttcaaggatgtttttcctctggaccgtggcattgtgtaagaaatttccctactcatcccatccctggggcacattaatttggagatgatgttaaatgtgtcagagtgtggcacaaatctcaactggcagataaagcctagtattgaattgttttcagttcagaaacgtggctggctgactttgaccctgaatgtgtaaattatctttgcagcaataagaacttgaagtagctttgatagctaatcatagtatgataactcagccagaagaattcactaagagcagtttgggggcttccatctaatgtaaaggttaagtaatgtaagtcatatcttgggcctttagacctanttatgcagagagactccatggccttcagtaatcttactcttacagtcctta

SEQ ID NO: 1774 - DNA, 848 bp, Homo sapiens
  misc_feature (817)..(817): "n" may be a, t, c, g, other or unknown
gagatcgctgggagcggttgcggcgtgcggggagctgagttatagctgtgacttctgccctgccaggccgcacacaagctggctgacccggtttgtaaaaatggaatttcaagcagtagtgatggcagtaggtggaggatctcggatgacagacctaacttccagcattcccaaacctctgcttccagttgggaacaaacctttaatttggtacccattgaacctgcttgagcgtgttggatttgaagaagtcattgtggttacaaccagggatgttcaaaaggctctatgtgcagaattcaagatgaaaatgaagccagatattgtgtgtattcctgatgacgctgacatgggaactgcagattctttgcgctacatatatccaaaacttaagacagatgtgctggtgctgagctgtgatctgataacagacgttgccttacatgaggttgtggacctgtttagagcttatgatgcatcacttgctatgttgatgagaaaaggccaagatagcataggacctgttcccggtcaaaaggggaaaaaaaaaagcagtggagcagcgtgacttcattggagtggacagcacaggaaagaggctgctcttcatggctaatgaagcagacttggatgaagagctggtcattaagggatccatcctacagaagcatcctagaatacgtttccacacgggtcttgtggatgcccacctctactgtttgaaaaaatacatcgtggatttcctaatggaaaatgggtcaataacttctatccggagtgaactgattccatatttagtgagaaaacagttttcttnactttcttacaacagggacaagaagaaaaag

SEQ ID NO: 1775 - DNA, 691 bp, Homo sapiens
  misc_feature (619)..(619): "n" may be a, t, c, g, other or unknown
  misc_feature (672)..(672): "n" may be a, t, c, g, other or unknown
  misc_feature (682)..(682): "n" may be a, t, c, g, other or unknown
cgcagaggaggcccacaaacactgcctgcctcaccaggagggatggtaagacgcttggcccctccttccctcagcctgacaaggggcagtccctggccctttcccaaagggaccccagagagggggaggcccagcccaccatcctgcccggtgggattagctatatccttctgcccctgggacaggaaccatgggaaagcttcctcctgctgcatctacccgctccctccccaccagccaggtccctctgcagtgtgtgggggtgggggcacccatccctgccacctgcctgtagtgggaagagaaacagtaaccccagccagcctccctggaggtgcccaggtaggaagtttttgatgcttggctctgaagatgtaatctcttctcctgacattgttgccagagcctgccacaaataacgtaagggtgtcaggacctctaggccacacaccgtcctctcctctcagtctggaagccccacagcctttgccctctgcattgggggacacaaactgtttacagcagggggggatcactgaccagcctgtggggcgggatgttggctgtgggcagccttcagaagggagcttcctggccccctgggatcagaagctttcangtttggtagggccaaccttttgggctcttggctctcaagctgtgtccaggcanaaggcccaanccttggcca

SEQ ID NO: 1776 - DNA, 663 bp, Homo sapiens
  misc_feature (617)..(617): "n" may be a, t, c, g, other or unknown
  misc_feature (631)..(631): "n" may be a, t, c, g, other or unknown
  misc_feature (635)..(635): "n" may be a, t, c, g, other or unknown
ttcacccaacacaggagcctcttaaaaattctgtgtgagttcgtttcagccagtcttgcatggggacattgtcttccgtttcagtcctgacgtccaccctgtgcacctgcgtgatcgccagccctgcctggtccctcctctgcgggctctccctctccactccctcctctgggagctctgtggccccaggcccaccttccttgagagacatttgtgtgcctgccagtcatacccctttcccaggaggcgcagcttaggctctgaggctgtcccttcccaccgaactcctccctgcagcctcgcagtcctgccctcctgagagctgcccactctgctcctctccccagcgtccactgtccttgaattgccctttgctgggcattgcgatcccgcattctgtctgagggagctaagggcctcctggaagttcctctgggtcctctggcttctcccatcagggctggtcttgtcctggtctctgttcctgtggaactttttacctgcttctgtgaaaactcacgctgtcctcagcacagcacgcacacacacgcatattcacgcatgcacaggcacacacgtgcacatgcccacgcgtgcacacagccacacacaccctnacgcacacaacgcncagnaccatgtgggaaggggttcttcgcttgt

SEQ ID NO: 1777 - DNA, 658 bp, Homo sapiens
  misc_feature (609)..(609): "n" may be a, t, c, g, other or unknown
  misc_feature (636)..(636): "n" may be a, t, c, g, other or unknown
  misc_feature (638)..(638): "n" may be a, t, c, g, other or unknown
acaatacaattttcctacctaaaaaattttaatgagtttcttagcaaatatccaagccatttttgtatttctctgatagttttataaatctgtatgtatgtgtttagtgacttttttgaattaagattgaaataagattcataaaatcactattaatcaatgtctcttaagcctttttttaatctatgggctacatctcatttttcttatctttcttcttgcaatttttggttgaagaaatagaatgtttttccattaggcttcccagagtatggattttcctgatgatattgctatgattttgtttaacttgtttttctatcctttggattttctataaattagtagttagatctagagactttattgtattcaggtttgattcctttttttttgttttttaatgggatacttcataggtggtatttgtatactttcttcaggaggtaataagtatatagttgtctctctttttgtgatattattagccattgatgagcattgcttagatccattaattccttaggggttacaaaggggtgatactctaagttcttttattccttctttggttattccttccttgactatctataaagagaaactttncctcaactatttgcctgtaaataaatncnaatcatcatataaaaatggc

SEQ ID NO: 1778 - DNA, 604 bp, Homo sapiens
  misc_feature (524)..(524): "n" may be a, t, c, g, other or unknown
  misc_feature (593)..(593): "n" may be a, t, c, g, other or unknown
  misc_feature (602)..(602): "n" may be a, t, c, g, other or unknown
agtgccctccccgctccgcggcgccggctgcgaagttgagcgaaaagtttgaggccggagggagcgaggccggggagtccgctccagcggggcgctccagtccctcagacgtgggctgagcttgggacgagctgcgttccgccccaggccactgtagggaacggcggtggcgcctccccagcaaaccggaccgactgggtccagccgccgcagggaatgacgccggtgctcctacagccacggctccgggcggggaaggcgagccccacagccggccctgcgacgcccgcctgggcagcaccgataaggagctgaaggcaggagccgccgccacgggcagcgcccccacagcgccagggaccccctggcagcgggagccgcgggtcgaggttatggatccagcgggcggcccccggggcgtgctcccgcggccctgccgcgtgctggtgctgctgaacccgcgcggcggcaagggcaaggccttgcagctcttccggagtcacgtgcagccccttttggctgangctgaaatctccttcacgctgatgctcactgagcggcggaaccacgcgccggaactggtgcggtcggangaacttggncc

SEQ ID NO: 1779 - DNA, 638 bp, Homo sapiens
  misc_feature (621)..(621): "n" may be a, t, c, g, other or unknown
  misc_feature (632)..(632): "n" may be a, t, c, g, other or unknown
  misc_feature (636)..(636): "n" may be a, t, c, g, other or unknown
gatgccatcagtcactgtgacaaatggtgtgtggggggagcttgctggctgaagcattgtcaccgtgggtaattatacacttaatattcatgtgttatcgttccacctggaatctttaaactcttcatccaggagacactaatcttcaccttattattacgtcctaatgtcactctagcagaagaatggggctgccaacagggggagagaacttcctccttctcctctaggttgtaataaacatggttatttgttatttgaactctggctgaagataagacgctatatgcccctgccagatatggcccaggtgtagagatgagtccaggttattgttaaaagagtgaaaatgcccctgtcacattccccatcgttttcttccatctataaagatgatggcaatggtgttggcaatggtggtgataatgatgattatcaagtgagcattattccatttttaggcatgatggaaggaaaagtcaaatgcagtgttcttaacacttcttataacgttcagaaaccaccagatagagagaatgctgtctgtccttaatgcaagcagcccttggaattggttctagagctgcatgagctgccgatgggaaagtgacatcagtggcngtcaccaaatntccntt

SEQ ID NO: 1780 - DNA, 654 bp, Homo sapiens
  misc_feature (496)..(496): "n" may be a, t, c, g, other or unknown
  misc_feature (586)..(586): "n" may be a, t, c, g, other or unknown
  misc_feature (605)..(605): "n" may be a, t, c, g, other or unknown
  misc_feature (637)..(637): "n" may be a, t, c, g, other or unknown
taaaatgtttgctattccttgaatataggaaatgctaaaaacaatatgtgattaaataccaagtgaatagagtaatagacagtttgaagtttggggtgttaataaatgatcagaatatcatggcttagcttcctgaaggaggttttttttttttttttttttttgagacaaggtcttgctctgttgcccaggttctagagtgcagtggtgcatgatcacggctcattgcagcctcgatcttgagggtccaagtgattctcccacctcggcctcccaaagtgctgttactacaggtatgacccaccacgcctggcctctgaaggagatttatataagtagaacaatggcaagtaggaaattagaagtattactttattattaatttgggcttttggccaaaataccaatgtaaatttgtgtagtaaacagggtgacatcatattacttaagctccaggactagtcaagggctctctcatcctcctaaatttcactgncttactactctttggttgatggctttgcagaagaccccaacaattagtcttttagagtgtgtaagagtgaaacgaccaagaacaagaacncaaactcttacatgtatgngacttttttttctatcttgcccttgaatcaanaattggggaacttttaa

SEQ ID NO: 1781 - DNA, 678 bp, Homo sapiens
  misc_feature (601)..(601): "n" may be a, t, c, g, other or unknown
  misc_feature (613)..(613): "n" may be a, t, c, g, other or unknown
  misc_feature (677)..(677): "n" may be a, t, c, g, other or unknown
attagatggcatgtcaaaaaatccttcagggaaaaacagagaaactgttccaattaaagataatttcgaattagaggtacttcaggcacaatacaaagaacttaaagaaaagatgaaagtaatggaagaagaagttctcattaagaatggagaaattaaaattttgcgagactcactacatcagacggaatccgttctagaggaacagagaagatcacattttcttcttgagcaagagaaaacccaagcactcagtgacaaggaaaaggaattctccaaaaagctccaatcattgcagtctgaactccagtttaaagatgcagagatgaatgaattaaggacaaagctccagaccagtgaacgagcaaataaactggctgctccctctgtttcccatgtcagtcctaggaaaaacccttctgtggttataaagccagaagcatgttctccacaatttggaaaaacatcttttcctacaaaggagtcttttagtgctaacatgtcccttccccacccctgccagacggagtcaggatacaagcctctggtgggcagagaggatagtaagccccacagtctgagaggtgactccataaaacangaagaggcccanaaaagctttgttgacagctggagacagagatcaaacactcaaggttccattttgataaacctgnt

SEQ ID NO: 1782 - DNA, 782 bp, Homo sapiens
  misc_feature (624)..(624): "n" may be a, t, c, g, other or unknown
  misc_feature (642)..(642): "n" may be a, t, c, g, other or unknown
  misc_feature (732)..(732): "n" may be a, t, c, g, other or unknown
  misc_feature (748)..(748): "n" may be a, t, c, g, other or unknown
  misc_feature (762)..(762): "n" may be a, t, c, g, other or unknown
tcagttaagcttcgtaacaaccctatgtcttctctttatagttaagaaaactgaaccttagagaggtgaagaattcgtccagggtcataaaactagcaagtggcaaaattgagatttaaacactgctaggtgttaccttaggatctaaacttttaaccattactccaaagtacaggctgggtgcggtggctcacgcctgtaatcgcagcactttgggaggccaagacgggtggatcacttgagcccaggagttcaagaccagactaggcaacatgacaaaaccccgtatatactaaaaacaaaaattagccgggcatggtagcacacacctgcaatcccagctccttgggaggctgaggcatgagaattgcttgaacctgggaggcagaggttgcagtcagccaagatcgcaccactccactacagcctgggtgacagagtgagaattggtctcaaaaaataaataaactacataggaaataaaactacctggaatcttttcttttacaaaatcaatatgacacacatatcggtacttgacaaagacaacatgaaaaattttataagatattaggccgggaacggtggctcatgcctgtaatcccagcactttgggaggccgangtgggagggtcacttgangccaggagtctgaaaccatgcctggccaacatggtgaacgccccattccccatatctactaaaaatttaaaattagctgggcatgggggntatgcctggaatcccncctttgggaggctnagcggtggacactttagggc

SEQ ID NO: 1783 - DNA, 739 bp, Homo sapiens
  misc_feature (706)..(706): "n" may be a, t, c, g, other or unknown
  misc_feature (720)..(720): "n" may be a, t, c, g, other or unknown
  misc_feature (734)..(734): "n" may be a, t, c, g, other or unknown
gtttccccggcaacccgcggccgccgccatggacgcgctgttgggcacagggcctcgccgggctcgcggctgcctgggcgcggctggacccacgtcttcaggtcgcgcggcgcggaccccggcggcgccctgggcgcgcttctccgcctggctggagtgtgtgtgcgtggtcaccttcgacctggagctgggccaggcgctggaggtgagcgggcgcgagcgcgggcgcgggcgggtgggcagggctgcgcctctcggggccagtcccgcctcgcttggggccctcggccgccccgcactctccctggccttcggccgccgcctcctggaggggcctcttctccgggctccagaagcgctccccaggccgaggagggaaggcgagctgctcggagtcggatcttgtcttcacattgggatggagcattttgcataacctaagtggtactctttcgatttttcccagtaaatgtctcacatctcccccctccattccccaccggagcagtgacaccttcatcccctcagtggctcccgccagagtcccgggcttaccctccgctccgcatcccatctctgggcataggcgaggctgacggtccttctgcaacaaaggtctcggatccgttcctttgctgcatcactgatgtcatccccaccccagcttgcaccccaaaagttcaacctttgggggctcttctgcttnaaaacccttgcagnggcttccttggttnaacct

SEQ ID NO: 1784 - DNA, 669 bp, Homo sapiens
  misc_feature (554)..(554): "n" may be a, t, c, g, other or unknown
  misc_feature (612)..(612): "n" may be a, t, c, g, other or unknown
  misc_feature (645)..(645): "n" may be a, t, c, g, other or unknown
  misc_feature (659)..(659): "n" may be a, t, c, g, other or unknown
ggtttgggaggcccaggcggcggagcctccgggacggcgagcggcgggcggcggaggaggagacggcaggcattaaaaaatatttaatcattcatgtgttgagactcattcttgagttatggatgacaaggcttctgttggaaaaatcagtgtctcttcagactcagtatctactcttaatagtgaagattttgtcttggtttccaggcaaggagatgagacaccatctacaaataatggaagtgatgatgagaaaacaggactcaagattgtagggaatggaagtgaacagcagctgcaaaaagagctagcagatgtactgatggatcctccaatggacgaccagccaggggaaaaggagcttgtgaaaaggtcacaactggatggtgaaggagatgggcctctttctaatcagctctccgcttcatccaccattaaccctgtgccattagtagggctccaaaaaccagagatgagcctaccagtgaaacctggacaaggagattctgaagcttcaagtcctttcacaccagtggccgatgaggacagcgtanttttcagtaaactgacttacttaagctgtgcctcggtaaatgctcccaggaattgaantggaaacccttaaggatgatgtccatcttaagnaagccagtggtcanatttcactta

SEQ ID NO: 1785 - DNA, 785 bp, Homo sapiens
  misc_feature (769)..(769): "n" may be a, t, c, g, other or unknown
  misc_feature (775)..(775): "n" may be a, t, c, g, other or unknown
  misc_feature (778)..(778): "n" may be a, t, c, g, other or unknown
gcagcggcggcagcagctgggctcggtgtaaacaagtccaggcgcctgcgaacccgggcccgggggggacggcgcccgccaggagcgccccccactcccaggccagcccaccccggcggaccgggccccgcgcgcccaggcgaggtgaggcccgcgccgtcagggctccacagcagaccgggctcctcttgtgaccggcgtctctcctttgcctcctagagaatctcgatgctggcctggagcagaaactgagctggaccactggagcctcggtgaggggtctgtaccccacctgggaaaggcagtgggtggctggggctatgtggacagggaggccggaggtatctagaactgccatgtggtgtctgcaaggctctgtccagccaggtttcaaccgtacctgtcactctgccacccccgcgccccaggtgagccccggagtccaggtaaggctccgcgatgcaggtaagagcccctgagcgtagaggaggccttggcgcccgcaggtgagagcccctcccctcctaggtgaccctcaaccttcacggcgaggcctcctacctcctccaggtgggggaccctctccccgatgaaccccctaaaccaccagtgaaccccactgctcttcagatgaggtcgcaaggaccaaccagtgctacccgccatgctccccgaaactgggaactgacaagccagcccttcaaagcccttctcagttcagttgcaggtcacaaggtgaggcggaacaggcggtgattacctggactcnagctanttnccatgat

SEQ ID NO: 1786 - DNA, 639 bp, Homo sapiens
  misc_feature (605)..(605): "n" may be a, t, c, g, other or unknown
  misc_feature (625)..(625): "n" may be a, t, c, g, other or unknown
  misc_feature (631)..(631): "n" may be a, t, c, g, other or unknown
aaaattgttattattttaagatgttgctatgtcattgaaagtgagttttgttattagctaaatcataagatgcttctaatatttctttgttcttactataaatcctctattagtaatgcataaaagcatgcaactccaaatgtatactaaaacaaagctttgttcatgttcactccctcagggcagaatttgggttttcctgctttggggtcccgtagggctttgtccatacctctgtctgcctgttgtatttaagagccagtttatataggtctgttctctcgcctagtctgtgagctgtttcagggcagagaccatcttacacacttctgaatgtcagccacttagcctagtaccagatatgggatggaatcagagtcatttttggtggaactcattttaatctatcagcttcagcaattcactgtccaacagtgctgtttgtagaccccccaaaaagtggggaaaaaaaaaacacacagaagaaaagacagatgtggggacaagctgcagcaacctgcagggatattttaggagggccctgtccccttaggtgcacattaaacagttaaagggaagttcatctataagcccagagacccttngtaaccataaatcccctttnctgcanaaaacccc

SEQ ID NO: 1787 - DNA, 468 bp, Homo sapiens
  misc_feature (287)..(287): "n" may be a, t, c, g, other or unknown
  misc_feature (351)..(351): "n" may be a, t, c, g, other or unknown
  misc_feature (444)..(444): "n" may be a, t, c, g, other or unknown
  misc_feature (452)..(453): "n" may be a, t, c, g, other or unknown
aatgtatttatcttcattgaacagtcgtcttcagaactgttctttttttcttgagacagggactcatgctgtcacccaggctggagtgcagtggcgcaatctcggctccctgcagccttcacctcctgggctcaagcaatccaaccccttctgcctcccaagtagctgggactgcaggcgcgagccaccatgtccagctaatttttgtatttttttgtagacatggggtttcaccatgttgcccaggctggtcttgaactcctgagctcaagtgacctgcctgcctnaaccacccaaaatgctggaattacagtcatgagctactgcaccccatccagcggaattgtcagntctgaggtgacaaatgttccccaaaatcactatgctatgcaaagacatgcattaaaaaccacagggagtctaggcacagtaactcatgcctgnaatcccanngctttgacaggctga

SEQ ID NO: 1788 - DNA, 742 bp, Homo sapiens
  misc_feature (669)..(669): "n" may be a, t, c, g, other or unknown
  misc_feature (717)..(717): "n" may be a, t, c, g, other or unknown
  misc_feature (725)..(725): "n" may be a, t, c, g, other or unknown
ggtgcaattattgtcattgttgttatttatcatcatcagtatcattacaaaggctcagctggaaggcctgaagtgcccattatacacatagggaaactgaggcccagagaggggtcaaggcttgcacagagttgcccctgggggaaggaggcaggactcggactctggcctcagtttccccacctgagaaacaggccacataactctagtgacctcctgggggaagggcagtcaggcccttgggtggggcttaggcttgaccactggccacctgaggtaccttggaactctggccctgagtgcctcgctattctctgccttctgtgtgtcactgtgccccatgagtgcctccaatgtccttctgtattcccaccctctaccacactgttcccaatctgtgtttttagggtgctcgcttgtcccccaccctctgccctctgtcctatctcctgactgatacctgtattacctctcaccgggccctcaatgccccagcctcatgacctactcttcctggactgtctgtgctcccagccagccttgtcccatcaccccagccttgtatgtgcaccttcagggcccctgtccctctgacacccccatcctgccccccacaggaacctgcttgtacgtgtaccccgcacagcctcaacttcagcaagccgccanggcttcgtgcgcaaccttgctgtgccagtgcagtacatgacaggcgangaccccanccaggctcttgccggca

SEQ ID NO: 1789 - DNA, 770 bp, Homo sapiens
  misc_feature (601)..(601): "n" may be a, t, c, g, other or unknown
  misc_feature (647)..(647): "n" may be a, t, c, g, other or unknown
  misc_feature (724)..(724): "n" may be a, t, c, g, other or unknown
  misc_feature (763)..(763): "n" may be a, t, c, g, other or unknown
  misc_feature (765)..(765): "n" may be a, t, c, g, other or unknown
tatatcttagtcctatgacttcctttgcctctccacatatacacagagggaaattatttaatatttaatccaaactgctcaattttctttttctttttctttctttttttttttttttgagacagagtctcgctctgtcgcccaggctggagtgcaatggtgcgatctccgctcaccacagcctccctagtagctgggactacaggcgcatgccccaacacccagctaagttttgtaattttagtagagacgggtttcactatgttggccaggatggtcatggtctgctgacctcgtgatccacccgcctcgacctcccaaagttcaattttcttaaaagtgaccaccaacaccatcaacatatgtttatagactagatgtatcacttgtttacccaaattgtagcataaatatctgtttttagaaagcttttccataagtctttctatatgattggattattaagcaaggctatgattaggaaataaaccactttcccctttagctagttctaatgaaagctttccaaattaaacactgtgtttgaacacttcttccattcatagcatgtgctcatcaaaaagtgctttccgtttctggnatgtcaactgtactatttataacctagttaacaaagcccacatggngaaaccttatctctactaaaagtgcaaaaattagccaggcatcatggcacatgcctgtaatcccagctacccaggangctgaggcaagagaattgcttgaacctgggaaggtggangntgcgg

SEQ ID NO: 1790 - DNA, 819 bp, Homo sapiens
  misc_feature (771)..(771): "n" may be a, t, c, g, other or unknown
  misc_feature (801)..(801): "n" may be a, t, c, g, other or unknown
  misc_feature (803)..(803): "n" may be a, t, c, g, other or unknown
tggtaatgactggattctggcactttatggttatagaaaccacttttatatattttgatttcctcccctaatgcttaattatctccatgtggacattatgatagagtgtcattgaaggtattaaaaatgtaattaattgcttaacagttatatcttgtgaaaacaatgtggaaatctttttacatttttaatttttggttcaaacaaacctaactaatcaaagagcagccacaaaaatcctcaaaatgcaaattagacacaataatgtacagctaccaattacagattttagtgtttttgtattccacagcaacaaactgccaagtcttaaaaaaaaagaagtcaactaaagcattctgttgttccctgagctctactgtatattctactggaagattttaagctctgtcatggacatatgactagaatcacaaattttttaaaaagtgttcagacaaggcaaatatctaactatgagctatagaagttaaatatattgagtatgtcagtgtttgcattttatttttggatggtatagaattttattagttttctataataatcattgcttatactggcttacagtgatttactgtattaacataagctttttatacagatctgagattgtatctaataagatgactagagtcatgaccatttagttaatctaaaaaatgaatagatttttaaaaaattaatttcagtggtcttttatggtatagagtggatggagtctaacaaaattttaaaatcttggcaccaaaaaangattcccgaaaaagattttggcataatggntntaataattaatcctct

SEQ ID NO: 1791 - DNA, 785 bp, Homo sapiens
  misc_feature (722)..(722): "n" may be a, t, c, g, other or unknown
  misc_feature (749)..(749): "n" may be a, t, c, g, other or unknown
  misc_feature (755)..(755): "n" may be a, t, c, g, other or unknown
gaactttatagttttttcaaaatggcagatacttgccttatcagagcagaaggttagcttggtgattgtacaagtgttgtcaatttctagtttatacttaatattcctttttctcacctgctacttacatcaccaaacactcacacagtctgattataaaatattgagactgacagtcatatagaaccagtttcataacctcattaccatgtacacccagctcagtacctctccagactgcaaaccctttgagggttccggcctggcttttctttatatttggggaaatgttagagaaaacagcatctaaaactggaaaccttgacttaaattagccatttcttctcatcctaaattgagagacatgagttctaaatggcagagaccatttataggagaatgccaaagagagcagaagagaatgggaagcctttcccacagcagaaactttccacagcagagacaatagactgatccctatcacatcccctaaatatttcttctgacacctggatgggttttgacaatcatagaagcaaactggacagagtgccatttacttctgtgccatttcatactggggctttgcacagaataggaaatgcattgtctaggttcctctagacctctaggttcccttctattctcagaagaaacttaagttatgcttgagtataacttgagtaggggccaggtaggggcagcattgtgggattcagccnccaatggtgtgattcaatctggccctntggggnctttgggttcattttaacgggcatttattg

SEQ ID NO: 1792 - DNA, 746 bp, Homo sapiens
  misc_feature (693)..(693): "n" may be a, t, c, g, other or unknown
  misc_feature (715)..(715): "n" may be a, t, c, g, other or unknown
  misc_feature (730)..(730): "n" may be a, t, c, g, other or unknown
gaaagaaaaagaaaaaagaaagagagattccaaccagcctttcttccctggttccctgacagctcagagttaaccattgtgcccctaagcctaacagcagctggagctgatagcctttcacagggcctgccagcagccttggagaaaccacgagcccatttaacaggcaggacgctgaggctctgataacaagtgcggtttcggacaagagcgggagaggagatggagaaacagaccctcgtgcgtggctggtggggatggaacaaggcccagcctggcagcttctcacatggtaaacacggaattaccatagggcccagcaatcccactcctggggatagaccccacagaactgacagcagggactgaaagaggtgtttgcacacacaagtgcacagcggcatgattcccaacagccccagggtggaagccaccccaggcgcccatcagtggataaacacagcatggtccaaccagacagtggaatattacgcagccatgaaaaggaagggaatccagacacgggctacagcgtggatgaaccttgaggacctcacgctcagtgagaggatccagacacaaaaggacgtatcctgtgtgatcccactcctgggaagtccctagagtcgtcagattcacagagacaggaaataggatgagtgagtgccaagggctggggagggggacagggantgagtgtttcatggggacagantttcagtttgggaanaaggaaaagttctgga

SEQ ID NO: 1793 - DNA, 728 bp, Homo sapiens
  misc_feature (664)..(664): "n" may be a, t, c, g, other or unknown
  misc_feature (694)..(694): "n" may be a, t, c, g, other or unknown
  misc_feature (725)..(725): "n" may be a, t, c, g, other or unknown
ctgttagtaaagtgcttagaacagtgctgaacttgtagtcaatcctgtgtaagtttttgttagataaaatagaaaactggctgggcacggtgactcatgcctgtaaacccagcactttgggaggccgaggcgggcagatcacgcggtcaggagttcaagaccggcctggccaacatactgaaaccccgtctctaccaaaaatacaaaaaaattagccgggtgtggtggcagatgcctataatcccagctacttgggaggctggggtaggagaattgctagaacccaggaggtggaggttgcagtgagccaagatcatgccattgcactccagcccaggcgacagtacgagactccgtctcaaaaaaaaaaaaaaaaaaaagaaaaccatacattccaaaaatagcgattgagcattagctctgtgctaggggctgggaacaccaaggagaagcacccacccctgtctagatggtgttgatgggatgccagggaagacttggcggagggggtgatgcccacacggtatcctgaaggaggaatgggcctgagccaggcaaagaggagcagggagggtgtggctagcacttcatgcacaggtctagcaagtgcaaaggcctgggggtcagagagagcaggatgcatttgaagagctgtctacatggntggagcacagcacaggaagagttcatactncacctgtttgctggccatgtgtccatccttncat

SEQ ID NO: 1794 - DNA, 721 bp, Homo sapiens
  misc_feature (697)..(697): "n" may be a, t, c, g, other or unknown
  misc_feature (706)..(706): "n" may be a, t, c, g, other or unknown
  misc_feature (715)..(715): "n" may be a, t, c, g, other or unknown
cacagccagaaacagaagtccaaaaggaaagaaaagccactggagagcagattgaggaaaacaggtggccacggggccaggggcacgcttcttccagttctccatgttggtaatttttctttccttccttaaatatcactgtcaccaagctgggcacctcaaactcctaactgcttcacactcccaggtaccccaaagtcaaggcccatgctagaagaccatatgtggacccggtgacccggagctcgccaggcccatgccaaccacatagatcatgctggaccataccatgtccaggaccatgggatggctggttggagaatgggccctggaacccacacacaagcacagcttggctggtttcttactgagactgtggaggctgctggccccctcacctccagggagaagactcaggaaaggatgtagacactgtaggagttgtaggtgactgggcatggctgtgtctttagcatctttctggggcaattggtaaaagaaatgtatattgctcattgatgcagagacctcctctgtgttggatgctgggcgcacaaacacggataagcctcagcccctgccctcaaggtgttcacagtcacaagggggaagacatgagcaatcagaccatcaatacagggtgatctgttcaacaactgaggggtttatggcagctctggggaagcctggccttcangagatgctncttcctgangcttgg

SEQ ID NO: 1795 - DNA, 853 bp, Homo sapiens
  misc_feature (773)..(773): "n" may be a, t, c, g, other or unknown
  misc_feature (809)..(809): "n" may be a, t, c, g, other or unknown
  misc_feature (840)..(840): "n" may be a, t, c, g, other or unknown
attcagtgggaacactagctctcctttaaatcctttctaaatagatgtggaatttccaggtggttttgatgtggaccttgaaaattcattcccttagtgacaattttatttgattcatgtatttggaataagcatgaactttggagccagacatctggattaagatattagctatactgctaatacactgacttaccttggacaggtttcttaccgtgtctttaaagcagggataataatacacaccttattgggttagtgtgcagatataaggagatgatccatgtaaagtcccaagtataatgccaggaagttagtaggtgattattaaaagttagtcattatttttgtgtctctcttattggtgctgatatcagaagtattataaaaggatattactatagttgatgttactgaaatcttctacaatgagggtgccaacatgtgttcctgagtccacttatcgtcatcaccattgctgccaaagcaattgttatggctttgttagcctccccatttaatttagcaaatactgaactccttaaaccaagctttagttctttcttcccttaagatgaatttgttaatcttaaccctaagatcatatggaattaaaaaagagcccaaatagccaaagcagtcctgagtgaaaagaataaaactggaggcattacactacctgacttcaaaatatattgcaaggctatagtaaccaaaacagcatggtataaaaacagacccataggccaacggaacagaacagagaacctatnaataaatccatatatttgcagccagctgattttcancaaaagggcccagaacataccctggggaaanggacccccttttt

SEQ ID NO: 1796 - DNA, 681 bp, Homo sapiens
  misc_feature (607)..(607): "n" may be a, t, c, g, other or unknown
  misc_feature (656)..(656): "n" may be a, t, c, g, other or unknown
  misc_feature (668)..(668): "n" may be a, t, c, g, other or unknown
aaaaagccagaaccaggcctgtcccggacccgcgtcccggggaggctgcagcgcagagcagcggggctggggccggtggggggccgtttgggacgcgcggagaggtcctgagcgcggtggctctgcgtctcctagctctgatctccaggctacccctgtgattccgcgcagaggtacctctcggaggacgccggggtcccatgggcggcgccgcgcagggcgctaggaccccgcggggagcggaggcggcctcggcccgggagcctggaggacctggccggtcgatccgcccgggctggaaaactttctttataattacttctccaggtcggagcgcgcggcttgctaggcgcgcggggccggcgctgttacccggcgtggagtcgccgatttttttttcctgcgggaccgcggggccccccagactagcggagctggacgccggggcgagcacggggaggggcgcaccgagggaggagacaaacttaactctggggccgggattccgaggcgggggccgcagccctcgaggcccgaagccaccgcttcctcccccgcttcccattcaggtgggcgccaacggcgggagcgagggtgtccaggccgncgggctgcaggtccgagcacgcacagggagaactctgccagtggttcgncgggcgctgtantccccgggatcta

SEQ ID NO: 1797 - DNA, 717 bp, Homo sapiens
  misc_feature (96)..(96): "n" may be a, t, c, g, other or unknown
  misc_feature (660)..(660): "n" may be a, t, c, g, other or unknown
  misc_feature (704)..(704): "n" may be a, t, c, g, other or unknown
  misc_feature (716)..(716): "n" may be a, t, c, g, other or unknown
tgctgcagccacaacaagtgccaccaccaggggccttccagctgccagtgcaggctttccagagccggggactggggaacctgcagtcatcacctnagcaattctggtggcagccaggccagccagggcagcgatgatgaccgtaatgaaaagtgggatgacagctccacactggtggatgagttgagaacaccaggcagaggcatgtacctggtctttgatggttcagtggacctgcactaccattgcagtgcaaagtgcaagagttgaagcttggaaaccttcacctagatttaggaagattcagggaaaagtctggatgtccacgcagaagcctgctgcacgagtggaaccctcatggagaatctctaccagggcagtgtggaggggaaatgtggggttggagcccccacacagagtcccactggagcacttcctagtggagctatgagaagagaaccactgtcctcctgacatcataatggtagatccactggcagcttgcactctcagcctgaaaaagctacaagtactcaaggccagcccttgagagcatctacagatgctaaaccctggaaagccacaagtgtggtgctgccaaggctttgggagcccaccccttgtaccagcacgcccttgatgtgggataggaggtcaaangaagttattttggagctttaagattaatgactgctctgcttggnttttggacttgng

SEQ ID NO: 1798 - DNA, 636 bp, Homo sapiens
  misc_feature (602)..(602): "n" may be a, t, c, g, other or unknown
  misc_feature (621)..(621): "n" may be a, t, c, g, other or unknown
  misc_feature (631)..(631): "n" may be a, t, c, g, other or unknown
aaaaagcgtccaggtttggtgacgcacaactgtagtctgagctacttgggaggcctgaggcaggaggatcacttcagcctaggagttaaaggccagcctgggcaacatagcaagacccctatttccacacaaaacaaatacataaattctagaagatgatctcgaatagtttttaaagttaaaatagccacttaaataggattgttgaggctatccgtatggccacaattatgactgaggctgttctaagagggcagtgaacatgaagtttttatttctcaagaggctagttgtgtgtgtgcatttttttggtaaagaatcctgcctgtgaacattttttaatgaaaggtataggtagaactagaatgagttgtccaaatcctagaatatgtggctacaaaggcatcccttgaattatgtcttttcatttgaaacataagagggcagctttgatgtgtgtgcaaggcggtgcttcctgacaacgtcgggagtgtgcttgtggagcttactacctcgagaggtgatgcaggcacaaaataaaaggcccgagaagggcttgagatgtccatatgtgacagctctcctctccatggctgctgcangcggctctgggtgtttggntaccaccgtnaccct

SEQ ID NO: 1799 - DNA, 723 bp, Homo sapiens
  misc_feature (628)..(628): "n" may be a, t, c, g, other or unknown
  misc_feature (654)..(654): "n" may be a, t, c, g, other or unknown
  misc_feature (690)..(690): "n" may be a, t, c, g, other or unknown
ctctgacaggatccggggctgagggaaggaggcggcggccatggagttgggcgagctgctctacaacaagtctgagtacatcgagacggcatctgggaacaaagtcagtcgccagtcagtgttgtgtggaagccagaacatcgttctcaatggcaagaccattgtgatgaatgactgtattatccgaggggatctggcaaatgtaagagttggacgtcattgtgttgtgaaaagtcgtagtgtcataaggccaccattcaagaagttcagcaaaggtgttgcattctttcctttacatattggagaccatgtctttattgaggaagattgtgtggtcaacgcagcacagattggttcctatgttcatgttgggaagaactgtgtgattgggcgccgatgtgtgttgaaagactgctgcaaaattcttgacaacacagtattacctccggaaactgtggttccaccattcactgtcttctcaggctgcccaggactcttctcaggggagctcccggagtgcactcaggagctgatgattgacgtcaccaagagctactaccagaagtttttgcccctgacgcaagtctagcatctctgcctcatgtcttgaatctgcttgagctctaanatgaacctggggacaaagtgagccantcagcacctacaaagagcttttggggctttgacatntaccacccttcttccttttaaaaaatttcttta

SEQ ID NO: 1800 - DNA, 805 bp, Homo sapiens
  misc_feature (722)..(722): "n" may be a, t, c, g, other or unknown
  misc_feature (734)..(734): "n" may be a, t, c, g, other or unknown
  misc_feature (789)..(789): "n" may be a, t, c, g, other or unknown
gaaagttttcactgcatctcttgtgggatacgtataatgtttggcagatgatacttttaaatgacaataacaatagttatttttcagagagaggaatcaagatagccctgcaaattcagtgtagttgttaattctctgtattcttattaacaagattcctttattcatttatttatcaaatagttatcgagggccttatataccagacatcagtttaggtgtttaggatacattagagttaaaaaaagacaaaaatccctgccctcgtcaacttaaattttagtgagggaaacaatacataataaacataataaatagtaaatgacatggtatgtaggaaagtgataagtgttatgggaaaatcagagggaaagggggttagtgagtgctgagggaatgtgggttgccattgaaatggagtggttagtatatgcttcattaagaaggtgtcatatgaataaagactttgaaagagatgtatgagttaccaactgctacataaaaaactaccccaaaactcagtggcttaaaacaattaaacatttgttcactcatgaatcagtagatctgttagttcttagtctgagccaggcttggtttttctctatagggcttgctcacacagttatggttagctacaggttagctggtggctggctttgctaatcttggctgggttctttcttacctatgaagtcccatctgggacaacttgactcagnctcatatgatcnttaattatccttcagtaaactagcctggacctggtctcttggcacaataggactnctgaggtttgggctca

SEQ ID NO: 1801 - DNA, 781 bp, Homo sapiens
  misc_feature (685)..(685): "n" may be a, t, c, g, other or unknown
  misc_feature (696)..(696): "n" may be a, t, c, g, other or unknown
  misc_feature (761)..(761): "n" may be a, t, c, g, other or unknown
gaaaaacaatgtttttagagacagggtgttgctacgttgcccaggctggactcaaactcctgggctcaagcgatcctcctgcctcagcctcctcagtagctgggaatgataggcgcgtgccatcatgcctgtatgaagtggaaatgaaaggctggtataagctgtaaagtctttttgttcttagagatttttttctcattctaaacattatcagacctgaaaagtatttgtcgtaatgactgagacggtcctggggtaacagcgtcttcttaacggccactttaattggcgtagtttacacctagcctctccgagaactggaggacactggtaatcactattagatattgagtgctgactgtatggcagacacataagcattggtgatctcctgtgaggcaggtattgttattcccaatttatagatgaagaaacagaagtcagtgaggtggagtccgtttttgaggtcacgcggctagtaattggagcctggtttagaaccaagtcagtctcattccagaatccagaaccagtgatttgtaactgatgcacttgtctccaaagggatccagcactgggttttctcatttttaatgcatccattccttaaagcctctgttcacagtcacaaggtgtactttttaaaggaacacagcacacaaatgtgaccgctagtggacagcantggcagcccanttggatggcagagcctggcatgccgactgggacagaaccccagcacacggtgtgatgatggcgtnttcaggcttgaccttcatgg

SEQ ID NO: 1802 - DNA, 420 bp, Homo sapiens
  misc_feature (407)..(407): "n" may be a, t, c, g, other or unknown
  misc_feature (413)..(413): "n" may be a, t, c, g, other or unknown
  misc_feature (415)..(415): "n" may be a, t, c, g, other or unknown
atggctcggtgcagccttgaactcctggggctcggggaatccttccacctcagcctcccgagtagctgggactgcaggcgtgcactaccatgcctggctaatgacattgcttttatgaagcaaaacataggatgttgtcgggcatggtggctcacgcatgtgatcccagtgctttgggagcctggggcgggcagatcacctaaggtcaggagttcaagaccagcctgagcaacatggtgaaaccccgtctctactaaaaatacacaagttagccgggcgtcgtggtgtgcacctgtagtcccaactactcgggaggctgagacagaaaaatcgcttgaacccaggaggcggaggttgcattaagccaagattgtaccgctacactccagtctgggtgacagagctanactccntntcaaa

SEQ ID NO: 1803 - DNA, 697 bp, Homo sapiens
  misc_feature (558)..(558): "n" may be a, t, c, g, other or unknown
  misc_feature (569)..(569): "n" may be a, t, c, g, other or unknown
  misc_feature (672)..(672): "n" may be a, t, c, g, other or unknown
  misc_feature (683)..(683): "n" may be a, t, c, g, other or unknown
  misc_feature (686)..(686): "n" may be a, t, c, g, other or unknown
aattgttagtcaagatggatgtagaaattttccatatgggatgtttctctttgaattcatgttgttaaaatgatttcttttggtggagtgctgatcttttttatgattgtttcatatagataagaacagactacaaaaaaatatgcctttcaatcctgaagagtaacctgaactatacactagttttgtgctttaattttcatttgtaatctgccttcaataaagagttaagctagtggaatttatgtcttagcttgttataacacaaacacgaatatttgtctgcttggcattaaagggtaaagatattccatagctgggaatcttaatctgaggtacgtgtaaacattcagggactatatgatctctgagaatttgtatgttgtaagtctttgtggcagtgtatacatttgtgttgcaacttattaacacatacaccgggctttttttttttttttagaagattcgtagctttcatcatattctcaaaaggtttctgtgacccatgagatggtttacagtatggggaagcatcaaagcacttgcatagttgatggntatatgtgtgngttattatttcagccacccattatcatgtgcttaccaactgcctaacagtgcatacatatgtagaagttttattcttttctcctggtgccatattataccgtntcatttcacancanaaaaccactgc

SEQ ID NO: 1804 - DNA, 750 bp, Homo sapiens
  misc_feature (703)..(703): "n" may be a, t, c, g, other or unknown
  misc_feature (722)..(722): "n" may be a, t, c, g, other or unknown
  misc_feature (736)..(736): "n" may be a, t, c, g, other or unknown
tttttctatgcgatgttaagttttggaggaactagaaatgtttgaccagaggcacccacaatcaggtttccagtatctcaaagcttgtcttgtggataaggagaaaactcaacgggcacaactaggaccaataattgggagtgtgagggtgacaggtttcagttcagtatctgaaaattaggctactagagctgcccaactgtggaacaggctacctgaataggtactgagcacctcatcccgggaggcattcaagtagactctggctgactgccttgatgacagtgttggatgagaagctgtattagtctgttctcgcactactgtaaagaaatacctgagattgggtaatttataaagaaaagaggtttaattggctcatggttctgcaggctgtataggaagcatggctggggaggccacaggaatcttacaatcatggtagaaggcgaaggggaagcaagtacctcttacatggctggtgcaagaggaaaagagagagggggaaggtgctacacgcctttaaacaaccagatctcgtgagaactctattgagagaacagcaccaaaggaatggtgctaaactattcaaaagaaatcacccctgtggtgcaatcaccttccaccaggccccaccttcaacattagggatcacaatttgacatgagatttgggtggggaccccaaatccaaaccatatcanaagctgcttttactgaaanggctttccagtcanaaaactggattggc

SEQ ID NO: 1805 - DNA, 782 bp, Homo sapiens
  misc_feature (651)..(651): "n" may be a, t, c, g, other or unknown
  misc_feature (735)..(735): "n" may be a, t, c, g, other or unknown
  misc_feature (752)..(752): "n" may be a, t, c, g, other or unknown
  misc_feature (759)..(759): "n" may be a, t, c, g, other or unknown
aatacaaactcactggtttgtgaaagataattagattttaattataaagtagtaatacaaactcactggtttatgaaagataattagatccaaattacatttctgacaaaattgggcccctatatgtaattaaggctgtggaacaaaatttggggtaaagtagcctgtagaatgcagatcacgtaaaatattaaatttgacacacagaaaaccaaaagtaaattccctagaaaagacatgtctaacgaacagaatgtaaattccgtagaaactcgggtcctcaaaccacaaagacatttgtctttaaaccaggaaagacttgccagaaaagacaaaaggtcttctgtcatcccaggagagatgtaaggtcctttatttaccagatccagaataaagtcaagaggttctaccttgattttagagggagagagagtcttggcctgacaaaaggtgtgccgtggaagcagagagctccaggggctcatatgagtactgcacaccagttctaagcatcacaaactgtgtccaaaagtaatcctattcaaggtcctacctctggacactcttcatgtcaacctaaataacaaacagagaggggctctctaaaagaaaataatgtttatttgggaatagggtattggaacaggagtncacaggtcatagtaaattggttgcatattcaggaaggtaaaaggaagacaatgggtggttaaagaaaaaatggaggggggattnccttaattgggttttgnaaataantattccttggcctattaagggat

SEQ ID NO: 1806 - DNA, 752 bp, Homo sapiens
  misc_feature (717)..(717): "n" may be a, t, c, g, other or unknown
  misc_feature (719)..(719): "n" may be a, t, c, g, other or unknown
  misc_feature (744)..(744): "n" may be a, t, c, g, other or unknown
gggggggcttactaagggctgcctggaataggatgcataaaatgaactactaggataaaagaactaaccccgtgtccagtaagcccccatgaaggcttccttccatcttctgcacctctgcagctggaaaatgcttttttagaatggccttcctaaaaaacgagcgagtggatgctgccctccagtggccaagtgtgcccttaaagcatgtcagaagaggaccaggaagcaaaatcaaacccttcccccctgcttcttcccagtgcttcacagactgctcctaatgggaatactgctggggtattcctggggtgctgaaggggcttggatctgtgccacaaagggacagcagaagcaacaaggtgcatttagcaggagaaaaacaatagctaacatttgctgagcgcttactttgcattggcctaaatctcaaatgattgacatgcctttaatcatcacacataccgttgttatctcaacttaaaaaaacaaggccaagctatgtggctaatgcctgtaatcctagcactttgggaggctgaggtgggcagattgcttgaggccaggagttcaagaccagcctagggaacatagtgagaccctgtctctacaaaaaaccacaaaaattggccaggcatggtgggcacgtgtctgtagtcccagctgctacttgggaggctgagaagggagatcccttgaaccccagaaggtagctgnantaagctatgatcactctgcacccangctgaaat

SEQ ID NO: 1807 - DNA, 760 bp, Homo sapiens
  misc_feature (745)..(745): "n" may be a, t, c, g, other or unknown
  misc_feature (757)..(757): "n" may be a, t, c, g, other or unknown
  misc_feature (760)..(760): "n" may be a, t, c, g, other or unknown
gttaaaaatgcagatttctggacttccacagtctaccaaaccaaaatagatggcaatgaggcctggcaatcagcactttaaaaattaaacaggagtttctggtagtgatatgaaattggggaggtgatggcaggaaagggaaagaggggaaagatggatttttctgataatatttggtaaaaagttggtatcatctcctaaaaatatataactgaaaggaagcaaggaggatggagttaaacaggctatttgtgaataaaaacaataataaaataaactttagaaaatctacatgtggaacttactagaggagcttagatccaaggttctatgtttttgaaaaatcacttttcctttttgtgtttggcgtcactgagtatgataggatggactaaatctttctatctaagagtgttctcttggaataaaactgggggttgagaaggtgtgggaactctttagggccccatcaggtgtgctagaatagtaacttgttaaacagaaacccacgaggtaaatacaatgttccaaagcaaacacttgctcccaggaaatagcttatgcactatgagaatctttcgagaatcatagaatgttggagctgcaagggacctcaagagatcatcaaatccaacctcttccttttaaggaggatggaattgaacttcccgtcaggcaagtgacctgctcaaggtgtgaccagcaaggtccccaattagaactggggacttagaaccccacgggnttcctggtggcnaan

SEQ ID NO: 1808 - DNA, 730 bp, Homo sapiens
  misc_feature (665)..(665): "n" may be a, t, c, g, other or unknown
  misc_feature (675)..(675): "n" may be a, t, c, g, other or unknown
  misc_feature (705)..(705): "n" may be a, t, c, g, other or unknown
ggcagccgcagaagcggcagcggcggcggcgcggcgcaggcaccggcccggggagaggcaccatgagcggatcacagaacaatgacaaaagacaatttctgctggagcgactgctggatgcagtgaaacagtgccagatccgctttggagggagaaaggagattgcctcggattccgacagcagggtcacctgtctgtgtgcccagtttgaagccgtcctgcagcatggcttgaagaggagtcgaggattggcactcacagcggcagcgatcaagcaggcagcgggctttgccagcaaaaccgaaacagagcccgtgttctggtactacgtgaaggaggtcctcaacaagcacgagctgcagcgcttctactccctgcgccacatcgcctcagacgtgggccggggtcgcgcctggctgcgctgtgccctcaacgaacactccctggagcgctacctgcacatgctcctggccgaccgctgcaggctgagcactttttatgaagactggtcttttgtgatggatgaagaaaggtccagtatgcttcctaccatggcagcaggtctgaactccatactctttgcgattaacatcgacaacaaggatttggacgggcagagtaagtttgctcccaccgtttcagacctcttaaaggagtcaacgcanaacgtgactncttgctgaaggagtccacgcaaggagtgancacctgttcaaggagatcacagcct

SEQ ID NO: 1809 - DNA, 783 bp, Homo sapiens
  misc_feature (729)..(729): "n" may be a, t, c, g, other or unknown
  misc_feature (775)..(775): "n" may be a, t, c, g, other or unknown
  misc_feature (777)..(777): "n" may be a, t, c, g, other or unknown
aaaaaaaaatggaaaaagagaaaaaagtaaaaagtaggtaagaaaaaatgaagaaattaggaagtatgtgtttgtatacagcctgccactaccgattatatttaatattcaaatgtgtaccttttaaaaatcaaagttcaaacttacagggtacttagagatttaaaagggaacaagtcatcagttcctatctcaaaactggcccatttacccttctttcctctttctcatttctgatcctggaaacaaaattattttctcatacaacatcgagagcattgcagacaatgtattatagtgagcaagtatgtgcggtagaggcagattctgagtttaaatcctgattctgctagtagttgttgactttggacaaattattaaccactaaggtttccgtcattcatctgtaaaatgaggataataacacttttcctgtaggagtattttttaaaacaacatgtaaaaagtatgtattgtagtgccagcgcataaaagtaatttgttaaaatcgtttcctccttttgtctgccctttcttttccaatcctactgctataacatgaattcggggatttatcgtcttgtatctactagacaccatggcagccttcataccaattgctaacttcccttctccattccattccaagcacttctattcaatatgtttcctttaatccagattttcatcagttttgaagcacatcataatcctttaaaaattcctcangccaggcacaatggcagatttctataatcccagcactttgggaagncnaaggta

SEQ ID NO: 1810 - DNA, 894 bp, Homo sapiens
  misc_feature (705)..(705): "n" may be a, t, c, g, other or unknown
  misc_feature (795)..(795): "n" may be a, t, c, g, other or unknown
agcctcggggcttgacgggattgtggcggtcctctctcccaattcggaagctacagctacctccggacgctctcaagatggcgacctctctgggttccaacacctacaacaggcagaactgggaggatgcggacttccccattctgtgccagacatgtcttggagaaaacccatatatccgaatgaccaaagaaaagtatgggaaggaatgcaaaatctgtgccaggccattcacagtgtttcgctggtgccctggagtccgcatgcgtttcaagaagactgaagtgtgccaaacctgcagtaaattgaagaatgtctgtcagacctgcctcttagacctagagtatggcctgcccatccaggttcgtgacgcaggattgtcttttaaagatgacatgccaaagtcagatgtcaacaaagagtactatacacagaatatggagagagagatttctaactctgatggaacacggccagttggcatgctggggaaagccacatctaccagtgacatgctgctcaaactggcccggaccacaccctactacaaaaggaatcgaccccacatttgctccttctgggtgaaaggagagtgtaagagaggagaggaatgtccatacagacatgagaagcctacagatccagatgacccccttgctgatcagaatattaaagaccgttattacggaatcaatgatcctgtanctgacaagcttctaaagcgggcttcaacaatgcctcggctggacccaccagaggataaaactatcaccacactatatgttggtgggctangtgatccattactgagacagatttaagaaatcatttctaccagttcggagagatcccgacgatcactgttgggcaaagacagcatggcttttatcagtt

SEQ ID NO: 1811 - DNA, 885 bp, Homo sapiens
  misc_feature (690)..(690): "n" may be a, t, c, g, other or unknown
  misc_feature (746)..(746): "n" may be a, t, c, g, other or unknown
  misc_feature (798)..(798): "n" may be a, t, c, g, other or unknown
  misc_feature (805)..(805): "n" may be a, t, c, g, other or unknown
  misc_feature (864)..(864): "n" may be a, t, c, g, other or unknown
tttaaattaatgtgtatttctcttctctctctctcacatacacacacacagccatttaatccaagctttcattcaaaccaaggatctttccacaaaatccctgagagtcaacttttactgtttactaaaactgtcttcactgtgtggagcttacttctttgtgaagcttggtgtttcatttggacaggccaatttatggaaagctgtccttcatactgaactgaaattgatcttttcatctgtgcctatcattcctggaatcaaatgagataccatatcctgaaattttttgaaatggcaaagcactgaataaatataaaatatattaatgtcagttctactgtatagagtttgaaaatttgacaagcacactgtcctctccaagtcattggaatagatgaatatgagaacagaacaagagagatactctgcacaggttttggaagtgctcctttcaatttgatattaatccattaatcagtattctttaaactactctatttaagcagtgagaggcagggaccaggttaagccaagacctagagaataaaaacaaagccaaagtagaaagaaaaccaggacccaccaccaccccaggcctgcagcaaatacatcagtgttcactcaaggcccaaggacccttcagtcagcttgtgatgaatactgttgagcctgggactctcccttcangacagtgctcccctctagcccaggaaaagtccagtaatacccatccatgtgccaangcctcgaatcatggaccccaagagcccacttgggtctctatccctctgtggncaatatnggacctaagcttcaaggacaaaagtcgggtttactctttcccctcctttcttaagcccnaagggtctcttcatcataacc

SEQ ID NO: 1812 - DNA, 722 bp, Homo sapiens
  misc_feature (574)..(574): "n" may be a, t, c, g, other or unknown
  misc_feature (579)..(579): "n" may be a, t, c, g, other or unknown
  misc_feature (675)..(675): "n" may be a, t, c, g, other or unknown
  misc_feature (699)..(699): "n" may be a, t, c, g, other or unknown
  misc_feature (701)..(701): "n" may be a, t, c, g, other or unknown
actatccttgagtgtttcactacgtattaaatttccacaatgcatcactagagcctatattgtatctgtggacactctttaaatgtggacatttaagcaaaagtcgaaagaataaatctagaaataaaaatgaatgtgaaatttgatgagaaggattggctcctgctgcaaataaatttctgttcattatacattacagtcagtggtattctattatagcagcatgaaatggtctaatacatctgatcaagaatggagaatctcagtcctatgaggacaaagaggcttccatgacctactaagttgcctggtattgttcagtctctcctgcaggctctttgtcttgtagcctaagtatctcttggtagaaaaaagaagtctcaggacaggtgggtgaggagatgcactctcatgtcttaagttcagctggtgctatgctgggggctactgtttgatctggagaaacaatgggcctatctgggctgccttctgctactatgtcatgggggaaagaagtactggatatggatggccttcctctcaggtgggaggacacaaggcatcttgatgttgngttgntgctcaaatcctgggtccccacaccagctcttctatttttaccacctgcagagttctcctttatttgctttttgtaccatttgcagtgcttaaggntgggcctagtgagaaggaaccggnangaagtgggctgggccttcttg

SEQ ID NO: 1813 - DNA, 832 bp, Homo sapiens
  misc_feature (766)..(766): "n" may be a, t, c, g, other or unknown
  misc_feature (806)..(806): "n" may be a, t, c, g, other or unknown
  misc_feature (823)..(823): "n" may be a, t, c, g, other or unknown
tcgcaatgaatactgtttttatagtgctgtttttcaaaatttctcacctccctaccctttacttcatttggggtctgcattttctttgtatttccccttgcccttactttcttcttataatacgtattacatttctgtagcatttaaacttttgatgaatactttcccctggtactatttcttggatactcacagaaaccctacaaattaagtaatgtccatcttttccagatagtgaatccagtactgaaatgttaaattaattgttcaatattccttagctagtaagtgggaagagccagaattcaaacctatctcatcgctttatacttaaattttttttctatcggtcttttttcagtatttgcgattttattaagaaggaagtttagaccatgggtggcttaacatgccctaataggtgaatttttttttggctttccagatggcttttatttatttgcattgcaaatgctttttttttaaaaagagattttctgaggctcttagttgtttactacttaatattctccactgtcatttctctttaatgacttcattaaaaataattgagcaaagtgttataaagtttgattctatctcctaacatatttttccattattgctaactactatgtaggacagaaaaaatgcttgaagtttcctcaaatagattttattatttaattctgtctgactttaaaagatttgcttcaaaaatgctgttaagcaaaaagtatgcttgaattactaatttaaacacttnctgccagaatgcatttttttgcgaattaaacatggcattncagaagaacatagtggncttatatga

SEQ ID NO: 1814 - DNA, 833 bp, Homo sapiens
  misc_feature (758)..(758): "n" may be a, t, c, g, other or unknown
  misc_feature (765)..(765): "n" may be a, t, c, g, other or unknown
  misc_feature (790)..(790): "n" may be a, t, c, g, other or unknown
ttacgtagatagttcggatgcaaatggtcatttggcttgaatgttctctactttctttgtatggatcttttgccaataaactggttatctgttaccagtaaaacagtccagattttgactctgaatctgaacgggttcactaaatataataacaaaaggaaatatttgtttccccttgatttcctcaactcacgtaattcttgaaacaaacccgtaacgtgggtattattttattcctattttacaggtgaggaaactgagctttagagaggtcaagtctatttttaaatttacacagctccattatttcagtaacagaactgacatttgaaaagcagtctaacttcagaatctattgttttaactattctagaaattaacacgctatagagaatgagcagacgttttgagacagaacttttaaaaaaaagcatttccatgataatcccctgctattcaaaatcaatgacaaaaattgctcgtcattttgttctttcttttccttcactagctatcagttctcatctgggaaaactactaacaacgtatggaatagtttcatgtaaagtatctagtatgaagttagacatcgatgatcataaatttcacttttttgggcattttagataaggagattatccgagtttataacacatagttcaatggaaattaggtttgataagacacaagtcaatgcgatatagtaaacagtagaccatcaaatggtcaaatttcagaagtgttgatattttaatagntatatcntttagtatctatagggggaccaagntttgggttaatatctcctgataccaacccaaaaataagaaatg

SEQ ID NO: 1815 - DNA, 757 bp, Homo sapiens
  misc_feature (529)..(529): "n" may be a, t, c, g, other or unknown
  misc_feature (583)..(583): "n" may be a, t, c, g, other or unknown
  misc_feature (741)..(741): "n" may be a, t, c, g, other or unknown
  misc_feature (743)..(743): "n" may be a, t, c, g, other or unknown
  misc_feature (756)..(756): "n" may be a, t, c, g, other or unknown
ctcacaactgccccatgcccctcaatccacgctcatgcacctgccctgtctctgtctcctgcctccagaccttccgtcataagctggtggagcctgtctgtgctttctggaactacagtatcagatgagtttccatttccaggttcttttttttttttttttgagatggagtcttgctctgttgcctaggctggagttcaatagcacaatcttggctcaatacaacctccatctcccgggttcaagcaattctcctgtctcagcctcccgagtagctgagattacaggcgcccgccatcacgcccaactaatttttgtatttttagtagagacagggttttgccatgatggccaggctggtctcgaactcctggcctcaggtgatccacccacctcagcctcccaaagtgctaggattacaggtgtgaaccaccaaacccagccgttaagatgatttttttaaaaatatgtccactctgcttggggatgaggcaagacttacacatggttttgacctctgttcaccatntgcctttcagggtgactccaggctcctcccagctctaagacaagctgcagcggnaggatgtgttacccagggggtagtgagctccttgtcataggagtatgtgaaggaggaagcactcactctgtgaggtgcctaggaagagaatcatctgtcaaatgggcgttgaacttgatctatctgaggccggggcccgtggactcttgaaggagcanancaggcttcagggnt

SEQ ID NO: 1816 - DNA, 783 bp, Homo sapiens
  misc_feature (724)..(724): "n" may be a, t, c, g, other or unknown
  misc_feature (734)..(734): "n" may be a, t, c, g, other or unknown
  misc_feature (770)..(770): "n" may be a, t, c, g, other or unknown
aaaatacttagcccagggcccatcacacagtaaccaatattaagtgttggctcttagttactatgatatgctctgtcaagcatcaactgacctggtctacttccagtcaataggtagtctctacatggaagccaaataaaagatactgttgtccatatttcagcagagtggtttcctcaggggaggcagagaaggaatggaatcaagagcattacgtagacaggttcagttatatccataatataatttttatttgtctaagtggcagatacaaaggtatttgttagagtattttatctctttctggtgcctaaaatttttcattaaaaaatgctgtaggggtggtttggtttgtgcagtgaaaccacctatgttattcacaaccttgcgagagatgtatcaacagctctggttcagagatgaaaaagtgaggcccagaaggctcttccggccagccttcaaaggaagggctgaaggctcagtggtgactgtgtacatcaaagtggttaggcactatgcagtgtaagcagtggtcatattacatgggactatgtttgaaatcagtaagaatgaaaggcagaataacgttgaactccatttaaataaatgactggggcaaaatatggaatctgatttttttggaaggggggattgagtatcaaagtgtgtattccaataaagtatctggccaatgtgacacttttcaagtgcctaagaccctacnaggccacggncatcggttgcctggtctaccttaactttggctttgnccggccctggctt

SEQ ID NO: 1817 - DNA, 899 bp, Homo sapiens
  misc_feature (737)..(737): "n" may be a, t, c, g, other or unknown
  misc_feature (890)..(890): "n" may be a, t, c, g, other or unknown
gaaagaaatgattcatttcctacttacagactttttaaagccacattcagtattctcactacctctaggttttgctaacatctactttggttagcactagaaaatttaattttttttgtcaggaaagcacagtaataaattgcctactgttgcctaccacaataatgaaagtctgaaataagtaggaaatgcattaagttacccacatgtccagagtaggcaaatctatagagacagaaagattagtgattgcttagaaatggaaatatgaggctgggtgccgtggctcacacctgtaaccccagcactttgggaggccgaggcgggtggatcatgaggtcaggagatcgagaccatcctggccaacatggggaaaccccgtttctactaaaaatacaaaaaattagccgggcgtgatggcagatgcctgtagtcccagctacttgggaggctgaggcagaagaatggcatgaacccgggaggcggagcttgcagtgagctgagatcgtgccactgcactccagcctgggtgacagagcaagactccgtctcaaaaaaaaaaaaaaagaaatggaaatatgagggtgaggacccagtgaatgacaggtaatgagtatggagtttcttttaagggagacaaaaatgttctaacattgattgtggtggatggttgcacaatcctgtgagtatactaaaatccaatgaattatatactttaaatgggtgaattatatggnatgtgaattacatctcgaagtcattttttttaaatgatggggaaatcaaagtctgaaaataagacctgcttaaaagaaatttgacagcgatgttgatattactactttttctgaataataaccataatccttttcagaccttcatcctctttnctaaacatt

SEQ ID NO: 1818 - DNA, 903 bp, Homo sapiens
  misc_feature (774)..(774): "n" may be a, t, c, g, other or unknown
  misc_feature (864)..(864): "n" may be a, t, c, g, other or unknown
  misc_feature (876)..(876): "n" may be a, t, c, g, other or unknown
  misc_feature (893)..(893): "n" may be a, t, c, g, other or unknown
tattcttatctgcattttgttagaagaacacagttaataaagtgggtgtggggaagaaaacagtgcaggagaaggagaactggaagaggaaccagagtggcttgagttatctagtaaagtcttcattgcatgatgtgaccagctctcagaggggcatctaatacagagcagtttagtttaacctcagaaggtcatcagggtgctagaatcatgtcccattttcatggtaattgggcaagactgggaaaatgttttgggaatacacattttatcttccacttccagcagtggcttctaaccactgaggactctccacgttaccaatctctactgacctacctcaagctttgtaaaatcttatttaccgaacaaattacatttttaagtaataattaagcccccccttttctgtagagatatataataactgttaacctggggtcatttttatcgggctttatataattccaacagaaagcaaaggactgtgagtgcttaagttagcctgagcagtaaagaggcttttagacctactgagaatagtttttggattcacattaccactgcttgacctgagactcgatttgggagctagaaactaaaaccagttatgcctttccattgaatagatggaggctgggaggctcgggcttgtctagcttgtagggactcaagggcactttggtcgtgtcacggtgctgctttctctcctgcgcgagcctcatacttgctttctctggtgaatggtaaaagccagcctcttggttgctattnccggggttagaatttcaattccttttttaaaactctggttagatcagaaaccattcagacacttcttcagaaaccctttgggggaaggtntgacttgggatngaaattggagagttganaggaggagaa

SEQ ID NO: 1819 - DNA, 843 bp, Homo sapiens
  misc_feature (760)..(760): "n" may be a, t, c, g, other or unknown
  misc_feature (773)..(773): "n" may be a, t, c, g, other or unknown
  misc_feature (833)..(833): "n" may be a, t, c, g, other or unknown
atgcggcggcgtggtgaaatagatatggcgaccgagggggatgtggagctggagttggagactgagaccagtggaccagagcggcctccggagaagccacggaaacatgacagcggtgcggcggacttggagcgggtcaccgactatgcagaggagaaggagatccagagttccaatctggagacgggagaaagaactggcaaaagtcactatcaagaaggaagatctggagctaatagtgagtggtagtgcctaactagtgtatgcggaggggaggctattctgcttaatttgggttgtttcctgaaacaagcggagtcagtatatttggtggcacattaatgcctgggaacctatgtaacatgatttttttctgcagatgactgagatggagatatctcgagcagcagcagaacgcagtttgcgggaacacatgggcaacgtggtagaggcgcttattgccctaaccaactgatgcgtgctttctcaaatatacctactggattaatttatggcaataaaatttttttttgtctttttcagttttatcatcttgggtcaagtagagtgtatactatatcctatgttgtggagaatttatatgttggagactaactgaatttaagtgacccattaaaatctagcacacctgtatgaaaaatcagtgtagaagaatacctcatgtgcagatgctaggtggcaggccagtctcattcatctgactagctctcaacagtattcaaggtacatctggagtctnaacagagttctgnactcaaatggcatgtgtcttccaagacagcttatgaatatctaaaaaggccacttcctgnctaggaccct

SEQ ID NO: 1820 - DNA, 765 bp, Homo sapiens
  misc_feature (680)..(680): "n" may be a, t, c, g, other or unknown
  misc_feature (736)..(736): "n" may be a, t, c, g, other or unknown
  misc_feature (758)..(758): "n" may be a, t, c, g, other or unknown
catgcagcgcggctgggtcccgcggcgcccggatcggggaagtgaaagtgcctcggaggaggagggccggtccggcagtgcagccgcctcacaggtcggcggacgggccaggcgggcggcctcctgaaccgaaccgaatcggctcctcgggccgtcgtcctcccgcccctcctcgcccgccgccggagttttctttcggtttcttccaagattcctggccttccctcgacggagccgggcccagtgcgggggcgcagggcgcgggagctccacctcctcggctttccctgcgtccagaggctggcatggcgcgggccgagtactgaaagcacggtcggggcacagcagggccggggggtgcagctggctcgcgcctcctctccggccgccgtctcctccggtccccggcgaaagccattgagacaccagctggacgtcacgcgccggagcatgtctgggagtcagagcgaggtggctccatccccgcagagtccgcggagccccgagatggggcgggacttgcggcccgggtcccgcgtgctcctgctcctgcttctgctcctgctggtgtacctgactcagccaggcaatggcaacgagggcagcgtcactggaagttgttattgtggtaaaagaatttcttccgacttcccgcatcggttcagttcatgaatcgtctncggaaacacctgagaagcttaccatcggtgtctatactacacgaaggtccaagctnctttcctggaacctgtgtggangcaacaa

SEQ ID NO: 1821 - DNA, 790 bp, Homo sapiens
  misc_feature (734)..(734): "n" may be a, t, c, g, other or unknown
  misc_feature (758)..(758): "n" may be a, t, c, g, other or unknown
  misc_feature (762)..(762): "n" may be a, t, c, g, other or unknown
gcaacccggaaggtccggcgtcccagccgcctacctcgctgggaccctggtcttgctgtcccccgctggcctcctgcccaagcgactgcggccaggatgggccggaaggtgaccgtggccacctgcgcactcaaccagtgggccctggacttcgagggcaatttgcaaagaattttaaagagtattgaaattgccaaaaacagaggagcaagatacaggcttggaccagagctggaaatatgcggctacggatgttgggatcattattacgagtcggacaccctcttgcactcgtttcaagtcctagcggcccttgtggagtctcccgtcactcaggacatcatctgcgacgtggggatgcctgtaatgcaccgaaacgtccgctacaactgcagagtgatattcctcaacaggaagatcctgctcatcagacccaagatggccttggccaatgaaggcaactaccgcgagctgcgctggttcaccccgtggtcgaggagtcggcacacagaggagtactttctgcctcggatgatacaggacctgacaaagcaggaaaccgtacccttcggagatgcggtgctggtgacatgggacacctgcattggaagtgagatctgtgaggagctctggacaccccacagcccgcacatcgacatgggcctggatggcgtggagatcatcaccaacgcctcgggcagccaccacgtgctgcgcaaagccaacaccagggnggatctcgtgactatggtcaccancaangacggtgggatttacttgctggccaacc

SEQ ID NO: 1822 - DNA, 717 bp, Homo sapiens
  misc_feature (502)..(502): "n" may be a, t, c, g, other or unknown
  misc_feature (575)..(575): "n" may be a, t, c, g, other or unknown
  misc_feature (694)..(694): "n" may be a, t, c, g, other or unknown
  misc_feature (696)..(696): "n" may be a, t, c, g, other or unknown
  misc_feature (717)..(717): "n" may be a, t, c, g, other or unknown
gagctcgcggcagtacggggagcgcccgcccgccccgccctggacccaaccaagcgtcccgcggaggggtgcggccacttgggggcaggagaaagcggagtacgccacccctctagggacccaggaagcgaggcgagcctcaggtggacgcggtggtgtggaccacggcgatcagggcctttccccctgctgtggagacggaggtgcgaggggacgccggcggctccccaccttctggccgagtggccttctccgcctccggctggactccctcggggcgctccctccagagccgagtcgggctggccgggggcggctgtttggcctgagtgtcgtcttactaaagcggaacgccggaggggaggccactccgagagaaggcggtccccggcggaggtggcttcgtgaatcctgcagccccctgcccgcccgccactcgagacgccgcgcctcgtgggtttcacgctggatggagggggcgccgccgaggatgcccagcctncccctctaattctacctctccagttcctcaggtagacacagcctctgtctgctgtggttttagtgcccatggnccctcagaaattatttttgtcccctcccgatagtggctttgggggatggagggcgagagatgcaaagggccagtggaagattttttatagcacaagggaatcaaacccggaagatggangnttcattgccaaccttggggtn

SEQ ID NO: 1823 - DNA, 848 bp, Homo sapiens
  misc_feature (795)..(795): "n" may be a, t, c, g, other or unknown
  misc_feature (815)..(815): "n" may be a, t, c, g, other or unknown
  misc_feature (827)..(827): "n" may be a, t, c, g, other or unknown
aacatagcaacactagccattaagtaggcatcaaataacattctgaattaagttacaagataaaaccaagatttggatgacaatgacaatattgtccatcattgttatccaattcctggttttatcttataactggttttaggggcaattctagtgaattgtccctaaaagatgtttgaaattagttccatacacttttcctgaatcaacttaaatattgatttcacaaacaataagatggtgtgctgtagcatgtcattgcactagaaagaaaagaaatactccactagtggggaataatttcaacagaggaaagtgatgaatgttggatgtgagttcggaaaccagaggttgataaagtcttacgattgctatatgcactgtgaggctactgtatttggaaaattgcaaaacaaaatattttttaaagaacaaaaatctggtgagtagcatacacagatttcaaaaataaattgcataacttcatatttcagtaattaaagatttaacaattgtgattttgtggctaaacaaaatatactgaacaattatgtataaaccatggattcaaagctccagaaaattgtcttaatgaggcgtataaactctttttgtttaatgtccacaccaaatcattatggtctgccatttcatgaaataacaagagttttaaaataagtgatgttttttagtttgtgtatctatattctttcctaccaggtatagcacagtgtagtacaagggcctacagttgtaagccttgggaaaagatactggtttggccacatatttcanctatgtgacccttggaaagngggtcttaaaanggacactgtggcccctcaagg

SEQ ID NO: 1824 - DNA, 697 bp, Homo sapiens
  misc_feature (641)..(641): "n" may be a, t, c, g, other or unknown
  misc_feature (657)..(657): "n" may be a, t, c, g, other or unknown
  misc_feature (678)..(678): "n" may be a, t, c, g, other or unknown
atatttgaggcaccatccctgccattgccgggcactcgcggcgctgctaacggcctggtcacatgctctccggagagctacgggagggcgctgggtaacctctatccgagccgcggccgcgaggaggagggaaaaggcgagcaaaaaggaagagtgggaggaggaggggaagcggcgaaggaggaagaggaggaggaggaagaggggagcacaaaggatccaggtctcccgacgggaggttaataccaagaaccctgtgtgccgagcggctgggccagttcatgaccctggctttggtgttggccacctttgacccggcgcgggggaccgacgccaccaacccacccgagggtccccaagacaggagctcccagcagaaaggccgcctgtccctgcagaatacagcggagatccagcactgtttggtcaacgctggcgatgtggggtgtggcgtgtttgaatgtttcgagaacaactcttgtgagattcggggcttacatgggatttgcatgacttttctgcacaacgctggaaaatttgatgcccagggcaagtcattcatcaaagacgccttgaaatgtaaggcccacgctctgcggcacaggttcggctgcataagcccggaagtgcccggccatcanggaaatggtgtcccanttgcagcgggaatgctacctnaagcacgacctgtgcccgg

SEQ ID NO: 1825 - DNA, 835 bp, Homo sapiens
  misc_feature (638)..(638): "n" may be a, t, c, g, other or unknown
  misc_feature (653)..(653): "n" may be a, t, c, g, other or unknown
  misc_feature (791)..(791): "n" may be a, t, c, g, other or unknown
  misc_feature (818)..(818): "n" may be a, t, c, g, other or unknown
  misc_feature (832)..(832): "n" may be a, t, c, g, other or unknown
taggggtacttgaacacaagcactgcgatacagtcatctgataaccgagacagtcgatctgatcaccgagactgctactaagtgactaatgggtgagcagcatgaatatgctggacagagggaggatcacctccagggcagcaaggggcaagatctcatcatgctcctcagaatgctgtgcaattaaaatttatgaattgtttatttctggaatgttccatcaaatatttttggactgctgttgagcgtaactgaaaccatgaaaatgaagccatgggtaagaggggactactgtataccatttctttttttagtctccctgctactctccactaggagaataaaggtgggagaacaaaggggtctggcaggaaggagattgcaaactatgttgtcaattcttgaaacgaatccatgagccctgtgcggaaaccctctaggtctgttcctctcaggacattaaatcattctctttttatttctaatatagtcccatgaatttatttcctaagaaactttagaaagtttacagctttttaactatatgtccatccactatttgacatcctgggggtcatcggcccacccaggagctttcatgatcaagtcaaaatcacaatgtatccattgggcttcanggcagaacatgcgtnctcagatgattgttgtacacagaaaattagggaacacagctaagatcaataccagggagcttccaaatgggagttccattttcattccttcattaaaatcattaaaatccataataattcctgggtagcaattaaacncaaccattggggccacattattaaatnacaccttttgatcnacc

SEQ ID NO: 1826 - DNA, 813 bp, Homo sapiens
  misc_feature (660)..(660): "n" may be a, t, c, g, other or unknown
  misc_feature (679)..(679): "n" may be a, t, c, g, other or unknown
  misc_feature (766)..(766): "n" may be a, t, c, g, other or unknown
  misc_feature (786)..(786): "n" may be a, t, c, g, other or unknown
  misc_feature (808)..(808): "n" may be a, t, c, g, other or unknown
ttctttgattgtttaaccttacaaaaatttagactagtaacttatttcacactgaaaagtgagttccaggaaggttagaggccacagagtataaaaggtaaaaccataaagcctctagatgctaacatagattgctaaaaacttcagggaacggaaagatttcttaaaactaaacagtggaacaatggtatatttaactacattaaaactaaaactttaatttgtcaagacatcatttgagagcgaaaaggccggtcaaggacatgggtaagatgtttacaaatacacagttatcatttgctagcatttaaaatatataaagagttcctaaaaataaggaaggaaaagacagaaaaggctactgaaaattggacagaagcctgaagagcgacaccccagaagagctgacgtaatggccagaagtggtggaaagggctccaccttgcatgtcaccaggcaatgcatgacaaagcccaggccttccccgcagaggccaacgctgaccctcctgacagtggcaggactggaagcctcagtactctggggccctgcagtgaggacacgccctgcccagtcccatggggagaccctagcatatccttgaagggagctgtgtaagcattaggaacccagtccctgcactggaggagctcgtgcacngagggtttgtcacaactgnccccgctggaatagcccatggcacttgcacagtgggatggagaaactggggattcttggtgcctgggaaggtggtgggggctttttnccaggttacattgggcccantggcccaaacctttggggaaanggttc

SEQ ID NO: 1827 - DNA, 804 bp, Homo sapiens
  misc_feature (733)..(733): "n" may be a, t, c, g, other or unknown
  misc_feature (772)..(772): "n" may be a, t, c, g, other or unknown
  misc_feature (776)..(776): "n" may be a, t, c, g, other or unknown
ggctccgggggtggcggtcggacagtgtctagcacgctcagtccgggcttggggccccgcggcggagaaggaggtagagggggcggcggcggcggcggcggtggtggcggcaccatgtttcttcactcagttaatctctggaacctggcgttttatgtcttcatggtctttctggcaaccctggggctgtgggatgtcttcttcggcttcgaggagaataagtgcagtatgagctacatgtttgagtacccggagtatcagaaaatagaacttccaaagaaactggcaaaacgctatcccgcatatgagttgtatctttatggagagggatcctatgctgaagaacacaaaattctccctttgacgggtattccagttctctttcttcctggtaatgctggaagttataagcaagttcgttctattggctccattgcacttagaaaagcagaggacattgacttcaagtaccactttgacttctttagtgtgaacttcaatgaagaactggtggctttgtatggtggaagtcttcagaagcagaccaagtttgtacatgaatgtattaaaacaattctcaaactctataagggtcaagaatttgctccaaaaagtgtggcaataattggtcattctatgggtggccttgttgcaagagcattgcttacactgaaaaattttaagcatgatctgataaatcttcttattacacaagccacacctcatgttgctnctgtgatgccctttagatcggttcattacagaattttantccnactgggaaaccaacttatttgggattct

SEQ ID NO: 1828 - DNA, 776 bp, Homo sapiens
  misc_feature (691)..(691): "n" may be a, t, c, g, other or unknown
  misc_feature (708)..(708): "n" may be a, t, c, g, other or unknown
  misc_feature (776)..(776): "n" may be a, t, c, g, other or unknown
aagccgaggagggctgtttaaaggcgcaggggccattttacctccaggttggccctgctcaggaccaggaggaaacacctccagcccgcgacctcctcccacagggggaaaaggaaagcaggaggaccacagaagctttggcaccgaggatccccgcagtcttcacccgcggagattccggctgaaggagctgtccagcgactacaccgctaagcgcagggagcccaagcctccgcaccggattccggagcacaagctccaccgcgcatgcgcacacgccccagacccaggctcaggaggactgagaattttctgaccgcagtgcaccatgggaagctctgaagtttccataattcctgggctccagaaagaagaaaaggcggccgtggagagacgaagacttcatgtgctgaaagctctgaagaagctaaggattgaggctgatgaggccccagttgttgctgtgctgggctcaggcggaggactgcgggctcacattgcctgccttggggtcctgagtgagatgaaagaacagggcctgttggatgccgtcacgtacctcgcaggggtctctggatccacttgggcaatatcttctctctacaccaatgatggtgacatggaagctctcgaggctgaccttgaaacatcgatttacccgacaggagtgggacttggcttaaaacctacngaaaaccattcaagcancgaggtcttgagaattacttttttgaccgaattttggggcctaacatggttatcttttaagcaaaccn

SEQ ID NO: 1829 - DNA, 777 bp, Homo sapiens
  misc_feature (431)..(431): "n" may be a, t, c, g, other or unknown
  misc_feature (604)..(604): "n" may be a, t, c, g, other or unknown
  misc_feature (753)..(753): "n" may be a, t, c, g, other or unknown
  misc_feature (762)..(762): "n" may be a, t, c, g, other or unknown
  misc_feature (767)..(767): "n" may be a, t, c, g, other or unknown
atgcaaatattagaacgtgacaaataatggtcagcagaccaggtaagagacaggatttaattttctagctcaaattactggtttttaattataaccttgacatctgtaatcattaatattttgggaagcagtcccttttcatgcttatgttacttggatatatacttgttttaattaaaattgggggccaggcgtggtggctcctgactgtaatcccagcactttgggaggccaaggcaggtgatcacttgaggtcaagagttcgagaccagcctggccaacatagtgaaaccccgtctctgctgaaaatacaaaaattagccaggcatggtggcaggcacctgtaatcccggctacttgggaggctgaggcaggagaatcacttcaatgcagagggtagaggttacagtgagccgagatcttgccactgncctccagcctgggcaacagagcaagaccttgtctcagaaaaacaaaaacaaacaaaagctgtatatatttgcaaaaacactatagtagacataccagaccatcagctccctagggctttttatgaaaaacagcagtccttccccactcccctttccagccccttagaagcagncattttcaactctccagttccttttggtatatctctctaaataataagcctcttttgctttacagtgtttggtattatttattaacttcactcctttaaataggggtcgtttttggtaggcttaccttgaccaccttacatgcccaccnttaattgtnacttntggggccagg

SEQ ID NO: 1830 - DNA, 681 bp, Homo sapiens
  misc_feature (610)..(610): "n" may be a, t, c, g, other or unknown
  misc_feature (659)..(659): "n" may be a, t, c, g, other or unknown
  misc_feature (669)..(669): "n" may be a, t, c, g, other or unknown
gattatcagctggagaactgaatggtacacaccttcccccttcttccaacaccatggcccccaagatgctgcacctgccgccgcctcatttagccctacaaccccctgccactcaacattatgcagagggcccaggagggtcttgcagtcatctacatacttccctgcgagttcttggtttggtccctagaaatggcagcctgcatgtggagaaggctgcatgcagcctcaggcctgcccacccgatacgaggtctgcatgtatgagttgtgtgcatcacatagctcctcaccatgctttcctacccaggaggataagctttcctacccaggaggataagctttcctacccaggaggagactcaaggcaaaacactggaaactgtgtttatacaaactccccaagtgattctggcagccagcacagaatgactgtgcacagacactcaggcatcactagctctgggcgccgcgcatttgcctgcttcatccaggacagtggctaacacttcaggtagggcccacatacactcagaataaagagctgcctggtcaggaggggggcagtcagcatggggctaagttttttacagatctctggcagacagtgntgctgctttggctaaagaaggaatgggaaggcaaatgacaaatggcctntaacggtgcnaagaataatggg

SEQ ID NO: 1831 - DNA, 633 bp, Homo sapiens
  misc_feature (356)..(356): "n" may be a, t, c, g, other or unknown
  misc_feature (585)..(585): "n" may be a, t, c, g, other or unknown
  misc_feature (606)..(606): "n" may be a, t, c, g, other or unknown
  misc_feature (628)..(628): "n" may be a, t, c, g, other or unknown
ttctttaaattctacaaagagatacacttcccccaaatacatttactttactgacagcaaagttagtttccatttggaaaagttatcctgtttccaacatcgagttatctctgttgccagaaaatcaaaaggcagccaatccgatttgtaaacctttcctctggcacattgtcaagatctcttgcaaaacgaaattgtcctacagccctcccctcccctgtggctctaagtgcagttctgccccatctaaatattaatattttgcaatcgtgctctttatgagcccctggcagagtggagatacgccacagacgggttgaggagagagtcgtggggaccacctggccagtggctgnggtcttaatggagattgacaagcccaaaggaggtttgcaaataccctgatgcctgcagccggctttgcatccagcagctccctccacagatttacagtggcctctattgtccttgaagagctgcttagaaacaaggttgcaaagctttctccttggggccttgggaaggctggatgaaccctcgcgtctccacctgatagggctgatccaagtgtttctgggtggtggntttccacactggttttatttnaggctatcaacaggtgcttgantgtga

SEQ ID NO: 1832 - DNA, 745 bp, Homo sapiens
  misc_feature (645)..(645): "n" may be a, t, c, g, other or unknown
  misc_feature (707)..(707): "n" may be a, t, c, g, other or unknown
  misc_feature (734)..(734): "n" may be a, t, c, g, other or unknown
  misc_feature (745)..(745): "n" may be a, t, c, g, other or unknown
gaatcattaggaggaaatagctgcaaacctggaaacgtccctggagaatacttaattcaggaataaaggtttggattgatgagggctaaaataaaacttggcagcgacagcattctagtaacttttagccacttctccccatctcactggggtattcctgctggtatattcactagcctgagctctgctcctgagagggctgcaggagctgggtgggttgggagacacaggtgtgtgggaggcgccttcaccaagtgccgcacaattgccgggtacccctctgtgcctttaactggtcggtaaacagaaagcaggatgtgcttatctgaatagtgacaacagttgcaagcactcagtcacaaagttcagcattctggctttagatggaccagcgtggggctctggaagctggtgacttgggagtgcctgccgtacacatgggtggggaagggatggaaagtttagcaaggacttgccgagttattaagcaaagactctgtaagtgcgtcagaatgggaaggcagctcagaacctttccacttcaccctttttgttgttggaaataggtaaactgaggccagtgaacaggaatgtgtatttcaataataccaaagctaacttctatcactgtgagttgtgtgccangccctgggttcactggcttctgagtggtatctcttttaatctctgcccaactctgtgggggnaacactgggggtatacccatttttcanataagggaacn

SEQ ID NO: 1833 - DNA, 664 bp, Homo sapiens
  misc_feature (656)..(656): "n" may be a, t, c, g, other or unknown
  misc_feature (659)..(659): "n" may be a, t, c, g, other or unknown
  misc_feature (662)..(662): "n" may be a, t, c, g, other or unknown
gagtgctcagtagaaaatgggtagccttatgtatctaccctaaaggaaaaaaaaaaaaaaaaagacttgattctcaccacagagctgctttcttatacataagaaattgcttgtagtattcatgaacgacacagccaaacagcaggccggttgtagcccacttcgcctgctcacagcccatctgggcccgcctctgcacacccgggataccccagcttctttccctcaagctgttcatatattgagtcctcccactgtcccacagcagccacttgagggcagggctgagtcttggtcacccgtgtccctagtgcctcgagcagtgcccgacacagacatacagcagaagaaacaaactaaatgagtgagcggtaggagtgctttgaagccaaggggctgagcaatctgtgttggaaaagtgtgagatttttcaagttcagaaactccaccaattttagggtgaccgttggaactcctgaagttttagcgctcagaacatggggacccaaactcgaggagaccccaacctcctctcctggaggcaggggctgctccagggcaagtttccagaagcttccctaccctgtcgagttgccaggccggagtgtgattcaggaggggagaagcagtggctgtcagaagaggctgaaaacctntgnagnct

SEQ ID NO: 1834 - DNA, 759 bp, Homo sapiens
  misc_feature (297)..(297): "n" may be a, t, c, g, other or unknown
  misc_feature (302)..(302): "n" may be a, t, c, g, other or unknown
  misc_feature (414)..(414): "n" may be a, t, c, g, other or unknown
  misc_feature (424)..(424): "n" may be a, t, c, g, other or unknown
  misc_feature (501)..(501): "n" may be a, t, c, g, other or unknown
  misc_feature (709)..(709): "n" may be a, t, c, g, other or unknown
  misc_feature (715)..(715): "n" may be a, t, c, g, other or unknown
  misc_feature (751)..(751): "n" may be a, t, c, g, other or unknown
atgtgtcgaaaccattgtgaaggctaaagaccagcaagctgcagaagcaaataagaatgcgagtattcttttaaaggaacttgatctggaaaagtcaagagaagagagcagaaagcaggctcttgctgctaaaagagaaaaaagaaaagaaaagagaaaaaaagaaaaaagaggaacagaaaaggaaacaggaagaagatgaagaaaacaaacctaaggagaattcggaactaccagaggatgaagatgaagaggagaatgatgaagatgtggagcaagaagttcccatagaacctnctagngcaaccaccaccactacgattggaatctctgcaacatctgcaacattcacaaatgtgtttgggaaaaaaagggccaatgtggtgacaactcccagcaccaatcggaaaaatnagaagaacanaacaaaagaaacccctcctacagcacatttaattttaccagaacaacatatgtctttagcccaacaaaaggcagatnaaaataaaataaatggagaacctagaggtggtggtgcaggtgggaatagtgattcagataacttggacagcacagactgcaacagtgagagtagcagtggtggtaaaagccaagagttaaattttgtgatggatgtgaattcctctaaatacccctcactgctccttcattcccaagaagaaaagaccagtctggtctttcaaaactnagaccnacttgaaggtgaaatgacttctaattccttgtcaanccagtttc

SEQ ID NO: 1835 - DNA, 789 bp, Homo sapiens
  misc_feature (727)..(727): "n" may be a, t, c, g, other or unknown
  misc_feature (749)..(749): "n" may be a, t, c, g, other or unknown
  misc_feature (785)..(785): "n" may be a, t, c, g, other or unknown
gggggagagggtgtgaggctcggagtcgccggaggagccagtatctgtgtcgccgccgcccgcggcgtccccggtttggtgttgcggcgcccaccttcgggaggatcaggctgcttctgatgcttggaagatatcctctcagccacaaagatggtaataaatctttgcctcccacagttcagaccaagaattcactgcaacaagatatcagctgatggttacgaagtagaaaatctcatctctgaagatctcacaaagagaagtcatggtttcaggacagagtatttcattaagccaccagtctatgtgacagtttcatttccctttaatgtggaaatctgtaggatcaacatagacctcacagctgggggaggtcagaacgtcactggcctggaaatgtacacatctgcctcatctagcagagtgtcttggaatacgccccagtgccggaccctgggcccagctgagccatctgtcccagacaaggaggcgttcaccttggtaggcaaagtcttactgaaaaaccagagccaagtggtgtttagccacaggggcttcaaggccaggcccccttttggcgcgatggaagccacactcccctcccctgctgttgtggcccaggagctctggaataaaggggctctttcccttagccacgtggcccacttaaggatctgtatcacccatgtgacaggcggcggtatcccttgtatcaagccgttggaantgtggggtcaagcccggccaanacctggtttccaggaagtgattgacagcattcttgntggg

SEQ ID NO: 1836 - DNA, 720 bp, Homo sapiens
  misc_feature (694)..(694): "n" may be a, t, c, g, other or unknown
  misc_feature (699)..(699): "n" may be a, t, c, g, other or unknown
  misc_feature (714)..(714): "n" may be a, t, c, g, other or unknown
gatgcgcctgtgccggggagggcagaacgctggtgcctggcacaggtgccacaacacatacgggtgaggacactgaaaacccctcagttcccccgactcatggccacttgtcccagtgacacagccatgctctcccactcacccacaatagggtctgaatgtgccccccagattcacagtgagaaactcattccccagagcaacagtgtagtgaggtggaacctgatgggagccccgccctcacagacaaactcctgtagctgtcaagacagcttgggcatggattcctctctgccttctgccatgtggacacgtggccttcctcccctctctcctccggggaatgcagtgtttgggcgccatcttggaagcagagatcaggcctcaccagacaccaagcctgctggcaccatgaccctggactcccaacctccacagctgggaaagaactctgctccctagaaattacccaggctcgctcaggtattctgttacagcagcaccaagagacattcactcgcttactccctcactctctaacccactcccattcaccctctcactccctctctaacccactcccattcaccctctcactccctcgctaacccactcccattcactcattcactcactcactctctagcccactttttttttgagatggagtcttgctctgttgcccaggctggantgcantggcgcgatcttggnttactg

SEQ ID NO: 1837 - DNA, 795 bp, Homo sapiens
  misc_feature (607)..(607): "n" may be a, t, c, g, other or unknown
  misc_feature (734)..(734): "n" may be a, t, c, g, other or unknown
  misc_feature (768)..(768): "n" may be a, t, c, g, other or unknown
  misc_feature (793)..(793): "n" may be a, t, c, g, other or unknown
gatgttagcctgtaaaatgaactacaggaatagctacagattggaaacaacctgtggtggttttaaaatatagctacaaattctttagcactcctctgtagagaggtgggatccttgtaccctctctgaatcttgggtgagctgatgactgcttcaaccaatggagtacggtggaagtaacactctgacttctaaggtccagacataaaagtacaggcaacttctgctagaactctagctcttggagcctgaggcaccatgcctacctagggctccatgtctgcttagaggctgccatgctgtcaggatgccaagaccatcaggagaggacacatgaaggcaccacagtcccagctaagcttagctttgagtcatcccagttcaagcataaaagaagtgagtgaagaagaaccagatgaggccaggcacggtggctcacacctgtaatcccagcactttgggaggccaaggcgggtggataccctgagttcaggagttcgagaccagcctggccacatggcagaaccccgtctctactaaaaatacaaaaatagccgggcatggtggcgtgcacctgtggtcccagctgctggggaggatgaggcangagaattgcttgaacccgggaggcagaggttgcagtgagcccgacatcatgccattgcactgtagaaggcgaaaggggaaaggggaagaacaagatgattccagtgggccagcccttttgaatcaanctttaagccttcaaatcttcaaatctttcctaancttgaagacttcaaaccatttgcanaa

SEQ ID NO: 1838 - DNA, 777 bp, Homo sapiens
  misc_feature (575)..(575): "n" may be a, t, c, g, other or unknown
  misc_feature (682)..(682): "n" may be a, t, c, g, other or unknown
  misc_feature (701)..(701): "n" may be a, t, c, g, other or unknown
  misc_feature (707)..(707): "n" may be a, t, c, g, other or unknown
agcgaaggaatttcgcagagctgaagatcaagcgcctgagaaagaagtttgcccaaaagatgcttcgaaaggcaaggaggaagcttatctatgaaaaagcaaagcactatcacaaggaatatattattgaccaggtcctgcaagggggcccaggtaagaccagcgacatcagtgagccatctccagaatcctccattttatcatccagaaaggagaacgggaggtccaactctttgccgatcaagaaaacagttcactttgaggctgacacctacaaggatcctttctgcagtaagaacctgtccctttgctttgaagggagcccaagagtggcaaaggaatcattgaggcaggatggacatgtcttggcagttgaggttgctgaggaaaaggaacagaaacaggaatcctcgaagattccagaatcctcctctgacaaggtcgctggtgacattttttttggtggagggcacaaacaataattctcagtcttcttcctgtaatggtgctttagagagtacagcccgccacgatgaagaaagtcactctctttcacccccaggagaaaatactgngatggccgattccttccagatcaaggttaacctgatgactgtagaagctttagaggagggagactattttgaagccatcccattaaaagcctcaaaatttaacagcnacctaatagattttgcttntaccanccaggctttcaacaaagttcctttacctctgagacaaaccttgccaggatgctgagcttttgaaaatctg

SEQ ID NO: 1839 - DNA, 698 bp, Homo sapiens
  misc_feature (676)..(676): "n" may be a, t, c, g, other or unknown
  misc_feature (685)..(685): "n" may be a, t, c, g, other or unknown
  misc_feature (698)..(698): "n" may be a, t, c, g, other or unknown
ttgcctgtgtctcatcctcactcctgccagttttatagaatgtaacctcccagcctctgggaatgtttgggagacttgttcatagaggatctgaagagcagtttaaagtggacttacccaaactatcttctggagaacattagtctctttggagataaaatttttaaacatccgctagtccaatagtgttggcaaattccctgtgacactgtagccctctctttgagattgtcaatgtacgttggcatgttaaaggctctgaggagtcctgcagcagttaaaaaattgtttagtctagtgtgcccccagttgtttggccactgaaacccccttttctggaaaaaccagctaacatctggtagtcttttctaagaggtggtactgaagatgatactcatgttacacatttaaaaattctaacatgtgtttttcatgtgtttataaaatgcaactaatgtatcaaacctgtgatttccaggacataattacttaagctaaggaaaaaagaaaacatgagtgaaggaaaaactttagtaaataggccaggtggtaagaggagagagccttgtctgtgagtgtggtctaggggatgctggacctagcttttcagagctaggttcaggcagagctgctctgagatgtaaacactgcagctggggttcttgttgaacccggnaagcacttntgactaaggggcn

SEQ ID NO: 1840 - DNA, 464 bp, Homo sapiens
  misc_feature (37)..(37): "n" may be a, t, c, g, other or unknown
  misc_feature (215)..(215): "n" may be a, t, c, g, other or unknown
  misc_feature (309)..(309): "n" may be a, t, c, g, other or unknown
  misc_feature (324)..(324): "n" may be a, t, c, g, other or unknown
  misc_feature (415)..(415): "n" may be a, t, c, g, other or unknown
  misc_feature (461)..(461): "n" may be a, t, c, g, other or unknown
  misc_feature (464)..(464): "n" may be a, t, c, g, other or unknown
tatgcatttggttattcataatcagattttgttctgngggttaaagttgaataatattttttgaggctcaaattgttctagctttgaccattttgggagctccttccgtttgtctcctgtgttcttctggtaagcccctgccatttttttttttaagtgttaccttaatttcctttactacaaaatattccaggctcatcttgtaacttcgctgncccagccctagagtcaggcacttctccacggagtcctgctttcctttattggagaatgctgtttagaaaccaaggtctggttgctaggtatgtncattgctacagcagntatcattgcttctgggtcctctcagcagacaaagctaggaaacagataatctcagcacctatctgtatatatgtatgctaaagaatatgantttgtactgataacgctaattctgatctaacctcaaaaagccgctnatn

SEQ ID NO: 1841 - DNA, 639 bp, Homo sapiens
  misc_feature (611)..(611): "n" may be a, t, c, g, other or unknown
  misc_feature (626)..(626): "n" may be a, t, c, g, other or unknown
  misc_feature (637)..(637): "n" may be a, t, c, g, other or unknown
gcagtccagctgctctggacgctgaggccccggcttctcttgctggggtgtcgattcgggagggctgagggcgcggccgagagaacggggcggtcaccgccgccgtggcccgcgcgtcccgcgctctccttgcagtgcaggccccagccgctctcgggcgcggcgtgggggaggcggccctgcaggtgcgtacccggggtccgacacgtgcggggcttcctgcgagctgagtccccgctgcgcgtcttcaggcctttgtaagttgtcaaatttcccaccggcccagctcatcgagcttcttcccagctgtgaacaggagggcctgttccctaattcttgccgaaattgttccaactgctggtgttctgcaagatggagccaggaggagagcccacaggtgctaaagagagcagtaccctgatggagtcccttgcagctgtgaaggctgctttcctggcgcaggccccgagtggcagccggtcagccgaggtgcaggcagctcagagcacggagcctgccgcagaggcaggcgctcccgagggagagggccacagaggggggcctccccgggcgttggggtctcttgcctttgtgaaaaccaaggaagccanagagaggccccggangtttccccttnga

SEQ ID NO: 1842 - DNA, 739 bp, Homo sapiens
  misc_feature (628)..(628): "n" may be a, t, c, g, other or unknown
  misc_feature (693)..(693): "n" may be a, t, c, g, other or unknown
  misc_feature (696)..(696): "n" may be a, t, c, g, other or unknown
  misc_feature (739)..(739): "n" may be a, t, c, g, other or unknown
aatctgtgcctggccggagtccagggtaaattagtagcatggtgttagatgttagaaacagaactgttatttgcagtgttaggtctaggatcccagttctagtaggacagccctgcaagacaatcaaccagaagcctccaggagcttctacctatggcttattcacaactgggcaagaaaacatcattggtaagaactgctgagtgtgcccttagaaagccctagtagctccagctgtgactatatcaactgtgtgccaagtgtgactttgtacagttttatgtttccactctcctgtatgtgtagccactcgatgcctaacctaccttccacaagccagccccgcatccctgctcccgcagtgtaagtgcagagcctgcctcactggtaagggaaaaccttggcttgggaggccagccctggcccttgaaggggttggctgtgcccagcccacctggctgcagtgggcagctcatgtctgtatctccaaagtgatgtttgtttgcaaaacaccggctgaactgagctggtgttgccaactcttggcagcgctgggccaaaccgaccacataccatgagctcccaaatggcgtgtgctcactgtgagacgtcctgccacaccccacangagacggagcagtgggcatttggaaccaattctattcagaactttcgtcaaaagccaaagtcaanctnggggtttgcaagttgacaccattttcccaagtttaatggaacn

SEQ ID NO: 1843 - DNA, 642 bp, Homo sapiens
  misc_feature (98)..(98): "n" may be a, t, c, g, other or unknown
  misc_feature (600)..(600): "n" may be a, t, c, g, other or unknown
  misc_feature (625)..(625): "n" may be a, t, c, g, other or unknown
  misc_feature (636)..(636): "n" may be a, t, c, g, other or unknown
aaacgattccccttggtagatgttcttcagtatgcattggaatttgcctcaagtaaacctgtttgcacttctcctgttgacgatattgacgctagttncccacctagtggttccataccatcacagacattaccaagcacaacagaacaacagggagccctatcttcagaactgccaagcacatcaccttcatcagttgctgccatttcatcgagatcagtaatacacaaaccatttactcagtcccggatacctccagatttgcccatgcatccggcaccaaggcacataacggaggaagaactttctgtgctggaaagttgtttacatcgctggaggacagaaatagaaaatgacaccagagatttgcaggaaagcatatccagaatccatcgaacaattgaattaatgtactctgacaaatctatgatacaagttccttatcgattacatgccgttttagttcacgaaggccaagctaatgctgggcactactgggcatatatttttgatcatcgtgaaagcagatggatgaagtacaatgatattgctgtgacaaaatcatcatgggaagagctagtgagggactcttttggtggntatagaaatgccagtgcatactggntaatgtcatanatgata

SEQ ID NO: 1844 - DNA, 815 bp, Homo sapiens
  misc_feature (634)..(634): "n" may be a, t, c, g, other or unknown
  misc_feature (723)..(723): "n" may be a, t, c, g, other or unknown
  misc_feature (760)..(760): "n" may be a, t, c, g, other or unknown
  misc_feature (808)..(808): "n" may be a, t, c, g, other or unknown
aagatacaaaaaaaaattatccaggcatggtggcgcatgccggtagtccaggctacctggcagggcactgagataggaaaatcacttgaacccgggaggctgcagtgagccgagatcacgccacggcactccagcctaggtgagagcgagactctgtctaaaaaaaaaaaaaagcactcagaacagttcttggcacacagtacctgctgaataaaaggtggctgttattattgaaggggatatcacatatcaaggttaatggccctgtcctcaaggagcttatatttgtgcagatccatgcagatgaaccaagccagaagcaataaatgagcaaacaaatgtgatgcaaagtcagtaaggacaaaagtactgaaagaacacagcataatcatcctaaaaattaacaaccataatcaccgcaagccaataaacagatccaaaaatgttccactcagtcatttttttttttaggcaggtaccttggtccttagacaaaagtgagttagaatttgactctgactcccagaggggagacgcttatatcatttggcttcatagaggtgaattaccagacaagcaaagaactcagtgtattccaccactgacctgcctttgggaatgggtggctctgcanggcttcatcaagatgaagagctccccagcagcaccaatgtggaaaccgtcaacatggtgctgagtcggccatgttcaaacagcttgttncaaaagtggtcagtaaagggacccgaccttgggcctnggggaaaacgtttaacatttgggaaaaaatgggggaaaattggccccnaaaaaaa

SEQ ID NO: 1845 - DNA, 663 bp, Homo sapiens
  misc_feature (588)..(588): "n" may be a, t, c, g, other or unknown
  misc_feature (634)..(634): "n" may be a, t, c, g, other or unknown
  misc_feature (642)..(642): "n" may be a, t, c, g, other or unknown
attgggtatccatcccctcaagcatttatcctttgtgttacaacaatccaatttactctttcagttatattaaaatgtacaattaaattattattcagtatagtcacactgttgtgctatcaaatactaggtcttattcattctgatttttttaaatctctattttcttgttataacttactgggtgacagaagaaaaaacaaacaaacaaaaaacccttacaactccatagctcttcaaaagcataactctgttagcttctaatttgaatattaccaaaaggaagactacctgatggagagccacgtctgtgacccaataattcccatctttatctatactcaagccatgtggcaagtaaaacctgcaaaataaaaatatttgttgtttattttgatttttttaaatcagaatgaataaccatcatcctgattaaccaccgccacctaaccccccgccacacacacatacacacacacacaaacacacactcacacacacacacacacacactctctctctctgtcccatacccttcccaggctctggtaaccatccttctgtccatacatctatgagttcaattgntttgatttttagatcccacaaataattgagaacatgtcatgtttgnctttctgncctggcttatttcatctataa

SEQ ID NO: 1846 - DNA, 819 bp, Homo sapiens
  misc_feature (758)..(758): "n" may be a, t, c, g, other or unknown
  misc_feature (793)..(793): "n" may be a, t, c, g, other or unknown
  misc_feature (817)..(817): "n" may be a, t, c, g, other or unknown
gtgctactgaagaccacgtgaggcagtgaatagtgtcactctgtctctcatgcgtagaacgttgataggggtgcagcatatacatgtggagtaattaaatgaggcaaggtgatgtacgatctcaggtataagttaaaatgagtgattcagactcttttgctgtagggttgtatattaagtgactgaagggatgggctgaggtcattcaataagagtgtggaagggccttcaactgacctttgtagaatggcttgggattgaatagtcaggtaggatggaagaagaacttaagcaaaggtcaagttggatttttatgaggagtaaatcgaagcgcagagaggttaaatatccagaagtggaggagctgggattagaacccaggcatcctaatttcagtgcagagaggctggtttaggtggagtcagaactgtgaaatgtcttagagagattccattttatcttggaggtgtttgagttgcctgttgactttttcacatgctttctgcgtattcagcacctctgccttaaaaatctattgcttccagggctcactaggcataggctggtgggtaatcatgggatggtttcaagcaacaaatatttattgagctgtgggtcagtcagcgggcaaatagagaagcataagacatttcactgccctcaacagggaattgacgtaatatattaggttgccattaaaaaaaaaattggcaaagaccacagttgctttttgcaccacctagtaaatgaaattttantatgaatggtctggccagaatgaattttggaccanaggagactacagtactgggattgnga

SEQ ID NO: 1847 - DNA, 833 bp, Homo sapiens
  misc_feature (652)..(652): "n" may be a, t, c, g, other or unknown
  misc_feature (721)..(721): "n" may be a, t, c, g, other or unknown
  misc_feature (810)..(810): "n" may be a, t, c, g, other or unknown
  misc_feature (825)..(825): "n" may be a, t, c, g, other or unknown
  misc_feature (831)..(831): "n" may be a, t, c, g, other or unknown
aactacctattcaaaaaaatcattatttaaaaaaattaaagagaggctaggtgtagtggcttacgcctgtaatcccaacactttgggaagcctaggcggggggattgcttgaggccaggagttcgaggcttgggcaacataacaagacctcatatcttaggaaaaaaaaaaaatggctaggcatggtggcacacacctgtggtcctagctacttgggaggctgaggtgggaggatcacatgagcccaggggttcgagattgcagtgaactgtgattgcaccactgtactccagtctgggtgacagagagagaccctgtctaaacaaaaaagagagagagagagagagagaggaggcagagtgagataactgaatagaagcctccactgattgtcctccctgcagtagcaccaaatttgacaactgtctacacagaaaagtaccttcatgagagccaaaaatcaggtgagcaatcacagtacctggttttaacttaatattgttaaaaggggcatggaaggagtaggaaagacagtcttgaattgaagacaccaccccccaacccctgcagtggccttgtggcatggagagagaatctatacacttccaggagtgagagtgcagtaattgtgagactttgcactggaacttantgctgccaacactgagcagaactcagccaatgcccacagaggaagcctgtggactaaccctagtcagangggaaattttctctcccagcaggcagaactttgagttggctagccttgccaccgcgagctaaagtgcttttggggtcttaaatgactanaaaaccgtctaggtngaaggntg

SEQ ID NO: 1848 - DNA, 820 bp, Homo sapiens
  misc_feature (602)..(602): "n" may be a, t, c, g, other or unknown
  misc_feature (665)..(665): "n" may be a, t, c, g, other or unknown
  misc_feature (701)..(701): "n" may be a, t, c, g, other or unknown
  misc_feature (743)..(743): "n" may be a, t, c, g, other or unknown
  misc_feature (798)..(798): "n" may be a, t, c, g, other or unknown
  misc_feature (808)..(808): "n" may be a, t, c, g, other or unknown
ttcgagcggctgctcagggtcgctccgggttgtgcagctgcccgcccgggacgcaaagttctagtctggccctggatgggaagttggcgtggccgggatgccttctaactttttcccccggtggggactgacgttcctttcgagctgctggcggtgccgccgggcagcgtcgcgccccgcggtcactccccagccctggcccccaagccgggctcggcgcgcgcagcaggttgagggggcgagtgccgaggcgagcggcggtccggcgtcccccgtccctgctctccatctcgggctgaggattcgctgacgcagcaagccggccgatgccctgaggggacgcagccagggcgtgcgggggaaacgctgtgtcatcccctggggccgtcgtccctccgaggggctgccgcctgggaacccccccccagcctcttcctcgctgtgttctccgcggagggtctcccgcgcccgggcccccgcgccgccggggactggctctgggcacacccgctcaggctcttcggggcacggcgacaggggtcctttccctccgggacctcctctggggcgtcgccgactcggccctagactgcggaggcggnggtggaacgcggagcccgggcgcctggttgggcccggagaccggaacccggggaggggcccgntcccgcgccgaataccctcgggcttcccgcgccttnccgaccaatgagaacggaaatttattaggaaacaaggcaganaagacccgttgaagtgaaacccgggctttgccaagggttgggccggcaacccgangcgggccagnaaaagaactttg

SEQ ID NO: 1849 - DNA, 785 bp, Homo sapiens
  misc_feature (561)..(561): "n" may be a, t, c, g, other or unknown
  misc_feature (670)..(670): "n" may be a, t, c, g, other or unknown
  misc_feature (739)..(739): "n" may be a, t, c, g, other or unknown
  misc_feature (759)..(759): "n" may be a, t, c, g, other or unknown
  misc_feature (773)..(773): "n" may be a, t, c, g, other or unknown
gcgggtccgggtgaagcgggaggcagccagagtcggagccgggcccgagcaccaggcgcaggcccggcgcccgcctgcccgcaccctcgtcctcacagacgccacagccatggccatgatggtgtttccgcgggaggagaagctgagccaggatgagatcgtgctgggcaccaaggctgtcatccagggactggagactctgcgtggggagcatcgtgccctgctggctcctctggttgcacccgaggccggcgaagccgagcctggctcgcaggagcgctgcatcctcctgcgtcgctccctggaagccattgagcttgggctgggggaggcccaggtgatcttggcattgtcgagccacctgggggctgtagaatcagagaagcagaagctgcgggcgcaggtgcggcgtctggtgcaggagaaccagtggctgcgtgaggagctggcggggacacagcagaagctgcagcgcagtgagcaggccgtggcccagctcgaggaggagaagcagcacttgctgttcatgagccagatccgcaagttggatgaagacgcctnccctaacgaggagaagggggacgtccccaaagacacactggatgacctgttccccaatgaggatgagcagacccacccctacccaggaggaggggatgtgtctggtcancatgggggctacgagatccggccggcttcgacctgcacaacctgtgatccaatacgcctacaaggccgntacgaggtactgtgccactntgaagcaggcactngaagacctggag

SEQ ID NO: 1850 - DNA, 806 bp, Homo sapiens
  misc_feature (661)..(661): "n" may be a, t, c, g, other or unknown
  misc_feature (746)..(746): "n" may be a, t, c, g, other or unknown
  misc_feature (758)..(758): "n" may be a, t, c, g, other or unknown
  misc_feature (792)..(792): "n" may be a, t, c, g, other or unknown
acacacccgggagacaccgcgaaggcagagcagcgttctcagcacagaccttgtgggcactgcctcgctttgggactactcggagccgcatcaatggtgaataaaatccttcctgtttgcagcccttaataatcagggtcagagaccagttagaagtgttcagtgtggaaaacgggaaaccaaaagcccctctgaatcctacccaccgaggttctccccagccaaggcgaggcggccgcagtgcgagatccacaccgcagcctcggaagacaagcgggcagaaatcccatgaggggcagttggggtttgaggaaggcgaggtgaggcacctgtggcagaaaaaaaaaaaaaccgcaccacggagaagcagagcctgggtccccaacggacaaaagtgtcttcccatcagcccttgcgctgggcccaggtgaccctggcattcctggttcgagaccagggtgcgcttcaggccgctaggggtgcccaaaagcgggcagaaggcccatgaggggaaggtgatgcacctggggcagagaaaaaaaaaaaaaaaaaaaaccgcgccgcctataagcggggcctggctcccccacagaagaaactgtcctcacatcagcgcttgcgctgcgccccagggaccctggtatccctggctcgagcccancgtgcgcctcggcctgctaggggtaccccaaggcagacagaaggcccatgagggaaaggtgagacacctggggcagagaaaaaantaaaaaaactgngccgcccaaaagtgggcctgggtccccacagacnaacgtccttaccat

SEQ ID NO: 1851 - DNA, 725 bp, Homo sapiens
  misc_feature (653)..(653): "n" may be a, t, c, g, other or unknown
  misc_feature (673)..(673): "n" may be a, t, c, g, other or unknown
  misc_feature (714)..(714): "n" may be a, t, c, g, other or unknown
aacggcccggaagtgcggccttgtagtcggtcaggaggaagcggccacggcagagcctggtgcctgaagaggagtcggagatggcggctgcagaggctgtgcatcacatacacctgcagaacttctcacgctctctgcttgagaccctcaatgggcagaggcttgggggacacttctgtgacgtgactgtgcgcattcgtgaagcttcgctgcgtgcccaccgctgcgtgctggcggccggctcacccttcttccaagacaagctgctgctcggccactctgagatccgtgtgcctccggtggtgcccgcgcagacagtgcgacagctggtagagttcctgtacagcggttcgctcgttgtggcgcagggtgaagccctgcaggtgctcacggccgcgtcagtgcttcgcatacagacagttatcgacgaatgcacgcagattatcgcccgcgctcgagccccgggcacctctgcgcccacgcccctgcccacccctgtgcccccgccactcgcacctgcgcagctgcgtcaccgcctgcgccacctgctggctgcacgtcccccggggcaccccggtgctgcacacagccgtaagcagcgccagcccgcgcgtttgcagctgccagcgcccccaacacctgccaaggctgangggcctgatgctgacccctnactgtccgcggccccttgatgaccaagtgacaaggatgacnaggaaagtgac

SEQ ID NO: 1852 - DNA, 837 bp, Homo sapiens
  misc_feature (783)..(783): "n" may be a, t, c, g, other or unknown
  misc_feature (823)..(823): "n" may be a, t, c, g, other or unknown
  misc_feature (833)..(833): "n" may be a, t, c, g, other or unknown
gttgccgttacctgtttccggcagtcgacacgctcttcgcttctcggggcttgtctccgtgtcctccgtctcagttgtttctccctctctatcctcctctgtctcagtctccccagccttggggccggtgcctcttccgggcttcggcgaatgagacctgcggacctgcccccgcgccccatggaagaatccccggcgtccagctctgccccgacagagacggaggagccggggtccagtgcagaggtcatggaagaagtgacaacatgctccttcaacagccctctgttccggcaggaagatgacagagggattacctaccggatcccagccctgctctacataccccccacccacaccttcctggcctttgcagagaagcgttccacgaggagagatgaggatgctctccacctggtgctgaggcgagggttgaggattgggcagttggtacagtgggggcccctgaagccactgatggaagccacactaccggggcatcggaccatgaacccctgtcctgtatgggagcagaagagtggttgtgtgttcctgttcttcatctgtgtgcggggccatgtcacagagcgtcaacagattgtgtcaggcaggaatgctgccgctttgcttcatctacagtcaggatgctggatgttcatggagtgaggtgagggacttgactgaagaggtcattggctcagagctgaacactggccacatttgctgtgggcccaggtcatgggattccacttgcagtcaagggagactgggcattccttgcgnatacctactacattcctttctgggtctttttgctttcaanttccattgtnaaaa

SEQ ID NO: 1853 - DNA, 803 bp, Homo sapiens
  misc_feature (770)..(770): "n" may be a, t, c, g, other or unknown
  misc_feature (775)..(775): "n" may be a, t, c, g, other or unknown
  misc_feature (802)..(802): "n" may be a, t, c, g, other or unknown
agttaggagactgcgtagaaaaaggaaaatgtgtaattttcacagttagaattaacttaggagagctgaaattaactgagcctcggaaatctgaatcttgaagtcaccagtggcttttggggctgtgagagagtctcctgtggtctttaatcatgtgagggtggggtgaaattcaatattcagtggttctgcaatgggatgcactgtgcaattggtgattgagaagccaactctctggctttaggagaagaatgtcttgctgttagtccttctggaaatagagccttgcattgcctactgtctgtttacactacctttgcacattgccttcggttatagagtcatgtccaatggctctttacttctgtttgcagggcaggagatggcaccctgttaaagagaaaggatagtagctgcaaagtcatttgtttctctgtttctgtgactgtatatattggctcatctttgaatggtctttatagccacaccaggctggaggtaacagggtcatgggagtggactgctggtgtgggctgaatcagagttcagatccatgtctccaggaggtaggaggtgcagggcaagtcatgtggcttctggggcatccctcactttcttagttaaggagaagttgaaggagccgatctaaaatatcttgggagtctgcagaaaaagtcgtgaaaatcaaagcactttcaattaaactatataatttaagtccttacaagaatgccccagggcaagcaaccagtcaggccttggtaatccgngcttnctagaagaaaagactgaggttcaaaana

SEQ ID NO: 1854 - DNA, 797 bp, Homo sapiens
  misc_feature (637)..(637): "n" may be a, t, c, g, other or unknown
  misc_feature (657)..(657): "n" may be a, t, c, g, other or unknown
  misc_feature (754)..(754): "n" may be a, t, c, g, other or unknown
  misc_feature (768)..(768): "n" may be a, t, c, g, other or unknown
  misc_feature (787)..(787): "n" may be a, t, c, g, other or unknown
gttcctattcggccatcttggctccacctccctgtatttttctttttaaaattgcatagttgcttaaacttatttttttctctttggatttttaaaggttcactgtatgtatagtcttatatctcagtcgatcttgttagtggcttattgttaaaacatgcagtttttggctgggcatggtggctgtattcctagcactttgggaggccaaggcaggtggatcacctaagcccaggagtttgagatcagcctgggcaacctggtgaaaccctgtctctactgaatatacaaaattagctgggcatggtggcacacgcctgtagtcccagctacccaggaggctgaggcaggagaatcacttgaacccaggaggcagatgttgcagtgagctgggatagagccactccagacttagtctccaaaaaaaaaaaaaaaatttaaagaaaaaaaatgtctacaacatgcactccccaaaaatcttatctaaaactgaacttattatgttctctcctaaatcagttactcgaagttcaccgctctcctggaacctcagaatacaaatcatagtatcttaattgactcatccttttatcttatcaaacccatcatcaaatccagatcattttcctttctctgnctctaattaattcattttgntcagagttgccatgatagtctccctaatatactggttatggctttgccctctgcatccaggcccgatgcctttcgacaaagaatgcacatcacaatnaccctggggacctnttttaaaaacttggacctngggccccatt

SEQ ID NO: 1855 - DNA, 791 bp, Homo sapiens
  misc_feature (598)..(598): "n" may be a, t, c, g, other or unknown
  misc_feature (711)..(711): "n" may be a, t, c, g, other or unknown
  misc_feature (737)..(737): "n" may be a, t, c, g, other or unknown
  misc_feature (788)..(788): "n" may be a, t, c, g, other or unknown
cttgttgttccccgccgccgccgtcgctgacccagcccgccaggcgctcctgaccgtcgcttcctccggtcccaggtccccggccctcgcctcagccccggcccctggtccccagccctcgtcgcagccccggccgcccgccgccgccatgtccaaggaggagcgccccggtcgggaggagatcctggagtgccaggtgatgtgggagcctgacagtaagaagaacacgcagatggaccgcttccgggcggctgtgggcgccgcctgcggcctggcgctggagagttatgatgacttgtaccattggtccgttgagtcatattcagacttctgggcagagttctggaaattcagtggaattgtcttctcacgtgtgtatgatgaggttgtggacacatcgaaaggaatcgcagatgtccccgagtggttcaaaggcagtcggctcaactatgcagaaaacctcctgcggcacaaagagaatgacagagttgccctttacattgtaagggaaggcaaagaggaaattgtgaaggtgacttttgaagagctgaggcaaggagtggctttgtttgcagcagcaatgaggaaaatgggtgcnaagaaaggagatcgggttgttggttatttacccaacagtgagcacgctgtcgaggcgatgctggcttgcggcaagcattggtgccatctggagcttcacgttcccggactttnggtgtgaatggtgtgctggacccggnttttcttaaaattcaagcccaaagcttaatcttctcttgtggaaggcttgntgg

SEQ ID NO: 1856 - DNA, 780 bp, Homo sapiens
  misc_feature (663)..(663): "n" may be a, t, c, g, other or unknown
  misc_feature (732)..(732): "n" may be a, t, c, g, other or unknown
  misc_feature (761)..(761): "n" may be a, t, c, g, other or unknown
  misc_feature (778)..(778): "n" may be a, t, c, g, other or unknown
aaattgatggtaatgaaggagggttgtgccatgaaaatacaagagatttcctattgtaaccttgttgcactgtggattaaattgaagatgcacagtggactcctgggggtggaggagagtttggaggtcagagggctcttgtcttgagctccaagtggtgctctaagtctaggataaagattttacacagggtggggcaggtggacagccagatcttcatttattcttaccaagctcttattaagtcatgtgggtgggatttactgttaaggaaggcagagcctacctgtccccatagggctggcatcctattggaggtggcactagccacttaactagttaagtgagtgatatttgggtagggtgcccataactctgatacgatctgccttgcgattctgctcctgctagtggagtgtgggggaggcctggtcttggatcttgttcctcacagctggttcattcaggaggttagtgctctgctgaggaggctggaggcagagctccatcttggcctggctggctagtttctgttcaggactagagctagcacctgtagtcttggcaagccattttagaaatctaagttgttggtccatgtaatgtcctggtggttgaaccaacactcgttctttgccattcctgggcaggtgcttggagaangctggtgagctgtcatgttttttgaagaatggtgcatcagtagcacaagggtttccctggtctgctgangcctgttgctgaactttggggtgccctgncccctggtttaattccngg

SEQ ID NO: 1857 - DNA, 752 bp, Homo sapiens
  misc_feature (678)..(678): "n" may be a, t, c, g, other or unknown
  misc_feature (697)..(697): "n" may be a, t, c, g, other or unknown
  misc_feature (735)..(735): "n" may be a, t, c, g, other or unknown
gagtgcatctcccagtctgcagtgaagaccaagtttgagcagcacacggtccgggccaagcagattgcagaggcggttcgactcatcatggactccctgcacatggcggctcgggagcagcaggtttactgcgaggaaatgcgtgaagagcggcaagaccgactgaaatttattgacaaacagctggagctcttggctcaagactataagctgcgaattaagcagattacggaggaagtggagaggcaggtgtcgactgcaatggccgaggagatcaggcgcctctctgtactggtggacgattaccagatggacttccacccttctccagtagtcctcagggtttataagaatgagctgcaccgccacatagaggaaggactgggtcgaaacatgtctgaccgctgctccacggccatcaccaactccctgcagaccatgcagcaggacatgatagatggcttgaaacccctccttcctgtgtctgtgcggagtcagatagacatgctggtcccacgccagtgcttctccctcaactatgacctaaactgtgacaagctgtgtgctgacttccaggaagacattgagttccatttctctctcggatggaccatgctggtgaataggttcctgggccccaagaacagcccgtcgggccttgatgggctacaatgaccnggtccagcgtccatccttntgacgccagccaaccccagcatgcccccactggcacanggctcgctcacccagga

SEQ ID NO: 1858 - DNA, 810 bp, Homo sapiens
  misc_feature (618)..(618): "n" may be a, t, c, g, other or unknown
  misc_feature (677)..(677): "n" may be a, t, c, g, other or unknown
  misc_feature (700)..(700): "n" may be a, t, c, g, other or unknown
  misc_feature (784)..(784): "n" may be a, t, c, g, other or unknown
  misc_feature (794)..(794): "n" may be a, t, c, g, other or unknown
  misc_feature (808)..(808): "n" may be a, t, c, g, other or unknown
atggagataaaagagagtgtgaggagtcagcatacttattttcattttgattttagttcttttatatcattcatcctaatatttccctgtattaactaattccaactttttcagtgatgcctattttgtctttagtttctttctttctttatttaagatggactcctactgtgttgcccaggctggagtgcagtgctgtgatctcttgactcactgcaacctccatttcccagactcaagcaattctcctgactcagcctcccaagtagctggtgaggcacgtggggcagagaaaaaaaaaaaaaaaaacaaaaaccgcgcgagcggagaagcagggcctgggaccccacagacgaaagtgccttcccatcagcccctgcgctgggcccagtggaacctggcgtccctggttccaccccagggtgcgcctcaggccgctagggatacctcaaggcggacaaaaggcccatgaggggaaggtgaggtttgagggaggataggtgaggcacctgtggcagaaaaaaaaaaaaacgcgccacggagaaggggggcctgggtcccccacacacgaaagtttcttcccatcagcccctgcgctgggccccgtggaccctggcnacactggttggagcacagggtgagcctcgggcctgataggggtaccccaaggagggcanaaagcccatgaggggaaggtgangcacctggggcagagaaaaaaaaaaaccgcgccgtggaaaaaccggggcctgggtcccccacgggccaaaattgccttcccatnaggcccttgngctttggcccttgngg

SEQ ID NO: 1859 - DNA, 785 bp, Homo sapiens
  misc_feature (745)..(745): "n" may be a, t, c, g, other or unknown
  misc_feature (784)..(785): "n" may be a, t, c, g, other or unknown
ttgtttttcctgatctttgctgtttttcttcattatatctctgagacatacatatgtaaatctaattaatctattgaattcatgtgaaatatacttaaagtgtaattttatgtcctttttttagataagtaaatttcagatactacttttagcagaacacattttttaatgtgttggttataaagtgatctgtaggtaaaggaatctgaaaaagcaaatgctcatgtgttagaaatgagtacctttagttgcctctggactgttttctctttgctatcctatgagggttacatgaaacaatcccattcctttgacatttcctcacttttgggttctctcatcccttttagagtaaggcactgctgattaggcctgtttccagggcaatttcttgctgctctcttatttttagttttgcttgttttgttatcataggtttgaaatgtaagtaagcggctcagaatgacctggttcttgtagctaattcagtaagcatttattgagggcattgtacatcagtccaacaaagaaagaacacatcggaatatttgcattatatttaccagttcagcatccaaaatccaaaaatctgaaatctgaaatgcatcagtgagcatttccttcaagtatcatgcagattttggagacttttggatttgggatttgggatgcttaaccttcaatagtgagtttatgtaacttaaaatgtactaaatccaacaaaaactgactgaaaatatgtcangtggttgggaatttttctttggaagcaatcatttatggnn

SEQ ID NO: 1860 - DNA, 720 bp, Homo sapiens
  misc_feature (623)..(623): "n" may be a, t, c, g, other or unknown
  misc_feature (712)..(712): "n" may be a, t, c, g, other or unknown
  misc_feature (718)..(718): "n" may be a, t, c, g, other or unknown
ctgttgcttcccgtctcctcggcggctcccctcccccgcccggctctccgcgccccttctgggcggcggggcggcggagccgtcggcgtgcggccctccttgcgttcgtgcgtgcgcccgtggcccggcgcacgtcccgcgacaccgaggccgagcggggcagggggctgaccgccatgaccccccagagcccggcgtgagggggccgagatgcggtgacctgccagcacctgccgcagccttcgtccgggagtcgccccatctctccacgcatcggggccctgtgccccttgctgctgcagccgggcaccatgtcgacctcgtccttgaggcgccagatgaagaacatcgtccacaactactcagaggcggagatcaaggttcgagaggccacgagcaatgacccctggggcccatccagctccctcatgtcagagattgccgacctcacctacaacgttgtcgccttctcggagatcatgagcatgatctggaagcggctcaatgaccatggcaagaactggcgtcacgtttacaaggccatgacgctgatggagtacctcatcaagaccggctcggagcgcgtgtcgcaacagtgcaaggagaacatgtacgccgtgcanacgctgaaggactttcagtacgtggaccgcgacggcaaggaccaaggcgtgaacgtgcgtgaaaaaactaaacaactggtgggccttgntgcgcnaa

SEQ ID NO: 1861 - DNA, 749 bp, Homo sapiens
  misc_feature (708)..(708): "n" may be a, t, c, g, other or unknown
  misc_feature (738)..(738): "n" may be a, t, c, g, other or unknown
  misc_feature (740)..(740): "n" may be a, t, c, g, other or unknown
gatatttacaaagatttgtaaagaagaccaggaaataacaatgttaatagtacttctaactgggttgtaggctatattaatagaattggggcttaatggggcatagtaacagcgtagaaggttaggtacatacagtcaaaaagatggacctttcaccagctgaagctagattggggatgtgtctgatgtgcatgtctacactgcacctgcaaatttgtgactcctgaattaaacatgcttccctccccctcctcaggtcactcacacagcaagtcttccctggtaagaggaaggtgaaggtagttgtccccttagagcaggacactccaaaagacagcctgaagaggttttgagcacccgctctatttggcatccttgtctcactctcccatgcatggctttgctgcctccgtgaggagtcagacgggaagaggtagagagtggctggaaaggccctgctcttccctttgctggggacatagacctgtgtgtcccttttctaaagtggggagtgatcctccctaacttgtagatgatgttcactttgttcttgtttttggtcttttcaaataccttccacagtgaataatgtgtataaattgaaaactggaagaaagaaaagggagttcagatttagttctaaaatggttaacttggccaggcgccatggctcatgcctataatcccagcagatgggtttaggccgangcaggaggatcacttgagcccaggagttcnanaccagtcca

SEQ ID NO: 1862 - DNA, 750 bp, Homo sapiens
  misc_feature (4)..(4): "n" may be a, t, c, g, other or unknown
  misc_feature (658)..(658): "n" may be a, t, c, g, other or unknown
  misc_feature (691)..(691): "n" may be a, t, c, g, other or unknown
  misc_feature (750)..(750): "n" may be a, t, c, g, other or unknown
cagnaactctatagagaaataaagggttttcccaatcctggaaaaaaatggttaaaattgtaaatcttacatatattttaccatagtaaaaaatgaattaggctgggcccatggctcacgcctacaatcccagcactttgggaggctgaggcaggcaaatcgtttgaggccaggagttcaaaaccagcctggccaacatggcaaaactcatctctactaaaaatacaaagaaaatagccaggcatggtggcacacacctgtaatcccagctactcaggaggctgaggcatgagaattgcttggacctggaaggcagacattggagtgagctgagatcttcccactgcactccagcctgggtgacatagctagactgtctcaaaaaaaaaaaaaaaagaatgaacacttaaatatttgtggcagatagaggtgttatttgcatatggaagaaaattgctttagaaatgaaatttctgattactgaaactaaagagaaagtatctcttcttatcatggtaccaagcttgagggtgcataagtcacctatagacgtaataagcattgagtttcattttttgtttgtttttgagacaggttctcactgttacccagcctggagtgcagtggtacaattgtagctcactgcagcctggacctnctgggatcaagggattcccccaacctcggcctnccaagtagctgggactatagaaatgcaacaccatgcccagataatttaatttttttttn

SEQ ID NO: 1863 - DNA, 886 bp, Homo sapiens
  misc_feature (554)..(554): "n" may be a, t, c, g, other or unknown
  misc_feature (559)..(559): "n" may be a, t, c, g, other or unknown
  misc_feature (761)..(761): "n" may be a, t, c, g, other or unknown
  misc_feature (822)..(822): "n" may be a, t, c, g, other or unknown
  misc_feature (886)..(886): "n" may be a, t, c, g, other or unknown
tttactaaatgtttcatttactgaattgtttcatttattccttaaaacaactcagctctattctcggagccgttacttgcagctcagcattgttataaggaataaatgaaacaaaaagtacttaacatagtgcctccacataagatgtcacaagctgctaactactatttttgttatgcattgtctgaagataagtcacaaagttggttcttagctttcaggtaactaatagtgaagggagaaaagcaaccacttaaagaatttacaggccgggcgaggtagctcacacctgtaatcctagttctttgggaggcagaggctggtggattgcttgagctcaggagttcgagaccaacctggtcaacatggcaaaaccccatctatacaaaaaatttgcagggcgtggtggtgcgggcctgtagtcccagctacctggggggctgaggtgggaggattgcttgagcccaggaggtcgaggctgcagtgagccaggatcgagccactgcattccagactgggtagcaaagtgagaccctgtctcaaaaacaaaacanaacanaaaaagaatttatagtttccaaggtgaaacaaacaaaccagctgcttaggagaacacagctgattttaacatgttctgaggagcacaatttttcttgctggtactcatgaagaaaacatcttacttcatatttaaaggtatttttaatgtgaatagagtcaaaataatttataaaagtggtcttgggggtccagattgatgnggtctaattatgaacctctgtgatcggacttaattcaaagatagattttgaggggctagangaatggattgaactttaggaattctatggatatgggtctcttctctgggcttttgaaaaggcan

SEQ ID NO: 1864 - DNA, 747 bp, Homo sapiens
  misc_feature (653)..(653): "n" may be a, t, c, g, other or unknown
  misc_feature (671)..(671): "n" may be a, t, c, g, other or unknown
  misc_feature (726)..(726): "n" may be a, t, c, g, other or unknown
gaaacagaacaacaaggtgacagccttttgctcaagtcaaaaagaaaataagtccctcatcttagtttaaagttgttcattcagtagtacagacttgcatttgaagacttattcttgatcttctgtagctttgacagcaaggacatcactacaatgggtacagaaataacacattctgatccttgctgagatccttgtatgggcctatcttaaatctagcctattgtctgtcttaccctttgatttttataagtagaaaacaggaaaaggctaaccaagcaagaggaaggcatagattcatcttcctttcaatcttgactatagtttaaagagaataccatgatctttctgttctattcttggcttacttgaatatttagccaggtctctgcatcttattcagtcagaaaacagacacagattcagataactcaaaggatgttacttgcttgagtaatccttgggcctcgctttaactttgtagatccaggaacagaattaagcagacagttcggtctacactgccaaatttcttagggaaaaagagggcaagtcagaaggaggaagttggcatttggctcaaatgaccaaattatttaagggctctacacttcactttgcaccaagtagacccaagaatgattataattcanctacgtgtggtggtgcanatcagtagtcctagctattcaggaagctgaagccggtggaatgggttgaacccangaatttttaggcttgcaatga

SEQ ID NO: 1865 - DNA, 887 bp, Homo sapiens
  misc_feature (796)..(796): "n" may be a, t, c, g, other or unknown
  misc_feature (806)..(806): "n" may be a, t, c, g, other or unknown
  misc_feature (845)..(845): "n" may be a, t, c, g, other or unknown
ttgcattgtcaggtaaattgcctttttttctgtgggacgtcatcaaaaaggcttgaaaaacactgctggaatcaatttatcctgttttctattcttctgaatgctaattttttttccttgagccattctactttcatttcaatcatgaaatatttccaactggccttgattaatgctttaacttttcaaagaaaaaacacccacacacatctcagtagaaaatatggtgaactgaagatgatatttggttttcaaaagaaaagtttggccaaatgttctgcattgcatttctgaggcacacacaggagcgggtgccagggtatttgactgtaggtaagtgaacaaggagctatacagatagaatggcacggggtttgacagtaatcagaacaccacatcagaacacttgattgcacttcaactctcatgctgtgtttgccccaaataatcttaaaaattgtgactatatcgaataagttcacaatacttattaggatgtggtgaaactgaattatttgaagtaggaagacccgaagttcttcgcctatgagactggtgaagtgatttgtagccaacatgctccaacccatctattaagaaaactatggcatctattaagaaaattcaaaatcttaaacagagaaatccatatttagaaaacatggccagattaaatagggggtgggttattttcttaaatacgttttgtcaatttcacgtgaaaaatgaaaacccctagtcatgttacatattacatttctggtaagatgtatggtcctctggttctaataaaaanttgtggtggnttgggaagtgaaaaatgaatgtgaaccccaggccctgtnaaaggaaggagaaagtgtaaaggttaatacccggaaaactga

SEQ ID NO: 1866 - DNA, 711 bp, Homo sapiens
  misc_feature (235)..(235): "n" may be a, t, c, g, other or unknown
  misc_feature (418)..(418): "n" may be a, t, c, g, other or unknown
  misc_feature (561)..(561): "n" may be a, t, c, g, other or unknown
  misc_feature (643)..(643): "n" may be a, t, c, g, other or unknown
  misc_feature (662)..(662): "n" may be a, t, c, g, other or unknown
  misc_feature (692)..(692): "n" may be a, t, c, g, other or unknown
tgttatttttattgttgtaatgttactttattttctaatattttctgtttgcggttggttgaatcctcagctgtggaacctacagatacagaaccacagatttggagggccacattgtatatgtactattttgtgacttattttgaatatttctgcatcattaagtattcattattttttctagactataacttgctttgtctactgtgtaaatatgccatgatttatttgtagntaattttttacagttaataacactaggatgaactgttagcctattagccaatctttgactatctctggcttgaaacagcatatcacttatatttgtttggagtagatagagcaaaaagtaaagaaatgattattattaaataggacatatcccatttatcagcagatggttacagtagttcanactcttttacttctgacccagaacagatcgggagcaatgtaactcgtcaaaggtcagtatttctgtcaatgaaaagcatgttaaactatcttgctgcgttttaatgtttaaaactatttagaaccaagcacaaatgattttgntctctgaaagctgttaggttactttttgatttatgtaaaagacaagtaattttgatcctttccaacttgaatagaaaaacanaaagaaccctgactttctnaatggtatgctgtggaagctctaaaaagangtgataacttcttgacgat

SEQ ID NO: 1867 - DNA, 868 bp, Homo sapiens
  misc_feature (801)..(801): "n" may be a, t, c, g, other or unknown
  misc_feature (843)..(843): "n" may be a, t, c, g, other or unknown
  misc_feature (864)..(864): "n" may be a, t, c, g, other or unknown
agtgaaagggaagattgggagggaaggggtaggagataagaatatctaagcaaggctgacattgtggggaccatcaaatactatacttagttcagttacagatagctatggaattgaaagtttctcagggaaaagggaaaaagatgtaccaaaggaaataaccaaagtatagaaaagaatgttctttgaaatgaggagaaaaaagatgagtttttgagagtgtatagaaagaaaagtagcaaggttttaggcaaggttaaatactagaagttagaaataaatcaaaatctaaaaaggcatatataaagtataagtgtaatgagaaaattgagcagtttcatttttgttgtttattagtgtcaacagaatttgaaataattttcaagctgattttattcattgtttacctccttaattatataatagaaataagtagcttgtgtttcttatgaaaatttacctgctacttgatgtatcttttttcagtgcacggtagtaaaatcagttgtatatatcctgtctaacatcagtatgcatattatactatactgtacatttaattaggagtttattagctgttggcttaaatgagtttaaaactactttatgatcacatttggctcaatgaatttggatttgagactaatctttacatacccaagatgataatgttcttgtctgtcttagaagtaaagacaccaatattcttcttaccttcctttttatatcctatttccttatctacatctctaatatgtaccctattcaatttcaagtatttggtttttttttaatggtcantgtcctactttttcgaaatcctgtttcttctattaatatagncctatctgacaaaagtccgcnaata

SEQ ID NO: 1868 - DNA, 875 bp, Homo sapiens
  misc_feature (664)..(664): "n" may be a, t, c, g, other or unknown
  misc_feature (754)..(755): "n" may be a, t, c, g, other or unknown
  misc_feature (865)..(865): "n" may be a, t, c, g, other or unknown
  misc_feature (867)..(867): "n" may be a, t, c, g, other or unknown
  misc_feature (875)..(875): "n" may be a, t, c, g, other or unknown
aattaggacctcagggaaggaccttcaatagagagctttcatttcctgccagcattttaatcactctggggtttaaagtggatggccggccagcataatggccctatgtttaatagaacagcttgtatcttgaaggccagttaagggatctgtcatccgcccaatatttgtcttttctgtttcctgtccatttatgaagatcacccacccttttaggtggcttccctggatcattttgtaggggagctgctgccactgcttcttaaagaggctgaacagaaacccagttgaatgtggtccagtcttcagcccacgcagggaagttctgcagagtgctttaattagacacgaagttcaccacatttgggagttgattccatcagttgtagagggactgtgtcagatttcacaaaaaatatagaattggaagaagattaaaatttatccatatctcagaattattggcacctattgacctgatatgtgctcacatcatcactgtggtggatgttaatgtcatcctgtcatgcacaggagtaacttatctcctgaggggtgaagtaacctggtgggtttgatcctgttgtatacaaaggaaattcacaatttttctaatacagtggcttgttaactctgaaggcaggcttcctttggaaccctttanaaatttacctttatagtttatgagatgatatccagaactcctaaaggagtaaatattggagacaagacttgaaagagagagccagcagtnngaagtaagggttctgaatttctttccaactcatgcctaatgggtaagataagataacatcagtaaaagcctgagaatcactaagtttcatgtaggactgccttgaaatgntnttggaccn

SEQ ID NO: 1869 - DNA, 827 bp, Homo sapiens
  misc_feature (761)..(761): "n" may be a, t, c, g, other or unknown
  misc_feature (790)..(790): "n" may be a, t, c, g, other or unknown
  misc_feature (799)..(799): "n" may be a, t, c, g, other or unknown
aacttaaatatattctttcccccaacagggttaatcatctcattttagtggagccttggggtttccctgaacgaccagaccttgctgatcaagacagaccaattccagtttggatcagagccttgggagcagcattgactccctttaaccctttagctggcctaaggattgcaggaccctttggtgagtgcttatgttctaggaaagcaaaatgtttgtaagttatgagaagagcagaattcactattgttagtcaaaatcttaaaaacaaacaagaaaaccctgaacccttactttttctcctcttcctctaataagtaccatgtcttgcacaaagacgaatgcaactaggttcttctcctcaaaggagagtctttatattgtaaacattgtgaataattagcaaagtagaaaaggagggaatgctgaggataaggttagtcagtcctcaacactctaaaaaaagccaggcaagcagagtgttttggggagtatataaggacctctgctagtccagggcctgggagaagtgtagcatgttgccctgctggtgagcactggagagcgtttggccaattgatgataccatttggtaccataaaacctgatttgattgaccctggggataacaggtaccaccacactcacagattcttcccttatccatgtcagagtgttggaaagataaagttattttttccacaacattttggggactcctgatatatatttctggtcatattttgaggcccagtgtctantccctgatggacttttatttgactcttancagttctgnctcaaccccatagcatgggaatttcctt

SEQ ID NO: 1870 - DNA, 871 bp, Homo sapiens
  misc_feature (693)..(693): "n" may be a, t, c, g, other or unknown
  misc_feature (742)..(742): "n" may be a, t, c, g, other or unknown
  misc_feature (796)..(796): "n" may be a, t, c, g, other or unknown
  misc_feature (832)..(832): "n" may be a, t, c, g, other or unknown
  misc_feature (869)..(869): "n" may be a, t, c, g, other or unknown
gtgcctttaagaatgaaggcttagacttttaaaatctcatgtttttcaaacttcagggttttatacctcagttttccatttgaaaactagagtttttagcgattgattttcaaatgcatgaaaaggggagaaaaggcaaaacttcatgaactagtattttaaatgtggaataaaatgatatttattgaaaaataggccaggcttagttgtccacacctgtaatcccagcgctttgggaggccaaggcaggcagatcacttaagtccaggagttcaaaaccagtttggttgacatgatgaaaccctgtctctataaaaaatacgaaaattagctgagtatgatggcatgtgcctgtattgccttagtcccagctacttcggaggctgaggcttgaggattacttgaacccaggaggtagaggttgcagtgaaccgagatcgtgccactacactccagcctgggcaacagtgaaacacatctcaaacttcttaattgtcctcttggcatctgctttcacccactctcatgaacttttttaattgcctttccctggaccagctctagttctgctacagcagtcagtaacacacacagataagtgtacatcgccactagccctatcagtactttaacagtgagtcatatctttctcgactttctctgtgcctgtctaatttatatatactttttctnccccttcacaatgggatcattctttatctgagtcatttgctatatctgnatatattggtttaaggggtgcatcttggggtattttctggtctgcatttatatnccaaaacttttggaaaataatttttttttctttcanaaaggaatgttcaaaggtaatattttcttggtttggnaa

SEQ ID NO: 1871 - DNA, 763 bp, Homo sapiens
  misc_feature (708)..(708): "n" may be a, t, c, g, other or unknown
  misc_feature (751)..(751): "n" may be a, t, c, g, other or unknown
  misc_feature (753)..(753): "n" may be a, t, c, g, other or unknown
ggtttttgtgtagctgctttctctcacagtgtttgtaaacttgaacccaagtgcaccgttcacagtctccagctccagctcttcactaacacctttattccttgctgttggccttgggacccttactgttccccttgctgtgtagaaacagatgcagtcagacccacataagctggactttggactgaaacctgagttcctgagccgccctccaggccccagtctttttggagccatccaccacccccatgacctggcacggccttcaactttgttctctgccgctggtgagtgtgggtttgggtggggggacagagctgagaaatgtagttctcaggtaactaaataaatgaggtttgggctctgagctgccgctcagtcaccacctacaaaaatacagttaatgccagcttgcaaggcaacatcgcagcacatccagggagttgggaatcttcagtgatacactctctttcattaaaggaggaggcagagatcatctttcccttacagggattcacattgcttcggttcattatttgcttctatattaaaccagtataactcacaagcatgtcagttgctattgagaaagatctgaaggcttgcaagggcagatcggaaggaaacaatgccaggaattatagaaggatgcggtcgcccttaatacggtgcccgcagagcactgtaattttgcaccgggatgctcantcatgccgggtttaaaagtcctgaggataaagaaaggcgattnangcagttgcca

SEQ ID NO: 1872 - DNA, 795 bp, Homo sapiens
  misc_feature (652)..(652): "n" may be a, t, c, g, other or unknown
  misc_feature (665)..(665): "n" may be a, t, c, g, other or unknown
  misc_feature (722)..(722): "n" may be a, t, c, g, other or unknown
  misc_feature (770)..(770): "n" may be a, t, c, g, other or unknown
  misc_feature (792)..(792): "n" may be a, t, c, g, other or unknown
aagcgaccagattgcccagcgcctggagaatgggctgcagccagagagagcataggaggatgttgttctctgtacactgtctctaaaaatggtgctttttggctgggcacggtggctcatgcctgtaatcccagcactttggaaggctgcggcgggcagatcacttgcggtcaggagttcgagacctgcctgatgatcatggagaaaccccatctctactaaaaattcaaaattagccgggtgtggtggtgtggtgggcacctgtaatcccagctacttgggaggctgaggcagaagaatcgtttgaacccgggaggcagaggttgcagtgaactgagatcgtgccattgcactccagcctgggcaacaagagtgaaactccatctcaaaaaaaacaaacaagcaaaaaaatgatgccttttagcaaaatagtgactgactggcttttaataccacaataaaaagacattagcaaaagtggtgtgagagcatgatcatgagtcctgtagagaaagtaaccaaaagtgatacatttctatgtggttccctcccagacaaaatgccaggctccacccactagttcaccctccctgttagcaatggctggtacgtgttcaggtttagattggtgccagacactttattttattgnctcaccgagtctncatgaccaacctacgagctatgagatattactaccccttttttggatagacacagangtgaatagcttgcccatggacacacatctactaagtggtaaaactggnaatcgaacccaggcagtctttncca

SEQ ID NO: 1873 - DNA, 784 bp, Homo sapiens
  misc_feature (723)..(723): "n" may be a, t, c, g, other or unknown
  misc_feature (769)..(769): "n" may be a, t, c, g, other or unknown
  misc_feature (779)..(779): "n" may be a, t, c, g, other or unknown
tacttaaattaacttgggtggttaataaagatgtaaatattcttcatccagtctataagaagagccaggaaccaaaaaaagatagcatatcttattttcatctctcagattcaccttatatttcaagagtctgagttgaatattatgttctcatttgtttctcattctagaacaataaaagaaaaagaagcaagtccaagcagcatcaaggcaacaaagatgctaaagacaaggtggagaggcctgaggcagggcccctgcagccgcagccaccacagattcaaaacggccccatgaatggctgcgagaaggacagctcgtccacagattctgctaacgaaaaaccagcccttatccctcgtgagaaaaagatctcgatacttgaggaaccttcaaaggcacttcgtggggtcacaggtcagtaatgcttaagtaaaattgcttaggaaggcatagatgaaaagagcacaaagggagctcattggggctgctgttgatgttgttgaaaatggaaggttgtttttctgcagtgtgtacgattcagccttcctgaagccaggattgggggtgaaggggaatgtaacagggcagagaataaatgctcaatctagctctacaccaagtcagaggatttttttttttttttttttgagtctgggtcttgctgtgcaaggctagagtgcatggtgtggtcatagctcactgcactgcagtcttgaactnctggactcaagcaatcctgccttgggattccaaagtgctgggattnccgacatganccccc

SEQ ID NO: 1874 - DNA, 865 bp, Homo sapiens
  misc_feature (865)..(865): "n" may be a, t, c, g, other or unknown
ataagaggcgtcattggcgcccgagctgtgaccgccgccactggggcagccagcacaatcgggcggaggtggcgctgccccttcagacctgaaagatgtctgaaaattccagtgacagtgattcatcttgtggttggactgtcatcagtcatgaggggtcagatatagaaatgttgaattctgtgacccccactgacagctgtgagcccgccccagaatgttcatctttagagcaagaggagcttcaagcattgcagatagagcaaggagaaagcagccaaaatggcacagtgcttatggaagaaactgcttatccagctttggaggaaaccagctcaacaattgaggcagaggaacaaaagatacccgaagacagtatctatattggaactgccagtgatgattctgatattgttacccttgagccacctaagttagaagaaattggaaatcaagaagttgtcattgttgaagaagcacagagttcagaagactttaacatgggctcttcctctagcagccagtatactttctgtcagccagaaactgtattttcatctcagcctagtgacgatgaatcaagtagtgatgaaaccagtaatcagcccagtcctgcctttagacgacgccgtgctaggaagaagaccgtttctgcttcagaatctgaagaccggctagttgctgaacaagaaactgaaccttctaaggagttgagtaaacgtcagttcagtagtggtctcaataagtggggtatacttgctttggtgattgcaatcagcatgggatttggccatttctatggcacaattcagattcagaagcgtcaacagttagtcagaaagatccatgaagatgaattgatgan

SEQ ID NO: 1875 - DNA, 787 bp, Homo sapiens
  misc_feature (714)..(714): "n" may be a, t, c, g, other or unknown
  misc_feature (758)..(758): "n" may be a, t, c, g, other or unknown
  misc_feature (760)..(760): "n" may be a, t, c, g, other or unknown
aaactcattggcgccaagatggcgatggagatgaggcttccagtggctcgcaagcctcttagcgagagactgggccgcgacactaagaaacatctagtggtgccgggggatacaatcactacggacacaggattcatgcggggccatggaacgtatatgggagaagagaagctcattgcatctgttgctggctctgtggagagagtaaacaagttgatctgtgtgaaagctttgaagaccagatacattggtgaagtaggagacatcgtagtgggacgaatcacagaggttcaacagaagaggtggaaggtggagaccaactccaggctggattcggtcttgctgctctcgtccatgaaccttcctggaggagagctgaggagaagatctgcagaagatgagcttgcaatgagaggtttcttacaggaaggggaccttatcagtgctgaggtccaggcagtgttctctgacggagctgtctctttgcacacgaggagcctgaaatatggaaaactaggtcagggggttttggtccaggtttccccctccctggtgaaacggcagaagacccactttcatgatttgccatgtggtgcctcagtgattctcggtaacaacggcttcatctggatttacccaacacctgagcacaaagaagaggaagcagggggcttcattgcaaacctggagcctgtctctcttgctgatcgagangtgatatcccggcttcggaactgcatcatctcgctggtactcanangatgatctgatgatccacatctgtctg

SEQ ID NO: 1876 - DNA, 870 bp, Homo sapiens
  misc_feature (57)..(57): "n" may be a, t, c, g, other or unknown
  misc_feature (596)..(596): "n" may be a, t, c, g, other or unknown
  misc_feature (745)..(745): "n" may be a, t, c, g, other or unknown
  misc_feature (780)..(780): "n" may be a, t, c, g, other or unknown
  misc_feature (793)..(793): "n" may be a, t, c, g, other or unknown
gtgcctagccatcattccattcctcctccttcgcctctcataaaaagaaaatattgngtacctgcaaacatatgctctgctatcagcattcagacacccaaacaccgaaatcatttagcagctcttactgctgtcagtaagcagatgatggcgtaaggggtttagaatttgatatgtgttttctaaagcatctctcaaaataggcattgtctatttcttgtttgttgcttgtgggaaatttttcgtcaagtgtacctgtacctaacccatgactaaaacttacctagatcttaatttctagatttaaaaagaagaaaaaagggatcaagtaaggaacagcgaagtaaagaatatctaagattaaaagtaggaatagctacaattacctagatttcaatttctgggttatttttagtgtgacaaagtaaagagtgtccaaaattacaaatctgagggataattcaaagatccttttttgttgtcattgttcctgggggaatatgtttcctgggggaaggagcatatctgactggtcccagggaagaaatgaagtagaactggtattgaagagatatctttctatgggaatccagcanaaatactgggttccaagaacttgcttgcctggggaactcccagattctttaaaaaccttacatgtgaaatagcttaacataaatatataggtttagacatactgattgatgtttcagtgcctatttttatatgcatttatatcgctcanggcatctatttccacttggtctattaagtcatggnttttgcaaatggncaccatttaaatataagggaagggacctattttgcttctttcataatcttcgacatttcctcatgaaagaataagga

SEQ ID NO: 1877 - DNA, 871 bp, Homo sapiens
  misc_feature (618)..(618): "n" may be a, t, c, g, other or unknown
  misc_feature (720)..(720): "n" may be a, t, c, g, other or unknown
  misc_feature (733)..(733): "n" may be a, t, c, g, other or unknown
  misc_feature (792)..(792): "n" may be a, t, c, g, other or unknown
  misc_feature (834)..(834): "n" may be a, t, c, g, other or unknown
  misc_feature (849)..(849): "n" may be a, t, c, g, other or unknown
taagtagcatgaaatctaaggaagacaggtaaaccagcagcactggcctaccaagaggagggtatgggagctgtggggtgtggggagacggggtagccacacaaatgggtagaaagaactcggctaacactttaagcaaattgctaaggccaaggatgggatcctgcaacccttggaagccactgactttataaagagatttacacccacttgcaggctgttctgcacaagcctccatcagcccctcacaacgaagtctgggggcaagtgggagacttgaggaaaccaccgtcagtggtgcaggccctgagggaaaactgttaggggaagctccaagctccacccagaccttctcccctataggaaagaaacaaaacatcttaagctcctctggaaaagggcaacaagccatgttatcccagggcacaggggaagtggaagaaaacaggaaaaatcctctatgcctagaggagtagcaagaaatgatcctgagtccagatcatccgcactttcctgctactggaaaaggggcaggatatttgagaaagccccaccccaaagcagtgcctgcccaaaactgaggctagactaggacaagaatcaaacccacccaacctncactgccaggctagcaatcacccagttacgaaaactgatctacgtgtgggtgaaggcatgagcctagaaagagaccctttcagagacacaaaagcacagcancttgaagttgaangtagattaggaacataaaccaaaaccccagtccacttaacccacagcagattatgccangggaatttgaacctgtagtacacttgaaggtaaccacagcancagcaaaacccgctnaacttctgggcttgggttaact

SEQ ID NO: 1878 - DNA, 762 bp, Homo sapiens
  misc_feature (683)..(683): "n" may be a, t, c, g, other or unknown
  misc_feature (714)..(714): "n" may be a, t, c, g, other or unknown
  misc_feature (751)..(751): "n" may be a, t, c, g, other or unknown
aggatgaagcacaaaaggaaaaatttacagccattctttatcgtactttggaacggaggagacttgctgatgattatcagcaaaaaaagatggtcatggggaggctctgcaatggcgaattctgagagcaaaactgccaataaacgatctgcatctactgaaaaacttgaacagggtacttctgctttaatcagacaaatgcctttgtcatctgcaggccttcaaaattccgttgccaaaaggaaaacagacaaggagagaagctcatctttaaatagaagagatagtaacctacattcgtctactgataaagaacaagccgaaaggaagccacgtgttacaggcgtcaccaattatgtaatgcagtatgtcactgtacccttgcgtaaatgtactagcgacgaattgagggctgttatgtttcccatgtcgacaatgaaaatacctcctcaaacaaaagtagaagagtctcccttggagaaagtagaaacacctcccaaggcaagtgtggatgcacccccccaggtgaatgtggaagtattctgcaacacaagcatggaagcgtcccccaaggcaggtgtgggcatggcccctgaggtgagcacggactcattccctgtggtgagcgtggacgtgtcgcctgtggtgagcacatatgattctgagatgagcatggacgcatnccccgagttgagcatagaagcactcccgaangtggacctggaaacagttcccaaggtgagcatagtancattccccgga

SEQ ID NO: 1879 - DNA, 702 bp, Homo sapiens
  misc_feature (689)..(689): "n" may be a, t, c, g, other or unknown
  misc_feature (692)..(692): "n" may be a, t, c, g, other or unknown
  misc_feature (699)..(699): "n" may be a, t, c, g, other or unknown
atccaacagttctgatttattccactcacacaacaagtcagttcttaacacaaaccacataggttcttccttaaataaaaagctgtggctatgaagaagtgagagttttttttttttttcctctccaaaccaccacgtgctcttgtgtgttattgtagtggcttcgcagagtatttatttggccagaaagtctatagtcaaattgctcttcattctcaagtgtagtatttatttctccagctcatgcagaattctgttttatatggaggttttaaatttgtgcagaaaagtattacgtgggtttcaaaggtactcttttttcttttttgagacagggtctcgctgtgttgcccatgctggagtgcagtggtgcgatcacagctttctgcagcattgaccttgtgggctcgagcagtcctcctgcctcggcctcccaggtggcttggaaccgcaggcatataccaccatacctggacatgtttttaactttaatttttatttttgtggagatgaggtctccctatgttgcccaggttgctctcgaactcctaggctcaagcagtcttcccgccctggccttccaaagtgcaggcattttaggcatgacccatcgtgtccagcctaaatggcattcttggaagtaaaaccacaggggatctgttggaagtggcatgatggaggaattttanaangaattgnacc

SEQ ID NO: 1880 - DNA, 819 bp, Homo sapiens
  misc_feature (596)..(596): "n" may be a, t, c, g, other or unknown
  misc_feature (731)..(731): "n" may be a, t, c, g, other or unknown
  misc_feature (786)..(786): "n" may be a, t, c, g, other or unknown
  misc_feature (814)..(814): "n" may be a, t, c, g, other or unknown
tcatgattagctttgccaaaccatctccctagattatttttctttttaaatttcactttgcatttggttaatcattccctgggaaagcacacggggcaggtgggcctccttgtcttcactttgccattccctatctgatgaattctgaacctcagtttttcatccaagaactggagttaaaacacctgcactattatacagggcgtgaggctgttgtcatgataatcaatgagctgatgtgtggttgaagctcttatctgactccatagatagttttaaactacctaagtataaattcagcagctttgcttaagatttaaagcaggtattataaatatgcattcctttgccgatcttttaatagaaggacaggcctattcttttgaagatggatctgctgatgagagctcccctttgtctactttacatcaaccacacccttatttcattgttttgtgattccagtgttggtttctttaaagtaaaggaagaatttagatatttgccgagccattctgaatatagaaacttcctagatcgcatatcccttgatcttttatcgttaatttactctcatctaattaacagcgttttgnttttttttttagaaattgacttttattaagtctttccaaagtagccaacttagttttcaaagaaaatttctctctatttttatggtcatctaatcagtgacagtaataagtcaatcagctcatgtaatcccagtnaccaaacagcaggattgtggacacacacaggtgggagccctgaaatgcctggcanctgggaccagtggggaaccttgaaccanggcca

SEQ ID NO: 1881 - DNA, 768 bp, Homo sapiens
  misc_feature (690)..(690): "n" may be a, t, c, g, other or unknown
  misc_feature (712)..(712): "n" may be a, t, c, g, other or unknown
  misc_feature (734)..(734): "n" may be a, t, c, g, other or unknown
tttcattttagttttttaaatttctttttagaggcggggtctcactgtgttttgcccaggctggtctcgaactcctcctggtctcaagcaatcctctcgcctctgcctccccaagtgttgggattataggcatgagctactgcactcagcccaccatttgttttaaaaagggtggatcctatttgtataaaaagccatgggcattttctgtgtacttgtctacacattaatttccaggctgggcgtggtggctcacgcttgtaatcccagcactttgggaggccaaggggaggcagatcatgaggttaggagatcgaaaccatcctggctaacacggtgaaaccccgtctctactaaaaatacaaaaacaaaattagcagggtgttgtggcgggcgcctgtagtcccagctactcaggaggctgaggcaggagaatggcatgaacccgggaggtggagcttgcagtgagctgagattgcgccactgccctccagcctggacaacagagtgaggctccgtcttaaaggaaaaaaatttctggaatgatgtccaataaatcagagagagggactagaagactaatgaggacagaagcttttattcttaacacctatattttgctaccatttatattggcatcatatgcatataacattttaacatttaaaaactagtttaaacagaaatggntgccctggaatgtggcctgggntctttcaaagggaggccagcantttctacaaggggcttgaaaatgggaccttcatt

SEQ ID NO: 1882 - DNA, 685 bp, Homo sapiens
  misc_feature (515)..(516): "n" may be a, t, c, g, other or unknown
  misc_feature (651)..(651): "n" may be a, t, c, g, other or unknown
  misc_feature (657)..(657): "n" may be a, t, c, g, other or unknown
  misc_feature (659)..(659): "n" may be a, t, c, g, other or unknown
agccttataaatgcaatgactgtggcaaagcttttaatcgtagctcaaggcttacccagcatcaaaaaattcacatgggatagaccacttacatataaatgtgtatatatgtgaataaacctacagccttaacttacttattttatatggaatcgtttatactgacaaacatgtagaatgttggtaaaggttcagaattgctctcaagaatatccaacttcaggccgagtgtggtggctcatgcctgtcatcccagcactttgggaggccaaggcgggcacatcacgaggtcaggaggttgagaccatcctgggtaacaggtgaaaccccatctctactaaaaatacaaaaatttagctgggcgtggtggcaggcgcctgtggtcccagctgctcgggaggctgaggcaggagaatggcatcagcccaggaggcggagcttgcagtgagctgagatcgcgccactgcactccagcctgggtgacagagtgagactccctctcaaaaaaaaaaaannaaaaaaaatccaacttcatacaaaatgtatgtttatttcctgaaatgtttgaccttaacctgttcaataaagcctgtgtccctcaaaatcagggtgcagtctgcagttttgagttgacaggtccctgtgaatgangaacancncaaggagggctctacgagcgctgcta

SEQ ID NO: 1883 - DNA, 832 bp, Homo sapiens
  misc_feature (810)..(810): "n" may be a, t, c, g, other or unknown
  misc_feature (813)..(813): "n" may be a, t, c, g, other or unknown
  misc_feature (824)..(824): "n" may be a, t, c, g, other or unknown
gagtctaattaatagacatgtttattgaacactgcagaagcaggaggtatcaggataagactctccacttccatggaaaaagtgcacatggctgctgaagatgggctttaggtgccttgagagcagtcagtgccaataaggaagaagttcaagcgggggcagaagaattcccccgggaggtgattctgcagaactcagccattcacaggtcatgggagattttgttcccttcagggtacgtcagcttcacttgctgaagtaggacaagtagattgaattagccctggctgaagccaaaattctttatatttaaaagaagaaaagcaattaaatattcaacccgatcctgggttttgaattaccccatttatctttcactctgagcatctgctttttattgcattgtggccctgcctgccatttatctctccccgtcagtctgtatccacgtgtcatgggactcaaaagtgaagattagaggagaaaaatatctctgtattctaagcctggcaacttctatttctatcctcagctgttggagctgatagcaaagtcacagctcacatccctgagtggcgtcgcccaaaagaacttcatgaatattttggaaaaagtggtactgaaaggtgagccttctctcactctctcgcccctttttataggcatggaggtgggcagatggattttccaatgaagtggacgtgtcattagacttaaagacatgtgaatggatggaaatgaataacttcagctacattttagagacactaaattccagttcggaaaaggggtccactcatcctcatggcnaanggtgagacatnaccctctg

SEQ ID NO: 1884 - DNA, 819 bp, Homo sapiens
  misc_feature (600)..(600): "n" may be a, t, c, g, other or unknown
  misc_feature (746)..(746): "n" may be a, t, c, g, other or unknown
  misc_feature (761)..(761): "n" may be a, t, c, g, other or unknown
  misc_feature (778)..(778): "n" may be a, t, c, g, other or unknown
gaatttagtactatttatgtagtcctcagttgtgatgggcagacagttgaaccttgtacaccatatttagaaaaaaaacacaaaaaaccttttggccaggcgtggtggctcatgcctataatcccagcactttgggaggccaaggtgggcagatcacctgaggtcaggagaacatgacgaaacctcgtctctactaaaaatacgaaaattagccaggcgtggtggcagatgcctgtaatcccagctcctagggaggctgaggcaggggaatcgtttgaacctcagaggtggaggctgcagtgagccaagatctcaccactgcactccagcatggatgcccagcctggatgacagagcaagactccatctcaaaaacaaacaaccaacctactttttgtataggtatagtttgaacctagtattcagaccagtaaaatgaaaaccttgcagtaaatgcttcccagtctttattgggctaaaataggccacgtgtgcttttagaaagatggccgcataataacatgtttattgaatgcctttttacctaacatgcaggttctactttattttcccactttgtacaagacaagcagtttttgntcttataagtagtgaggaagtcaatatagtagatttacgacattgcattttcaagccactgggtgtaaaaataaaattactcaaaatatgtaaaaccctgaaaacaatgatttaattgaaccagtcaaacattatttaaaattganagctggtgtcccatncaggtaggccccttttnaaaagaccgatttttaagtttaagcctttaaaaggttttca

SEQ ID NO: 1885 - DNA, 685 bp, Homo sapiens
  misc_feature (635)..(635): "n" may be a, t, c, g, other or unknown
  misc_feature (663)..(663): "n" may be a, t, c, g, other or unknown
  misc_feature (674)..(674): "n" may be a, t, c, g, other or unknown
gtgtagtgcgagtggggcggacgcgcgcagcccgcccgcccggcgaccagcaagacggagtctcactctgtcgcccaggctggagtgcagcggcgtgatcttggctcactgcaaagtctgcttccctggttcaagcgattgtcctgcctcagcctcccgagtagctgggattacaggagttggcatcctttggaagagttcgtgaaagctttctgcccagagctcctggaccaatgcatcttcccaccaccttaaaccactgagcagttcagagccccagttgcagacgacttgtcctgccaccaccatgagttctgaatgtgatggtggttccaaagctgtgatgaatggcttggcacctggcagcaatgggcaagacaaagacatggatcctacaaaaatctgcactgggaagggagcggtgactctccgggcctcgtcttcctacagggaaaccccaagcagtagccctgcgagccctcaggaaacccggcaacacgaaagcaaaccaggtctggagccagagccttcttcagcagatgagtggaggctttcttccagtgctgatgccaatggaaatgcccagccctcttcactcgctgccaagggctacagaagtgtgcatcccaaccttncttctgacaagtcccaggatgccacttncttcagtgcancccaacccgga

SEQ ID NO: 1886 - DNA, 645 bp, Homo sapiens
  misc_feature (571)..(571): "n" may be a, t, c, g, other or unknown
  misc_feature (574)..(574): "n" may be a, t, c, g, other or unknown
  misc_feature (582)..(582): "n" may be a, t, c, g, other or unknown
gaggcctgaggcggcggcgcgaggcagtatggtttgaagtggtgaacatggatttttctcggcttcacatgtacagtcctccccagtgtgtgccggagaacacgggctacacgtatgcgctcagttccagctattcttcagatgctctggattttgagacggagcacaaattggaccctgtatttgattctccacggatgtcccgccgtagtttgcgcctggccacgacagcatgcaccctgggggatggtgaggctgtgggtgccgacagcggcaccagcagcgctgtctccctgaagaaccgagcggccagaacaacaaaacagcgcagaagcacaaacaaatcagcttttagtatcaaccacgtgtcaaggcaggtcacgtcctctggcgtcagctacggcggcactgtcagcctgcaggatgctgtgactcgacggcctcctgtattggacgagtcttggattcgtgaacagaccacagtggaccacttctggggtcttgatgatgatggtgatcttaaaggtggaaataaagctgccattcagggaaacggggatgtgggagccgncgncgcaccgngcacaacggcttctcctgcagcaactgcagcatgctgtccgagcgcaaaggacgtgctcacgg

SEQ ID NO: 1887 - DNA, 685 bp, Homo sapiens
  misc_feature (591)..(591): "n" may be a, t, c, g, other or unknown
  misc_feature (627)..(627): "n" may be a, t, c, g, other or unknown
  misc_feature (644)..(644): "n" may be a, t, c, g, other or unknown
aaagtgagtccagggcccgcctcccggggagtcggcctcggatgtccggaggctcctaggctgagccggcgacagagcccgggaaggcagcgagacgtgggcgccggcccagccccctcccgcgtccttcagccccaagccccgagcccctctgacccttccgcagccctccctccagccgcgcccggcctccggcagctccctgtacgcctccctccccctgcccgcccctccctcccacagccgcccatgacgccctctcggcaccccttcccactctgccacgcgtccttttcctgcaccttcgccccgcgtacctactcctgccccgccctgccattcctctcccctcccttctctctgcgacccctccctgttaggccccagcctcttctcccctcacaggtcttctctgtcctggcctcaccgccttatcctattcctctcccttgccctgtgtcttgtctcagagccccctcggggtgggagtaggttgtggagcagcacaactgggctcaccccaaagcagaacttctcaatccatgaggacaatggggaggcctttaggccagcccacatgtgacaatgganggctgcggcttccttgcggagagcacaagtgagctnactgccctggacttcanggaatcagagttcttggccgcggggtgaaccaacttctctg

SEQ ID NO: 1888 - DNA, 609 bp, Homo sapiens
  misc_feature (594)..(594): "n" may be a, t, c, g, other or unknown
  misc_feature (604)..(604): "n" may be a, t, c, g, other or unknown
  misc_feature (607)..(607): "n" may be a, t, c, g, other or unknown
gtgtgttgggggtggtgagaatgcgctctcttcggcccgccccgtcctttccaaagaaacgtgctcataatggggtgacctaattacatcgcaatggaactcaatcttagccactccgcagcaccgggtttcataacagactcggcggcctcgagtgctgggaagaaacgtgcgagggccgaggggggcggcggagcccgcgtggaaatcggaaagaagcgcagccctgcgacttccgcctgggtcatcacgccagcagtcgggccaaggcgcagggggcgggtgggggacacgttaactttttatttgggtgggcggcatccaaacctaacagtatatattttatcattttcaagggagtcatgctccattgcgggcccttcggtttcgtggctcccatgtccccctctccacctcccgccaaaacggcgcagcgtgacaagccatatgttccactccggtgggggcgagagagaagcaacaataagttaaaagtgccgcctccctccacctctttaccttcattcttaccaaagtaaccttttttcattgttctagagtcttgaggtgtgtgtggggaggatggaggaaganggaaggttgnggncc

SEQ ID NO: 1889 - DNA, 853 bp, Homo sapiens
  misc_feature (727)..(727): "n" may be a, t, c, g, other or unknown
  misc_feature (780)..(780): "n" may be a, t, c, g, other or unknown
  misc_feature (844)..(844): "n" may be a, t, c, g, other or unknown
  misc_feature (850)..(850): "n" may be a, t, c, g, other or unknown
aagtaaaatggactaaaattttgcctagatttacctaaaggcaaaatataaaaattaatttctaaatacataagatgcacactgaaagaagagtaagtcagtccagatttagactataaattcaaatgtgaaaattcaagcatctgaaatgagagagggagcacagccttttgaagaaaaataaagcactaaatttaaaaagtattatttttatttcaggaaagaagaagcctgagcttccaaaataactttttcagactgtttattaacccagtcaaaccaagaaaacaaatgtacaattagcttattaaaaatagggactccaatatgggcaacaaagcaagaccctgtctctacaaaaaattaaataagtagctgggcatggtcgtgggcgccaataattctagctactcaggaagctgaggtgggaggaccgcttgagcctgggagattgaggctgcagtgagctatgattgagtgcacttcagcctgggcaacagagtgagaccccgagtcaaaaaaaaaaagggggggggaggggactactattaattaaaatctggaaggagaaaggatacaaaaaaattaacttttgctgaacacttacatgccaagtgttttcgaatatgatatgtgacttaatcctgaacaaactagagtaatacaaactattattgctttttaagaattcagtatttatttatttattaaacagataaggaaatangggttttaaaactgcagaaagtgttagaaccaggatagaaactttcatttttncctttggttaaaagaattttttttttttttttttggaaaacgggggcttaacttcttggcattnccaggnctt

SEQ ID NO: 1890 - DNA, 761 bp, Homo sapiens
  misc_feature (647)..(647): "n" may be a, t, c, g, other or unknown
  misc_feature (708)..(708): "n" may be a, t, c, g, other or unknown
  misc_feature (724)..(724): "n" may be a, t, c, g, other or unknown
  misc_feature (750)..(750): "n" may be a, t, c, g, other or unknown
acccgcggcaaccccggcaacccagggctcggcgtcgctgccaccatgacgggaagcaatatgtcggacgccttggccaacgccgtgtgccagcgctgccaggcccgcttctcccccgccgagcgcattgtcaacagcaatggggagctgtaccatgagcactgcttcgtgtgtgcccagtgcttccggcccttccccgaggggctcttctatgagtttgaaggccggaagtactgcgaacacgacttccaaatgctgtttgctccgtgctgtggatcctgcggtgagttcatcattggccgcgtcatcaaggccatgaacaacaactggcacccgggctgcttccgctgcgagctgtgtgatgtggagctggctgacctgggctttgtgaagaatgccggcaggcatctctgccggccttgccacaaccgtgagaaggccaaaggcctgggcaagtacatctgccagcggtgccacctggtcatcgacgagcagcccctcatgttcaggagcgacgcctaccaccctgaccacttcaactgcacccactgtgggaaggagctgacagccgaggcccgcgagctgaagggtgagctctactgcctgcctgccatgacaagatgggcgtccccatctgcggggcctgncgccggccatcgagggccgagtggtcaacgcgctgggcaacagtgcacgtgaacactttgntgtgcaagtgtgaaancattctgggcaccgcctatagaaganggctggctatg

SEQ ID NO: 1891 - DNA, 742 bp, Homo sapiens
  misc_feature (677)..(677): "n" may be a, t, c, g, other or unknown
  misc_feature (741)..(742): "n" may be a, t, c, g, other or unknown
aagatgtcttgtatggtcttaatctttgttgtgtactatttttttatagtcttaagttataatgaaaaaacaaaaagtaggaaccaaacataaaaggtctagtaaagccaaaaattaatttcatattgattttaaagtgatctagctgagtttttacactgaaagcaaagattatagcaattgtagtccatggtatttattttcagtcaaaccaaagttacatataattctgcctctgcttatacgggatattaacactaacaatacactcccttcaaagacttgcacaggccaaattgttggaatgctggttttcttgacaattccaaaccccaaaactatgataatgagttatgatgtagttgaaaatagcatagtcagatgtttgcttaaaacctagaaacttaacatgttgcttttcatgtgctgtgccaagtcttgataatactttttcccccaaccaagggacctcataacctgattatggttattgctttacaaacagttttgacagaaggtggctgctagagcttaacatacgttcccgttccatgtgatggaaccggttcttgcaaactaagctcatcattgattctttgctgaagtcagcaaatagagttagagagatacccagtcatctatcacaccaaataaaaggacataacggctttcaaaanggttttcccacttacccaaaaggctttctgaaagcttctacctctgcaaaaaaaaaaaaggaann

SEQ ID NO: 1892 - DNA, 882 bp, Homo sapiens
  misc_feature (640)..(640): "n" may be a, t, c, g, other or unknown
  misc_feature (797)..(797): "n" may be a, t, c, g, other or unknown
  misc_feature (821)..(821): "n" may be a, t, c, g, other or unknown
  misc_feature (875)..(875): "n" may be a, t, c, g, other or unknown
cttttagtgagagtaactgccaaaatatcaaaagatcctttaattatcaggtatttgaatccaggagttctctgcttaaaaagaataccagttaccagactattgtatgagtatttaaaaaatcaggaaaagcagcaaaaacagatttcaaagttattatattcattttaaaaaagtagattcttgaaattaatattagtggaaagcaatatttcaaactacacccatttcatttatagtatatgacgaattatgtagccacggctggccttagggaaacttggggcgtaggtagttctttctggtgttctgcttggctgtgttgtcaggaggtttctttttctcagtctcctagggttgcccacggctttctgtcagtctggtggcttacaaggcttcacactctctatcctcttccagaaccaagcctttctctttcctccctttcttttaatatataacatctgcatctagaaaaatgtccttgcatttgatagcacaatagattaaatgagatacaaattggaaataaacaggtagtcttggtgggaaactctttttaggtaggagtatcattcccagggccttagatcaagatctagaagctataaagggttatagtggtgttgtagaactttgnctttagttgagctaaaaacggggttctcgtcacacaaccatgacaaattaggctcacagacactttgaagggtgaccaggacaggggtttattggatgaaaaagggaaaagaaggactatcagccaaagccgaggaagcccggctagcccagttttncaccttggcacactggaattccanggtactatgctgcaacaggaaaaggccaggcttcttccccactgcaaaaggcgnggacctt

SEQ ID NO: 1893 - DNA, 840 bp, Homo sapiens
  misc_feature (657)..(657): "n" may be a, t, c, g, other or unknown
  misc_feature (772)..(772): "n" may be a, t, c, g, other or unknown
  misc_feature (781)..(781): "n" may be a, t, c, g, other or unknown
  misc_feature (823)..(823): "n" may be a, t, c, g, other or unknown
attgagctgtctgctcgctgtgcccgctgtgcctgctgtgcccgcgctgtcgccgctgctaccgcgtctgctggacgcgggagacgccagcgagctggtgattggagccctgcggagagctcaagcgcccagctctgcccgaggagcccaggctgccccgtgagtcccatagttgctgcaggagtggagccatgagctgcgtcctgggtggtgtcatccccttggggctgctgttcctggtctgcggatcccaaggctacctcctgcccaacgtcactctcttagaggagctgctcagcaaataccagcacaacgagtctcactcccgggtccgcagagccatccccagggaggacaaggaggagatcctcatgctgcacaacaagcttcggggccaggtgcagcctcaggcctccaacatggagtacatgacctgggatgacgaactggagaagtctgctgcagcgtgggccagtcagtgcatctgggagcacgggcccaccagtctgctggtgtccatcgggcagaacctgggcgctcactggggcaggtatcgctctccggggttccatgtgcagtcctggtatgacgaggtgaaggactacacctacccctacccgagcgagtgcaacccctggtgtccagagaggtgctcanggcctatgtgcacgcactacacacagatagtttgggccaccaccaacaagatcggttgtgctgtgaacacctgccggaagatgactgtctggggagaagttttgggaaaaccggnctaatttgnctgcaattattcttccaaagggggaactggatttggaaaaancccccttacaagaatgg

SEQ ID NO: 1894 - DNA, 786 bp, Homo sapiens
  misc_feature (724)..(724): "n" may be a, t, c, g, other or unknown
  misc_feature (763)..(763): "n" may be a, t, c, g, other or unknown
  misc_feature (785)..(785): "n" may be a, t, c, g, other or unknown
gtgcgttcctcgtctgccagccggcttggctagcgcgcggcggccgtggctaaggctgctacgaagcgagcttgggaggagcagcggcctgcggggcagaggagcatcccgtctaccaggtcccaagcggcgtggcccgcgggtcatggccaaaggagaaggcgccgagagcggctccgcggcggggctgctacccaccagcatcctccaaagcactgaacgcccggcccaggtgaaggtgagggcccggcaccccgcgtggagggcgaggggagggaggaggcggaaatgggggatcaggggcgtcccggggtcggcctggtcaggggaccattgggatagccagggacaggaagcctacgagccagagaggacctgggggtgccctgggacagggggtgacggagaaaagctgtgggcgccctcgcccccctttgctcacccgcactccacgctctgcggagaggctctgccggcagccccatgtgattccccgctctgcctagccggtttccattcttccgtgttgagcggctggggcttgccgccccaaaccccagagatgaccccagaaatctgggaaactccccttggttccccatctctcatcccctaccttccactccacccacctactcttgcgcctcaactctgctgttagggccgctcaagttcattcataagaacaagagctcttgctcttaaaggaacccgcgttccttangcattttgtcttgaattgttggattgtttcgcgccgggnaaccgtgctttttgcgccattng

SEQ ID NO: 1895 - DNA, 888 bp, Homo sapiens
  misc_feature (733)..(733): "n" may be a, t, c, g, other or unknown
  misc_feature (807)..(807): "n" may be a, t, c, g, other or unknown
  misc_feature (821)..(821): "n" may be a, t, c, g, other or unknown
  misc_feature (880)..(880): "n" may be a, t, c, g, other or unknown
agaaaaaatagaaacacaggtcaggaaattagcttatgacacctcagactgtgatcctcacaacagcactagtgaggtaagtaataacctggccctgttttgtagattaagaactgtggccctaagaggtaagggcacacacccgaggtcacgttgctatgtattgtgtaatttgggaaccaacagcaagacatttcctttttccctcaaacacattcttttggtctaagcttgaaagccgcttcttcccaaagcctttagaattcctggaccacatgaattgctctgtctataggctttcctagcatcctctctttcccctttgatagcattttatccctggtttaaggggttgttaaacagtccgtcttccacatcagacagtagtctctatgaaggcaggaaccctgtctatcttgttcactcttgccccttgtgtggcatgtgcttagtatacctaaatggtgactgaatggatgagtaatagcacacaagatcggcagcaatgctccagtgtttaaagcaatcaaggtattggaacatatcttctaattgtaattctttggtttttgcagtgttcaacatttgctgttgtaataatatatgaagcatttagacttgtagcttttggggcagaaatgctcatagatgaactaccaggaactccactgtttccctggctttccttcctttgggctggggattttaataaactgtcagtcacagaaccatncccaattccccttggaacacacactagaacaataatatgaggaagtgagcagcaatctcaggaacttaacttancgtcatcagatggnagttttggaatgaccatttgcaacttcatgctggtgagtttcccagatttcccctggtnctacttta

SEQ ID NO: 1896 - DNA, 852 bp, Homo sapiens
  misc_feature (818)..(818): "n" may be a, t, c, g, other or unknown
  misc_feature (828)..(828): "n" may be a, t, c, g, other or unknown
  misc_feature (848)..(848): "n" may be a, t, c, g, other or unknown
actccggagactgagccatggggggaaagcagcgggacgaggatgacgaggcctacgggaagccagtcaaatacgacccctcctttcgaggccccatcaagaacagaagctgcacagatgtcatctgctgcgtcctcttcctgctcttcattctaggttacatcgtggtggggattgtggcctggttgtatggagacccccggcaagtcctctaccccaggaactctactggggcctactgtggcatgggggagaacaaagataagccgtatctcctgtacttcaacatcttcagctgcatcctgtccagcaacatcatctcagttgctgagaacggcctacagtgccccacaccccaggtgtgtgtgtcctcctgcccggaggacccatggactgtgggaaaaaacgagttctcacagactgttggggaagtcttctatacaaaaagcagcaacttttgtctgccaggggtaccctggaatatgacggtgatcacaagcctgcaacaggaactctgccccagtttcctcctcccctctgctccagctctgggacgctgctttccatggaccaacattactccaccggcgctcccagggatcaccaatgacaccaccatacagcaggggatcagcggtcttattgacagcctcaatgcccgagacatcagtgttaagatctttgaagattttgcccagtcctggtattggattcttgttgccctgggggtggctctggtcttgacctactggttatcttgcttctgcgcctggtggctgggcccctggtgctggtgctgatcctggagtgctggcctnctggcatacnggatctactactgctgggangagt

SEQ ID NO: 1897 - DNA, 917 bp, Homo sapiens
  misc_feature (674)..(674): "n" may be a, t, c, g, other or unknown
  misc_feature (821)..(821): "n" may be a, t, c, g, other or unknown
  misc_feature (858)..(858): "n" may be a, t, c, g, other or unknown
  misc_feature (912)..(912): "n" may be a, t, c, g, other or unknown
aggaatagtcttccactaattcgctaggagtttgctctccccactcctatgggcttgtgagaggcatgcacagagtcctataatgcccactatgcatgcctgtagcaactttgaattctgttacatcatctggcacaatggccaagcaacttgggccagactctatatctgctatagagcccgtttttgtttcgggtttgacttgagacaagcagcccttgcaaactcctttagtgagtcagagaaatatccttaaatgtggtatatgttgaattcaaaaccccaataagcccccataaaactgtatttcccttttagtgataggaagtatatatatatagggcaacatgccatttactgtaaaaaggatgttttgacaaaaggaccagaagcattggacccctataaacttcatctatgttataggtctttgaatctgctgaagtttatgtctcttcttccagtattttacttctgttcaatgttataatattttactatacttaaggaacttgccacttcctgcttatgggtaccactttatgtaatattattaatatattgaattaacatgatgttttgcaaaatgtcaattaaactgaaagcagaagtgacagccctgacagaaaacagtgaagcagtgttcttgtttttaccacaccaaagcaaattgntttgattttcctccacaatgtgtgtagattaaaaagcattagctaaatcaaaagccgcatacaaagtgctggaaaccacattctgctcagtgaagataccacatcctagagcgaatggtgcaagtgtgacttaagttatgctaatgngcattcatcctataatccatctgggtttgacagaagnccattagggtaactggaataaggatttaaaatggaccaaccgcccctgggaacntttga

SEQ ID NO: 1898 - DNA, 838 bp, Homo sapiens
  misc_feature (703)..(703): "n" may be a, t, c, g, other or unknown
  misc_feature (794)..(794): "n" may be a, t, c, g, other or unknown
  misc_feature (812)..(812): "n" may be a, t, c, g, other or unknown
  misc_feature (825)..(825): "n" may be a, t, c, g, other or unknown
gctcaagcatggcggcggcggcattgggcagctcctcaggctcggcgtccccggccgtggctgagctctgccagaacaccccggagacctttttggaggcctccaagctgctgctcacctatgctgacaacatcctcaggtgcagggcaacggggtcggacggcgggtaccggggtgggtgggccgcggcaccttgttcggccagggactggggcgtccggcctgagcttcagagggcagcgacgcccggacagaccgggacctggagctggttctgctcctaacgtccgagcccgccggccaggggcctcgggacccggccaagtcccacccccgctcgagaaaaggaagtttctttgcagttgtgacttggcacctgcagtcagggtgctgcgggtgaactggagtcccggaagcggggccgggcggaggagaggtaggaaggcgtgcttcagacactgccgctcttctcgtcgtttaacggcctcagatatcgggacacaacggtaaccgcaccgcgcgtgtcattccccctgcgtgcatttttcgagcggagtggcttacatttccacatacttatcagaagttactcactgacaaagtgatgttttcttcccatgttgagactatccgagtactaaagcataatgcttctgaagtggtgggttttaaaatttttaattttttttctgcccacttttgntgattgaaacattatagtattttgaagttacagtttttatattaatacctggattctactatgtaacataaccctttaagaattcgtgganggaatcgccttggatganagtaatttccttnattcttcttgtca

SEQ ID NO: 1899 - DNA, 915 bp, Homo sapiens
  misc_feature (896)..(897): "n" may be a, t, c, g, other or unknown
  misc_feature (908)..(908): "n" may be a, t, c, g, other or unknown
agcggagggagaagtaggttgcgagctcagcacaggctccggcgctggctcccgcagctgagtttgggagatgtctaagtgatttttttttttttcccggaaggcaaatggctggcgtggaagcacaacccgctttcactcttcgaatttgtgcttagctcttttcttgtaccttgcgactcgtgaccaacatgctgtgatgtgtgccgagggaggaattggtaagagtgagacggcgaatccctctgactgtcccagccttctgcttcaccgcccacccgcttttcctttctgtttctctctcctgtttctccccgctccacttccctagtcgtgtttagatttgatgacatggctcaaaactacagttctgggctgttactgaacttaaaaaaaaaaacaacaaaagataaaatgattacaccattttcaatcatttgttaaaggggaatttaaaaatctattttaaatgctggattttgtaaaaaggtaaactgcacacgcgggcgcacacgggcacgtacctacacgcattctcacacacacacctttgtacacgcgggcatacacgggcacgcacacacacgcattcacacacacacacactcctttgtcatcccgttgtgaaataagcagtttaaagaaattttggttatctgcctcaaaggtgatgaaaagggaaggtgttgaagatttagcccagcagattgattccttaaggttgattccctaaggttgattccttaggaagaaaaaggggttgtattggagctttctcggaaatagttttcaaaggagtgctacaaaaaaacccccatgctttccccaaaacactaacttttaaagaacctagttggtattcggggcaccctttattttacgttgtaaaacatgtnntttaattaccncgtccag

SEQ ID NO: 1900 - DNA, 754 bp, Homo sapiens
  misc_feature (674)..(674): "n" may be a, t, c, g, other or unknown
  misc_feature (681)..(681): "n" may be a, t, c, g, other or unknown
  misc_feature (750)..(750): "n" may be a, t, c, g, other or unknown
gttgattaatatttattaaacttccatatgccagttgccaaggatgtaaaaatatgacagggtgtctggcctcaaaggagcatagtctagtgggaagacttgacatgtaaacatataataatattaaaagcattgcatagtaattggggaacacaaaggaggagaaactgtttcaagaaaggatagaaataaatggtcaaggcagacatgaagtagtgttctgattagttttaagagaaatgtaggtgttttacatgttggtggatggggaaagtgcagaggtatgtgtgtgaaatgtgcatggtgtctctggagagctttaactagttccatgtgacctgaggtataggttaggctgtgagactgaaaaaggggagagaagggatactgtaaaggctttatatattatgctgagttatctaaggtgcgaaatgatcagacttacattctagccaaaatgagtcagatgagtgttgatgatgctttggtggaaaggccgcaacagaaactggtaagaatacacacatgcaagcgattcttaactacattgtaatcagtaaatgaagataacgacaatattctcattagggtacttactggctgaaacaaaactaactttgtcaggccggtgcagtggctcacacccgtaatcccagcactttggggaggctgangcaggangatggcttgagcccaggagtttgagaccagcctgggcaacatagtgaaaccccatcgctaccaaaaaanaaaa

SEQ ID NO: 1901 - DNA, 830 bp, Homo sapiens
  misc_feature (685)..(685): "n" may be a, t, c, g, other or unknown
  misc_feature (813)..(813): "n" may be a, t, c, g, other or unknown
  misc_feature (823)..(823): "n" may be a, t, c, g, other or unknown
  misc_feature (826)..(826): "n" may be a, t, c, g, other or unknown
aggacagcccccacaccaaacaacagtccagcccagaatgtccctagtgtccagggggagaaaccctgctctaactcaagagcgaagagcctgcatttcactcggcgtgaattctacactttctgagcagagtatctgacgaagcctctctacagaaagtgaataaacgttgttcagatgacttcgacaactcttgttgaaagtgactatgcagatgatgtaaatgatgtcgttcctttcatgagcctttggtgtacttgagctttcagcagcctgaggcaagactggacaagtgtggttttccccactttgcatgtgcagagctctgccaggaggataagctaaaggaatcacattatcaagataaaaagaatatgcaaatagtgcaggctgtgtggcctctcctttcttacagcaggccctccgctgtaggcgagggctacgtaaatcagccaaggagtctcttccagtttagccttcctggtgcccagtagacattcatggagtgcatggaggatggcacggtctgacgcccacaggctcccacgtggaaatcttgcacctctcaggggcctgctggggtgtgaagctggagaatgcccagcgagtacctgagggccttaccccacgctcacaccttgagagccctctcttggggacttcagagactggcctgagggaacangtggtaaaacctctgccacagcagtccccataaggctgaagattcctggatcccctctgctcatactgggccagtttcctcgccacccgtcctgctgactctggccaaactaaaaagactctctattnactttccttnggnattt

SEQ ID NO: 1902 - DNA, 740 bp, Homo sapiens
  misc_feature (700)..(700): "n" may be a, t, c, g, other or unknown
  misc_feature (732)..(732): "n" may be a, t, c, g, other or unknown
  misc_feature (735)..(735): "n" may be a, t, c, g, other or unknown
cttgcaagatgcttctctgccgccataggctggaggttccccgggaactttcccttccttcctagctgaggaagatccctcacttccgctcgccgcgccaccggtcccacctccccgccccccgctgggtcctagcgccggcccctgtttggcagggtccgggctccgtcggtgcgaggagccgacgccgacgccacggagtcagcacaagtctcatcagagaaaccccgttcaccaaggccatggaagtggaggctgcagaggcccggtccccagcccccggctacaagcgctcgggccgccgctacaagtgcctgtcctgtaccaagacatttccaaacgcgcccagggcagcgcgccacgctgccacacatgggccggcagactgctctgaagaggtggccgaggtgaagccaaagccagagacagaagctaaggcagaggaagccagtggggagaaggtgtcaggctccgcggccaagcctaggccctatgcgtgtccgctatgccccaaggcctacaagacggcacccgagctgcgcagccacgggcgcagccacacgggggagaagccctttccgtgccccgagtgcggccgccgcttcatgcagcccgtgtgcctgcgcgtgcacctggcctcgcacgctggcgaactgcccttccgctgtgcgcactgcccgaaggcctatggcgcgctctncaagctcaagatccaccagcgtggccacacangcnagcgg

SEQ ID NO: 1903 - DNA, 913 bp, Homo sapiens
  misc_feature (718)..(718): "n" may be a, t, c, g, other or unknown
  misc_feature (838)..(838): "n" may be a, t, c, g, other or unknown
  misc_feature (878)..(878): "n" may be a, t, c, g, other or unknown
  misc_feature (882)..(882): "n" may be a, t, c, g, other or unknown
cgggcagatgtggtggatctgttcccagggacttttgaggttgtggagatggtggccagcaaccctgggacatggctgatgcactgccatgtgactgaccatgtccatgctggcatggagaccctcttcactgttttttctcgaacagaacacttaagccctctcaccgtcatcaccaaagagactgaaaaagcagtgccccccagagacattgaagaaggcaatgtgaagatgctgggcatgcagatccccataaagaatgttgagatgctggcctctgttttggttgccattagtgtcacccttctgctcgttgttctggctcttggtggagtggtttggtaccaacatcgacagagaaagctacgacgcaataggaggtccatcctggatgacagcttcaagcttctgtctttcaaacagtaacatctggagcctggagatatcctcaggaagcacatctgtagtgcactcccagcaggccatggactagtcactaaccccacactcaaaggggcatgggtggtggagaagcagaaggagcaatcaagcttatctggatatttctttctttatttattttacatggaaataatatgatttcactttttctttagtttctttgctctacgtgggcacctggcactaagggagtaccttattatcctacatcgcaaatttcaacagctacattatatttccttctgacacttggaangtattgaaatttctagaaaatgtatccttctcacaaagtagagaccaagagaaaaactcattgatgggtttctacttctttcaaggctcaggaaatttcacttttgaactgagggccaantgagctgttaagatacccacactttaacttaaaggctaanaatntaggcttgatgggaaaattgaaaggtagctt

SEQ ID NO: 1904 - DNA, 762 bp, Homo sapiens
  misc_feature (202)..(202): "n" may be a, t, c, g, other or unknown
  misc_feature (233)..(233): "n" may be a, t, c, g, other or unknown
  misc_feature (478)..(478): "n" may be a, t, c, g, other or unknown
  misc_feature (711)..(711): "n" may be a, t, c, g, other or unknown
  misc_feature (718)..(718): "n" may be a, t, c, g, other or unknown
  misc_feature (736)..(736): "n" may be a, t, c, g, other or unknown
agacatttatttctcacagttctggaagaaagtttaaaatcaaggtcttggcaaatttggtttctggtgagggctgtctttctagcttgtagatgcctgtctgccttgtcttcacatgatctttcctaagggtgtgtgtgtgtgtgggtgtatctgtgtgtgtgtttgtgcgcacacacacgcgtgtgcacagggctggtanagagtgagctctctggtgtctcttattgatnctttttcttttttcttaccttgttattttctaatctagtcttcagagagatggtgtctcttcttataaaggcactcatcctaacagatcagtgctgtacccttgtgacctaatttaaccttaaatacttccttagaggccccatctccaaatgcaactacactgctgtttagggctataacatgaattttggggtatacaagaattcagttaataatacttgattaccctttatctgcccctganagggtggttcatcttacccttttttagtcaaatcacatttggtaacatgaattgaggtgggtcagctatggtggcagactcactaagagtgtcatcctcaactatcctgtattgcttgtggcatacctagacattctatggccgaaagagcttgcatgtttaaatatttctatagttttagtccttggcacatggacttgagtccatttctctgtcaaatggccgatagttgntcctcanagttggtactggtcatantttaaagggaaaatatattttgaacc

SEQ ID NO: 1905 - DNA, 662 bp, Homo sapiens
  misc_feature (594)..(594): "n" may be a, t, c, g, other or unknown
  misc_feature (648)..(648): "n" may be a, t, c, g, other or unknown
  misc_feature (659)..(659): "n" may be a, t, c, g, other or unknown
ttttgcgctcggaccttcgccagaggggccgggacatcatgacggtgggagccaggctccgaagcaaggcggagagcagcctcctgcgccgcgggccccgagggcgagggcgaaccgagggggacgaggaggcggccgccatcctggagcacctggagtacgcggacgaggcggaggcggcggccgagagcgggacgagcgcggcggacgagcggggcccggggacccggggcgcgcggagggtgcacttcgccctcctgcccgagcgctacgagccactggaggagccggcgccgagcgagcagcccaggaagaggtaccggaggaagctgaagaagtacggcaagaatgtcgggaaggtcatcatcaaaggatgccgctacgtggtcatcggcctgcaaggcttcgctgcagcctactccgccccgtttgcggtagccaccagcgtggtatccttcgtgcgctaatgggagctgctgtggcaggtgcccccagagtgaacgggagcccctgctgtgggaactttgtgaatcctggagcatctcagacttgaacacacagcatatttggaagagaaaacatgcctttctttgntgaatcacattagtatgatgagtgagtcatccctgcccatcttgcttgagcttntcacatctctnagt

SEQ ID NO: 1906 - DNA, 874 bp, Homo sapiens
  misc_feature (783)..(783): "n" may be a, t, c, g, other or unknown
  misc_feature (798)..(798): "n" may be a, t, c, g, other or unknown
  misc_feature (800)..(800): "n" may be a, t, c, g, other or unknown
ctagagagaggacatttcctgagtaaaatgaaaatcaaagctaggagctaatcatatttttaaagtcagatatgttgggggtataactggaagctaatttttaaaagaatcctgccatatctttgataaggaagttctatggcttaaagagtgtaaccactagttttagcagagatgtttcctttagttttgaaacattcttcaacatttcaggttcatgatgaaaaatggctgactggatttaagtcctttattttctatactcctgagcaaaattctgaaaaactggctggtctagtttagagaagaacgctgatgtgggagtattttcaccatgcattcctgctctaaatcctttgcttctactgatagactattctactttcgaaataagttcacattgctctaacacttcataagttcaatctttttctcattctgtttaaaataaccaccatgaccaccaaacgcctgaaattcactgtagttaaaattatgactgaaatagacagggaaaacctgagagtgaacgttacccagcaaatctgggttaaacaggttcgagtttttccagagcacactgtttaggatttcagcttcctgttcaaccatctcggaaacagggtgtttctctgctcctttgtgaggactaaccatgtgtccccgccactttgcaccaaagctgaatatcatcccaaactctggatccttctgacgggcatttgtgtggacacagggaaggggtgcattatgaatatgcaattacctggcatggaatggtgncttctgcttaaaatncnaaaagggtactctgatctcagagttgggagctggatttctggatttcaagcctaaacaggtctggcttaaaact

SEQ ID NO: 1907 - DNA, 806 bp, Homo sapiens
  misc_feature (711)..(711): "n" may be a, t, c, g, other or unknown
  misc_feature (745)..(745): "n" may be a, t, c, g, other or unknown
  misc_feature (773)..(773): "n" may be a, t, c, g, other or unknown
tttatgtgagttcatattcctccttgcaagggcccagagaaatctaggatccttatagtttagaatttctttgcccccctagatattttgaatctgaaggaaagaatggtacaacacatatcatgaactggctgatatgtagatggtgtttttgtgttgttgttgttactataggagtttaatacagaaatattttaaaattagcaaattttagaaacagagattatgcatgtcacttgaatataactgtagggcaaacttgtcaggagtggagtagcagtggttctctccagagagtgcatttcttgtccctgccactttcagccttactctgtctggctagccacctcggtctcaaccctggctctttttagcatttagacttgtagctgcctaagtaaattcaagtgctgtgggttgttataggtatgctgagatagtgattttctctgacacttggagaatgatgggaataaagttgggagatgcccagttagccttttggtaacttcaggcacagcctggcattccccaggatgtcccaaggttaggggttcggggaatccgttcccatgaggggcctttcttgtgttcgtacccagctgttgaagactgccaactcttaaaggccttccacagacatagaagaaagaaatctacatgttctttaccaggcgggtgcctctaatcccacctactcgggaggctcangcaggagaatcacttgaactcgggaagtcgaggntgcagtgagcccgagatcgcaccactgngcttcagcccagccgacagtgtgagactccgct

SEQ ID NO: 1908 - DNA, 752 bp, Homo sapiens
  misc_feature (632)..(632): "n" may be a, t, c, g, other or unknown
  misc_feature (682)..(682): "n" may be a, t, c, g, other or unknown
  misc_feature (730)..(730): "n" may be a, t, c, g, other or unknown
  misc_feature (751)..(751): "n" may be a, t, c, g, other or unknown
actccgatcagctgatcccaactgacaacaggagaggaggaagcccgggaggcaacgaaggaggagggtggcggagatggagatgaggatggatctgccggtgtcctgaggaatagcctctgcccccactggcgccctgcggccccccgacgccgccttgctgcggccgagcttctcagtggtatcccctgaaatactgacttcaggtcgaattatattgaaaagctcctgaccactttctttcattaccaaaactttgtagctgatgtccaaccgatgaacccaccaccgtgaacccatcagacctctctcagatagccataaaagacccttccaagtcaattttgaccacatctttgcttgcactttatggaggatgaaaccatcaaaccaaatcaacgttgctgctaatacaagagtcttagaggcagcaaattaaaaatttgaacatttgtttgtgaagaactataacaggacatgaaaggtgttcttttttaaagtgttcagaaccctgtggaagtttcgtgcagtcttcagactcaaatcttcgtcttcacccccggggcaagctcagtgactattatatggtgggtgtgtttccttaccagcgtgagtatgagtgcccagacttncccagcagagaagggcctgaatccggggctgatgtgccaggaaagttacncttgcagcgggactgatgaagctatctttgatgtgatgagtgctgcantctgcaatgtcttccgctgcna

SEQ ID NO: 1909 - DNA, 760 bp, Homo sapiens
  misc_feature (723)..(723): "n" may be a, t, c, g, other or unknown
  misc_feature (736)..(736): "n" may be a, t, c, g, other or unknown
  misc_feature (757)..(757): "n" may be a, t, c, g, other or unknown
atacaaaaaaattagccgggcatggtggtgggtgcctgtaatcccagctactcgggaggctgaggcatgagaatcacgtgaaaggcgggggttgcagtgagccaagatcgcaccactacactccaactgtgcaccacagcgagaccccatctcaaaaaaaaaaataataataataataaaatcatctctgccccaaagctatttcctcagatgcaaacattttccttgaccatagccaattaacctctcaacatctaatccacctccctttggaactggctgataccttgagaaacctttcttctccacagagggtctgccagttcagatgctgaaaagtttttctatctggagaaacccataagccatactattagacctatgccccaaagagctaagctaagttaaacacacagtgtttacaaatgagcagctgaaaaggcacacaagcttaagttgcagaagacacacacttgattttccttgctatggagggccctttagaacattccctacaaagttattttagaatgtgaagagacagctgggagcggtggcttgagtctctaatcccagtactttgggaggccaaggcgggcagattgcttgagcccaggagtttgagactagcctgggcaacatagtgaagccctggtctctacaaaaaatagaaaaaaaattagccgggtttggtggcatgcgcctagacccagctactgggangctaaggtggganggatggctttgagcctgggangca

SEQ ID NO: 1910 - DNA, 702 bp, Homo sapiens
  misc_feature (624)..(624): "n" may be a, t, c, g, other or unknown
  misc_feature (694)..(695): "n" may be a, t, c, g, other or unknown
gatgtatatgtttaattgcttgggtagtaaaagtactctttgctgacgtgtttgccacttattgcattaatgattaatcattttaatgcattttgatagtataaaaagacgcctttattatgtgtgtgtctctataccaataacagagcttagtgaactttgaattacttgcttggcaattgttttttgaagttgtcagctgtatttgcaaatttgcttgtttcagtttagaaccaggcttttcccagcagagacacttaattgacatttggggccagataattcatagttggacgggcaggctgtcctgtgtatagcaacaaagatggcctccactcactagatgccagtagtagtacccttatcccccaccacctagttgcgacctagttgccacaccaaaatgccaccagtcattgccaatttttttttgtcccctacctctgggggacaaaaatctcacagttgagaatcactgctttagaacaaaatttgctataggtgaccttagagatggaagtagggattggtggtagaaaggggtttgttttagagcatacagaatattggtatggtattttgaattgtataacaattgtataataattaggaaaagtcagttgnttaatgcgattattaggggaagtagccagatcttaggaaagcctgttttaaacctgaaatcggccgggcnnccggggt

SEQ ID NO: 1911 - DNA, 737 bp, Homo sapiens
  misc_feature (618)..(618): "n" may be a, t, c, g, other or unknown
  misc_feature (654)..(654): "n" may be a, t, c, g, other or unknown
  misc_feature (726)..(726): "n" may be a, t, c, g, other or unknown
  misc_feature (734)..(734): "n" may be a, t, c, g, other or unknown
agttttaatgttggagctagcccagttgtatgagtgtgctgaagaagccagtctctgcttgccttcctatagctccaattagacatttttaattacagtgcaatcgctgcaactattctgggccatttcaacccatcccactccacgaatactcagctcagtcttagcattggacatcagtagcaagcaactagatgctcccacctcaggaagcttctaattttgtggggactacccctgttgtgcttattgctaaacttatacttcagtgaacctttcaattctacataatatattccaactcattttgtggaatctgattttttttttttttttgctgactttcctttcacaggtatttagtaagtcaatgacgggcagcagcaagccaggcttctattatagtaataataatcagataaccaataatcactgaggattctgtacattccaaagccatgccaggggggggggccacgcgggaggcccgggttcgtttcccggccaatgcaccacagcggccttgggtttgggctccagccccagccgggccccctcgcgccgctgcggctgctgcgcggtgaggtcgtgacaagtcacagctaacttgcccttcgngccattccacgccaccaggaagcgcaccggtgcctntcgggatcggcgaaaagccttgccggacccggcgcccagcccttcagctgtcgagctgtcgtcctccatggncgcgcggnagc

SEQ ID NO: 1912 - DNA, 797 bp, Homo sapiens
  misc_feature (763)..(763): "n" may be a, t, c, g, other or unknown
  misc_feature (776)..(776): "n" may be a, t, c, g, other or unknown
  misc_feature (792)..(792): "n" may be a, t, c, g, other or unknown
actagctgggcgcagtagtgcgcacctgtaatcccagctactcgagaggctgaagcaagagaatcgcttgatcccgggaggcagaggttgtgtgtggtgagctgagatcgcgccactgcactccagcctgggcaacagagcaagattccgtctcataaaacaaaaaaaaattatgagatttttaatgtgtggcccaattcctcttcttgcagtgtggcccagggaagagaaaagattggacaccccagcataaagccttcctcccattctgcagtggcgtgggatcagggaacagaaactcattttcatcctactgttgtggggaaccattcagtacttcctacagggcaggaggacgccaacatgcgaccaccttcctcccctcgccgacctccgactcccgcccagcccaggcgccccccaggctcctggaggttgctccgcgttgctgttgctgcaggtgaagggacacaggttgaggcccctccttgtaggacttctgagcctcacccccgagccctcgtaagatacctgtggagctgatctcaaagaaatctccacatctaattcagaaccatcatctcaccagaacacaacggccttgctcctgcctgggtgctgtaccatgatggcaccacaatggtccaagtgaccaccacctttgctggaacggctgcatgcacacagcactgggcacaaccacgtctgcagtgcccatgactggtcaccatgtcagcccttaacacggaacagggggcaacancaccatgaatatncttcagcccaactganccttg

SEQ ID NO: 1913 - DNA, 822 bp, Homo sapiens
  misc_feature (733)..(733): "n" may be a, t, c, g, other or unknown
  misc_feature (742)..(742): "n" may be a, t, c, g, other or unknown
  misc_feature (819)..(819): "n" may be a, t, c, g, other or unknown
atgaaaattattagcatagcatataagataatttataaagaatctagaatctaaaatgtacaggaggatgtggataggttatatgcagatactataccactttgtataagagtctgaagcattcgaggattttgatattcaggggggttctggaacaaatctggatactgagggatggctctacagcctttcagaattaaattttctatgattttaatggttctttcaaagaccatgacagtaatcactgacgcctgttgccttacaaatctgcttgtacaagtaacatttccatgattatatgtacaagtaaaaaatacccactatacaaataacaaatccaagatcagtgaaattgagtacgatgacaattaaaatggtttgcataaatgtcctataacacatggaacacatgattcatcctcttgctaatgttcccagtttggcatcttctaagatcatattatttgagcacaattcttgatgcagaatcatctctctgttcccctactcgcttgtgagagggaacatttcctccttatgtgtcttagaatatttttacctaacatgcttaaacaaaacaaatttcattcttaacatcaggctctgaaagttccttttagttagcatttgctatattgacagctggtttgacaagtacatattttagcataagaaaaaaacagcaggccgggtgcagtggcccttgcttgtaatcccagcactttgggangccaaggangcagattgcttgagctcaggagatcaagggcagcctgggcagcataccaggaccccgtctttacccaaaaaaaaaangaa

SEQ ID NO: 1914 - DNA, 745 bp, Homo sapiens
  misc_feature (669)..(669): "n" may be a, t, c, g, other or unknown
  misc_feature (701)..(701): "n" may be a, t, c, g, other or unknown
  misc_feature (731)..(731): "n" may be a, t, c, g, other or unknown
tggtgcgtttgatgtggcacagttccacatgtgagggatggtgatttggatagcacgacagaagtacgtgccaagaataattggcttctgtcttgcggaacagctcaaatactatgtgtatcacagtatgtaatttgggtgtacaaaatgcctgtagttgaaagtgctttactcctctgcagtggcaagctgagcttcctgttggctgattccttatgtttgcagtaaacaggctgggtgcagttagaaagaaagcatccatctagtaagtgcattcacatcatccttcaaatgccataggccttagctccaggacattttctgcctgtctccttccctccctcctttctttcttttcctctctccttccctctttcctttgttccttctttcctccctccccttccctccttttcttcctagttccccctttctttcctttcttctattgaataaaacgcaaagtaattctttttctacttactttgattcttatcagctttcttaagcagtttccttgccgctgttgtgaattacatggggctgtggtaaaatgtggcacatttcaaggctatgtatccctttagattctggttcactaagcttggaaataaataggagagcttacgcttttaactactagcctgcgattcgtataatcatgttagnttgagaaacacttcagtaatcacacatgtaanggctttggagtaagatggaccttgggtatncaacgcttactggg

SEQ ID NO: 1915 - DNA, 809 bp, Homo sapiens
  misc_feature (653)..(653): "n" may be a, t, c, g, other or unknown
  misc_feature (720)..(720): "n" may be a, t, c, g, other or unknown
  misc_feature (756)..(756): "n" may be a, t, c, g, other or unknown
  misc_feature (774)..(774): "n" may be a, t, c, g, other or unknown
acagatagaacccaaagaaaggcaaagagtcctgcccggcaccggcgccgcgtgggccaaacctgcgcccgtggaggggcgcgcagagggcaccgggcgccgggagcaggcggcgcagcaccagcattgtgttagtgccgggaggccactgtgtcagcaagctgagagggaaactgaagcaagatgtcgggccggagtgggaagaagaaaatgtccaatctgtcccgttcagctagggcaggtgtcatctttccagtggggaggctgatgcgttatctgaagaaagggacgttcaagtaccggatcagcgtgggcgcccctgtctacatggcggcagtcattgagtacctggcagcggaaattctagaattggccggcaatgccgcgagggacaacaagaaggcccggatagccccgagacacatcttgctggcagttgccaatgacgaggagctcaaccagctgctaaaaggagtgaccatcgccagtggaggcgtcctgcccagaattcaccccgaactgctggccaaaaagcgagggaccaaaggcaagtcggaaacgatcctctccccacccccagagaaaagaggcaggaaggccacgtcaggcaagaagggggggaagaaatccaaggctgccaaaccacggacgtncaaaaagtccaaaccaaaggacagcgattaagaaggaacttcaaattccacctctgaagatggccangggatggattcaccattctgtcttctaaaaccttgntctgggacagaactgtcntaacccagatgacatagccatattgcttcatgaga

SEQ ID NO: 1916 - DNA, 833 bp, Homo sapiens
  misc_feature (739)..(739): "n" may be a, t, c, g, other or unknown
  misc_feature (785)..(785): "n" may be a, t, c, g, other or unknown
  misc_feature (800)..(800): "n" may be a, t, c, g, other or unknown
atttgccctccttccccccttcgtccgctctcattggctctgctgccttcatgtgcttcagccctacgttgtttatgtccagaatcagatattggagctgactctgcctgtccagggcctgcagagtggctgagctcccttcgggcccatgttgtgcgcactggcattggacgagcccgggcagaactctttgagaagcagattgttcagcatggcggccagctatgccctgcccagggcccaggtgtcactcacattgtggtggatgaaggcatggactatgagcgagccctccgccttctcagactaccccagctgcccccgggtgctcagctggtgaagtcagcctggctgagcttgtgccttcaggagaggaggctggtggatgtagctggattcagcatcttcatccccagtaggtacttggaccatccacagcccagcaaggcagagcaggatgcttctattcctcctggcacccatgaggccctgcttcagacagccctttctcctcctcctcctcccaccaggcctgtgtctcctccccaaaaggcaaaagaggcaccaaacacccaagcccagcccatctctgatgatgaagccagtgatggggaagaaacccaggttagtgcagctgatctggaagccctcatcagtggccactaccccaccttccttgagggagattgtgagcctagcccagcccctgctgtcctggataagtgggtctgtgcacagncctcagccagaaggcgaccaatcacaaccttcatatcacagagaanctggaagttcttggncaaaagcctacagtggtcaaggagacaagtgga

SEQ ID NO: 1917 - DNA, 861 bp, Homo sapiens
  misc_feature (773)..(773): "n" may be a, t, c, g, other or unknown
  misc_feature (780)..(780): "n" may be a, t, c, g, other or unknown
  misc_feature (820)..(820): "n" may be a, t, c, g, other or unknown
gaaacgatgaatgtttgagatgatgaaaatgctaaataccctaatttgatcatttcacaatgtgtatatgtattgagacatctcactgtacccccaaaatatgtacagttattattatgtgtcgattaaaaatttaatttttttttgagatggagtctcactctgtcacccagggttagaatatcaaaatatctaatttatatctaatcatatgggttaggatatctaacccatatgattatgcaatttaggctctctagtgtgattccaggccttctggtttgcttatattgatccctaccctagctagagagaaagagccattctaatgaagatttttgcagttagatacttagttattggtttttccaaaaggaatccaatttacttttgctgtgagctattttgacaaatagtgagaactctgaaagttaatagtttgtatcttctttaggggtatcgctggagaatttccccctctgtaaagaattgctcattccacctggaacccaaaactatatggtgagaatgcgactctatgacgtcaaccgtcggcagctgaacctcaccatccggattgtgtgtcgagcagaaggatccttaaagatcttcatttctgctccatattggctgattaacaaaacaggtacatacaggggctgctcaagtaggtctttggcgttagtcatgggaattcagatttatttgcttagctaactaaatggagccaatgcaaatagattacttcaacagtctgagctgctggaacattnctgcttncatcataaatgcttaatcatgctcaaaactggctttttangcaagaactgagcccactaaatagattcagtttcctctttc

SEQ ID NO: 1918 - DNA, 860 bp, Homo sapiens
  misc_feature (644)..(644): "n" may be a, t, c, g, other or unknown
  misc_feature (787)..(787): "n" may be a, t, c, g, other or unknown
  misc_feature (847)..(847): "n" may be a, t, c, g, other or unknown
agaaaataaatatatcttacccttcaactaatatgtttctgaatcttagaaaattactatgatattagtattcaatttcttatattctctgtctccctcttctctcatttcctttccccttttcttcccctctgttccttcccccaatcattctcttctctattctatgtctctgaagctatcctggccttttagtcgtacctcaagctgtacaggacagtagtttaccaagagtagctcgctgctatcgacacaatcgcctgcctgttgtatgttggaagaactcaagaagtggtactctgctcctccgatctggaggaaccataagtggcagctcttcccgttcaagacccgagtattttagaattactgcctccaacaggatgtattcactctgccggaggtaagtgtgtcagtgggctccaaaaagaggtcttccttcctttcttcttatttgaatctttaataggccatttgcatccatagccctgagatagataaaaatgcctgaaaataagaacaaggtctccaggatacgagcaagcatctcattggcattctcggaacaattaccttactgaaagtacctctagtaggtgagaaggtgaaaggtaaagtactcaccccctatgaatttctcttgnctttctcttcccagtttgcttcttttctagcatgactaaagataacttgaagaacaggattttcccagcccaatagaggacatgaaagtcttttgtaggctggggagcccaaactctttctataaagggcaagtgggaaatantttcagttatgagccatagagtctctggtgcagctattcaactgtgccgaaaagcagccncagacagtaagga

SEQ ID NO: 1919 - DNA, 758 bp, Homo sapiens
  misc_feature (663)..(663): "n" may be a, t, c, g, other or unknown
  misc_feature (727)..(727): "n" may be a, t, c, g, other or unknown
  misc_feature (747)..(747): "n" may be a, t, c, g, other or unknown
gttgtagagataaatgaaaagttcacagagttacttttggcaattaccaattgtgaggagaggttcagcctgtttaaaaacagaaacagactaagtaaaggcctccaaatagacgtgggctgtcctgtgaaagtacagctgagatctggggaagaaaaatttcctggagttgtacgcttcagaggacccctgttagcagagaggacagtctccggaatattctttggagttgaattgctggaagaaggtcgtggtcaaggtttcactgacggggtgtaccaagggaaacagctttttcagtgtgatgaagattgtggcgtgtttgttgcattggacaagctagaactcatagaagatgatgacactgcattggaaagtgattacgcaggtcctggggacacaatgcaggtcgaacttcctcctttggaaataaactccagagtttctttgaaggttggagaaacaatagaatctggaacagttatattctgtgatgttttgccaggaaaagaaagcttaggatattttgttggtgtggacatggataaccctattggcaactgggatggaagatttgatggagtgcagctttgtagttttgcgtgtgttgaaagtacaattctattgcacatcaatgatatcatcccagagagtgtgacgcangaaaggaggcctccaaacttgcctttatgtcaagaggtgttggggacaaaggttcatccagtcntaataaaccaaaggcttccnggatctacctt

SEQ ID NO: 1920 - DNA, 865 bp, Homo sapiens
  misc_feature (788)..(788): "n" may be a, t, c, g, other or unknown
  misc_feature (796)..(796): "n" may be a, t, c, g, other or unknown
  misc_feature (826)..(826): "n" may be a, t, c, g, other or unknown
ttctcagtctcttttggtgaattctttttctctactatcttttaaataaataaatgttgatgtgcccaggcttctacactgtatcttctccccagatgatctcatcccacatttatttatttataaatagagatagggtcttgctgtattgcccaggtcttgagctcctgggctcaagcggacctcccacctcagcctcccaaaatgccagaattaacagatgtgagctaccgatcctagcccatccccacactcttgaatttcacaccacccaaatttgagccactaactcagagttctccccatggcttcactatatctagcttcctcctgtgctccatctgaacacatattattcattccctcatataagatatgctgctcttcttgttttccctatcatattagttggtgctactagccaccaagactctcaagccaaaagactgaaaattatcctagtttacactttccctcaccccactcttaatcagtcactttattcttcctctgtgtatctgaatctcatccacttctctccatcctcacagccatcgcccgtttgcccacctggtttcactagactggactctaccctcaaatctcaccatcctccaccctattctcccattccccctgtcagacacttcctcacgttgcataaaaggttagttatcataaatgattcactacaatctggtcccaagctttacccttcagcactgctaagacacttcattttggcatgcaccattttggaagatctcaaaatccttttcgggacaatnaaatatcntacccttgatacctgaagtgtggttctgangccctgaagcgtttgcattactggattaaaaatcacagg

SEQ ID NO: 1921 - DNA, 772 bp, Homo sapiens
  misc_feature (683)..(683): "n" may be a, t, c, g, other or unknown
  misc_feature (765)..(765): "n" may be a, t, c, g, other or unknown
  misc_feature (770)..(770): "n" may be a, t, c, g, other or unknown
cttgtaagatggcggcgcccaggtggagcgcgtcgggcccctggatccggggaaacggccaaggttgcgggagtctcttcactctcgtctcagagccattttgtgccgctgccgctgcctctacggccataaatgcccggagattagcggagaagctccgagcccagaaacgggaacaagacacaaagaaggagccggtgtccacaaacgctgttcagcggagagtgcaagaaatagtgcggttcacacggcagctgcagcgagtccaccccaacgtgcttgctaaggcactgacccgaggaattctccaccaggacaagaaccttgtggtcatcaataagccctacggtctccctgtgcatggtggccctggggtccagctctgcatcactgatgtactacctatcctggcaaagatgcttcatggccacaaggcagagcccttgcatctgtgccaccggctggacaaggaaaccacaggtgtaatggtgttggcttgggacaaggacatggcacatcaagtccaagagttgtttagaacccgtcaggtggtgaagaagtactgggccatcactgtgcatgtccccatgccctcagcaggagtcgtggacatccccattgtggagaaggaggcgcaaggccagcagcaacaccacaagatgacattgtccccgagctaccgnatggacgatgggaaaatggtgaaagtgcggcgcaacccggaatgcgcaagtttgctgtaacttagtaccaggtgcttaacancactntt

SEQ ID NO: 1922 - DNA, 800 bp, Homo sapiens
  misc_feature (622)..(622): "n" may be a, t, c, g, other or unknown
  misc_feature (740)..(740): "n" may be a, t, c, g, other or unknown
  misc_feature (764)..(764): "n" may be a, t, c, g, other or unknown
  misc_feature (770)..(770): "n" may be a, t, c, g, other or unknown
tcctaaataggagcgaggagggggacaatctttcccttcacccccacatcttcctttcctcttccctacctccctgtattaatactgagaaaccacacctgaacaatgaaatgactaggaactacggtttctggttgtgttcccaagtgggaatatgggctgttcacgacctcggaatgtagaatgccctcattatttattcagtagacatccaataaatgcggatcaacagcttgcctatctttgatagtttttggcagtgtgtgctggttttaatctttgtacttgtcccataagtgaccccatgactagagagtgggctcttccatcttgtaagagccttctgttcacgttctgttctttttatgagaaggaagttccagtgcatatcccaacataaagagaaacgttgaatacgtactgtttttctcttatatatatgctcaaaataacgactgtagtaaacagtcgtcatgattataggatgaattacgcagccattcatagatttttgtagttgtcatttacaagtggactatgcaatagttcataggcttatgaatacataatctaacaatattagctgggtgcagtggctcacacctgaaatcccagcacttancgaggccaaggtagcttgattgctagagcccaggagttcaagactagcccgggcaaagggcaaaaccccatctctacaaaaactacaaaaagaaattagccgggcatggtggtgcttnccgggagtcccagctacttgggangcaaangtgggaaggcacctgacctgggggtgtcaa

SEQ ID NO: 1923 - DNA, 814 bp, Homo sapiens
  misc_feature (615)..(615): "n" may be a, t, c, g, other or unknown
  misc_feature (647)..(647): "n" may be a, t, c, g, other or unknown
  misc_feature (676)..(676): "n" may be a, t, c, g, other or unknown
  misc_feature (736)..(736): "n" may be a, t, c, g, other or unknown
  misc_feature (775)..(775): "n" may be a, t, c, g, other or unknown
  misc_feature (795)..(795): "n" may be a, t, c, g, other or unknown
cttcttactgttctttctgtcttactgtaactcctcctccctccctgatttaaaagaattttttttttttttttaaaagaaaaaagactttctggccgggcgcggtggttcacgcctgtaatcccagcactttgggaggcagaggcgggcggatcacgaggtcaggagattaagaccatcctgattaacatggtgaaaccccgtctctactaaaaatacaaagagttggccggatgtggtggtgggcgcctgtggtcccagctactcggaaggctgaggcaggagaatggcgtcaacctgggaggcggaggttgcagtgagccgagatcgcgccactgcactccagcctgggtgacagggcgagactctgtctcaaagaaaaaagaggaaaaaaagaaaaaagactttcttattaagagagcattatacaggccaggcgcggtggctcatgcctgtaatctcagcactttgggaggccgaggcaggtggatcacgaggtcaggagatcgagaccatcctggctaacatggtgaaatcccgtctctactaaaaatacaaaaaattagcggggcgtgatggcgggcgtctgtagtcccggctactcgggcggctgangcaggagaatggagtgagcctgggaggcggancttgcaacgggctgagatctcaccactgnacttcaacctgggcaacagagcgagacttcgtctcaaagagagagagagacagcattatncagagaacaaattgggtagacttttttagaatgatagantgcagtactcttatacctgngggggaaagaaaaaggctt

SEQ ID NO: 1924 - DNA, 688 bp, Homo sapiens
  misc_feature (383)..(383): "n" may be a, t, c, g, other or unknown
  misc_feature (645)..(645): "n" may be a, t, c, g, other or unknown
  misc_feature (663)..(663): "n" may be a, t, c, g, other or unknown
  misc_feature (677)..(677): "n" may be a, t, c, g, other or unknown
tactgaaaatgtggctttcataattgtcttagcttagaccattcatagcattattacccaccttgggagtgggaatggtaggaggaggataatgaactggggaagcttcctttagctccccagtaccaaaaccacactaaataagttttgatttcctgggcttccttgttttatgttgaaattggtggtgaggctcagtaatagtttcttaaatgttaaggctagaagttgtacaccacctagtggctgtgtacattaaaacaggaagcagaaaccggccaggaagagggagccggatctggatgtgtctattggagtgactgcagcactccatatagaacctgggcattgctctctttatttttaattgaagtaaaatttgngatagcattttacaaattgaaaatagctgtgtcatttaaaaaattcccattaaatttgttcccagtacccctcatgtttccagtgatttccttctactctgtcagtgtgcggttaagccgtatagactcattttaatactaatgtcagccaaataaaattaataagttaaacttatttcccttatcattatatacatcctaaagccaatgtattttaaaattgcttgtccattgcctgctctcctttgataaaaattgtagnttcacttagcatatggtnattgattatagtcncaaaatagacc

SEQ ID NO: 1925 - DNA, 674 bp, Homo sapiens
  misc_feature (621)..(621): "n" may be a, t, c, g, other or unknown
  misc_feature (623)..(623): "n" may be a, t, c, g, other or unknown
  misc_feature (669)..(669): "n" may be a, t, c, g, other or unknown
tggtgaccaagatggcggcggagctggtggaggccaaaaacatggtgatgagttttcgagtctccgaccttcagatgctcctgggtttcgtgggccggagtaagagtggactgaagcacgagctcgtcaccagggccctccagctggtgcagtttgactgtagccctgagctgttcaagaagatcaaggagctgtacgagacccgctacgccaagaagaactcggagcctgccccacagccgcaccggcccctggaccccctgaccatgcactccacctacgaccgggccggcgctgtgcccaggactccgctggcaggccccaatattgactaccccgtgctctatggaaagtacttaaacggactgggacggttgcccgccaagaccctcaagccagaagtccgcctggtgaagctgccgttctttaatatgctggatgagctgctgaagcccaccgaattagtcccacagaacaacgggaagcttcaggagagcccgtgcatcttcgcattgacgccaagacaggtggagttgatccggaactccagggaactgcagcccggagttaaagccgtgcaggtcgtcctgagaatctgttactcagacaccagctgccctnangaggaccagtacccggccaacatcgcttgtgaaggtcaaccacagntactg

SEQ ID NO: 1926 - DNA, 625 bp, Homo sapiens
  misc_feature (586)..(586): "n" may be a, t, c, g, other or unknown
  misc_feature (599)..(599): "n" may be a, t, c, g, other or unknown
  misc_feature (619)..(619): "n" may be a, t, c, g, other or unknown
agcatcgagtcggccttgttgggaaaaagaaagaggcagtaattcctcttgtgggcaaggttctgcagaatgatttggctcctgcaggttaagtgcccagtcataggtgtgggatagagcagactcctacggatgccagtggagacgttgtgggcctgggtctgctgcccactccccagtgggtcaggactccggcagggtctcctgggctaaagcatggaggtgactgtgtcccaaggcactggcagctctgcccagcctgttcctttcccaccctctggccctcagcgactttggctgcatgtgcctctggcagggcagaaccagaagtgggggcctagtggccttccaatttggggttcttggagaaggagcctggcgtgccctccttggggagcaggtggacagactggatgttttatggagtctgggggagtcctgcggcagctatatctgttaaatgccaagaagccaagttggtttaatatgattgtagctgctgctttgataaatcaaaataattaaaaataataaatttgattcctcaaccaacaggctgtgtgtgggcgcagggcctgggctgccnagtcagggccgangaggtgggagtgggcacggngacaca

SEQ ID NO: 1927 - DNA, 859 bp, Homo sapiens
  misc_feature (857)..(857): "n" may be a, t, c, g, other or unknown
catgagcttaaaggaaaagtgtaaaaattctaatcagaaaagaagcttttattctccctaaattatgggtaacatgttcagcaaactcttcatttaattcttttgcatggtgttatgtaaacatgctagatctgggctaggagacttggattctaggcctggctctaccttgaacttgctctgagaccttgggcaagtcactatacatctctgggcctctaatttttcatgtgtagaaataggaggctaaggaaaaagattaaattagcatttcgtagatcactaggtatcatatcaggcatttcacacgcatcatctcatttactcaacaaagattaatggatgtctacagtgtgatacagcctgtcttcaagcagcaatcaatttagaagggaagacagccctaggatctaaaagcatgaagtctgggatgtgcagagggaggtaggaagcccagcccagaagaggggattccagcattagagtcctatgattataagttttgaacagattgttttattttaaaaatgcccttgaaaactggaatgtgcttacaaatattttaggctcaaatcaggatgaattgactatattgcagtactttctggaatatgctgtatttcccaaatctgcattaccccacattccaataattgctggtggtctctgctttttgcttagcccaaccaagtataaaaagcttccaggactccttgcagccactgggctagactgcccaaaagaccacaacttccatactattagagagaaagacctctagttccttttccctttggtggatctggtccctttcttatatatcgagactattatgaacccgtaaccacaatttcttnca

SEQ ID NO: 1928 - DNA, 756 bp, Homo sapiens
  misc_feature (692)..(692): "n" may be a, t, c, g, other or unknown
  misc_feature (704)..(704): "n" may be a, t, c, g, other or unknown
  misc_feature (708)..(708): "n" may be a, t, c, g, other or unknown
gtaacgccttcaaccgcccgccgcgatagagtgcccacgaccctgcctcgggaatcccgctctgcaccgccccaccagacccggactcggagccgcgagcggcccgagatgagcagcaatgactcctcccttatggctgggatcatttactatagccaggaaaagtacttccaccatgtgcagcaggctgcagctgtgggcctggaaaaattcagcaatgaccctgtgttgaagttctttaaagcctatggagtcctcaaagaaggcaatgtacttcatgatgcagcagaactactcagaggccctggaggtggtgaaccagatcactgtgacttcagggagcttcctgccagccctcgtcctgaagatgcagctgttcttagctcggcaggactgggagcagacagtagaaatgggacacagaatcctagaaaaagatgagagcaatattgatgcctgccaaattctaaccgtgcatgagcttgcaagagaaggaaacatgaccacagtaagttctttgaagactcagaaggtgatccttgaaacagaatcaaggaggaacccttcatgacctgtgcacctgacccaaagcccttgtagggagctcctggatctcagcttctcttttctaccccacccctatactcgctgccaaggaggcctgctctggtttgactctttgagttgtgtancttgggagtcangcancattaggcagtgagattgattctaggctctggcatgtgctatctgtgg

SEQ ID NO: 1929 - DNA, 718 bp, Homo sapiens
  misc_feature (639)..(639): "n" may be a, t, c, g, other or unknown
  misc_feature (684)..(684): "n" may be a, t, c, g, other or unknown
  misc_feature (697)..(697): "n" may be a, t, c, g, other or unknown
agcaccggaagccgctcccctgtgaggctgcggaccgggagcagcggccgcaggtccgggcgccatggctgcagagcggacccggccgctgcaaggctctggcggtccgagcgtgcctagtagctgtgaacccggcgcgaggtcccgggccccggggcgctcgctcaggtaaatttttccataaccttatggagagaaaggactttgagacatggcttgataacatttctgttacatttctttctctgacggacttgcagaaaaatgaaactctggatcacctgattagtctgagtggggcagtccagctcaggcatctctccaataacctagagactctcctcaagcgggacttcctcaaactccttcccctggagctcagtttttatttgttaaaatggctcgatcctcagactttactcacatgctgcctcgtctctaaacagtggaataaggtgataagtgcctgtacagaggtgtggcagactgcatgtaaaaatttgggctggcagatagatgattctgttcaggacgctttgcactggaagaaggtttatttgaaggctattttgagaatgaagcaactggaggaccatgaagcctttgaaacctcgtcattaattggacacagtgccagantgtatgcactttactacaaagatggacttcttttgtcagggtcanatgacttgcttgnaaactgtggaatgtgagcaca

SEQ ID NO: 1930 - DNA, 795 bp, Homo sapiens
  misc_feature (658)..(658): "n" may be a, t, c, g, other or unknown
  misc_feature (684)..(684): "n" may be a, t, c, g, other or unknown
  misc_feature (733)..(733): "n" may be a, t, c, g, other or unknown
  misc_feature (765)..(765): "n" may be a, t, c, g, other or unknown
  misc_feature (790)..(790): "n" may be a, t, c, g, other or unknown
tttccctggaaaaacaatgatttgaattcaaggaggggaggagaacaggtttcccccaactccaagcttgaggactttcttttccttttgaagtaggaatggagttctgtccccggcccccgaaggcgtccttacagctgatatttttccagctgcctatctccccagagcgtggagcggcctccagagtggggtcagggatggggcgagagggccagacctgcctgggccgggcagctcagcatctctctgagctgctgaacacctatggaggctgtgctcatgttcactggtggtgtgactttgtgtgaccttgccacttcactctttcacagcctcgtttcctttatctgtcaaatggggatcatgagtccactgggtggcttttgaagaacgtgccacaatcagagaaggtctgagctgggaaatgcaacagaggccttctcctccttgaccagtggggaaacagaggctcttaaaactggcatagatccagcttcctgcccctagtctctgtctttcccattccatcaggaccagatctcagaataggggattggcattttcatgctggggagctgggtatcattttcttttcagagacttagtagaaaataaaaggatccctgagaaattctttatgtgcaggtgcttgtcnatggtaggggtgacctcaggacccgnactgtctgcccatgaccaaggagtgagactgcttggacattggccttgngtcccccctgggggtctggatcaaaagcccanccttgaaggtgacaacccttacctncagaa

SEQ ID NO: 1931 - DNA, 707 bp, Homo sapiens
  misc_feature (705)..(707): "n" may be a, t, c, g, other or unknown
tttaagtgcaaagttcagtagttaagtacattaatattgttgtatagccatcaccgtcatctatctccagaactctttctatcttgcaaaactgaaattctgtacccgtaaacagtaactccatttctcttctgcagcattggcaatcaccattctccttcctctctctgtttttgactgttctgcctcataaaagtacctcatgtgaatggaatcatacagtatttgtctttttgtgcctgatttatttcactcagcataatgtcctcatggttcatccgtgttaatagcatgtgtcagaatttctatcctttttaaggctaaatgacccattgtatgtacgtatcactgtttatctattcatccattgatgaacacttgatcacatatttttatttaaaacatttttaaagccaggcacaatggctcatgcctgtaatcccagcactttggaaggttgaggtgggcagatctcttgaggtcaggagttcgagaccagcctggccaacatggcaaatcccatttctactaaaaatacaaaaattagccgggcgtggtggcaggcgcctataatcccagcttcttgggaggctgtggcaggaaaatcacttgaaccccggaggcggaggttgcagtgagccaagactgtggccactggactccagtctgggcaacagagcaagactctgtctcaaaaaaaaaaannn

SEQ ID NO: 1932 - DNA, 865 bp, Homo sapiens
  misc_feature (739)..(739): "n" may be a, t, c, g, other or unknown
  misc_feature (796)..(796): "n" may be a, t, c, g, other or unknown
  misc_feature (847)..(847): "n" may be a, t, c, g, other or unknown
  misc_feature (856)..(856): "n" may be a, t, c, g, other or unknown
tgtggaaatgaagcatctctttctgttttctctttgagatggtttgagttagattgtgtctcttccaagcttgccacaccccagtgcctccagtcatctgctttcttgaaggatggccacgctggtgaattctagacaaattctaacccggggagagggctggagaatttctggtcctggttgggagatactccctgttaaaccttcggatatgctgacctagctgaggtagccaggggctatttaaaaattcaaaatctcagatctggctgtggataaacccccaaggtggtacgtgcagtacttggaggcgtgagggcagaaggtcctccccagcagtttgtacgggacacatcatctatgggatattagtaaatatccttaaggaaaggcttctgtggtcaaaaccaggttcagcaggttatttcactatggggcttctcaggacgcttaacctactcatccccctctgggctttgcaaacgaggccgccattgctttctttctgctatgtagaaatagattgaggcgtaagggtcggatgtcctttctccattcatcaggctccctcttcctgaggagctgctgtcagaacagcctggggctgctgtgttgcaggttatggtggcatatccttggcggtggaaggccccagcaaagtggacatccagacggaggacctggaagatggcacctgcaaagtctcctacttccctaccgtgcctggggtttatatcgncttcaccaaattcgctgacgaacacgtgcctgggagcccatttacccgtgaagacantggggaaggaaagtcaaggagagcataaccggaccagtcggccccgtccgnggcactgcnggaacattg

SEQ ID NO: 1933 - DNA, 802 bp, Homo sapiens
  misc_feature (739)..(739): "n" may be a, t, c, g, other or unknown
  misc_feature (747)..(747): "n" may be a, t, c, g, other or unknown
  misc_feature (793)..(793): "n" may be a, t, c, g, other or unknown
gaaaaaagtcgtggggactgagttcaggacaccctgaaactatgcgaccagtaatttttttaaggtactttttcctacaagtaaggtatctgaaaagtcaacgttttgagggtggaatcaagacttttcacttctcctggcaaagagcaacaaggctcttgtctcgtgtccttctgtgtgtctctgtcaggatcacagcagctgtgctcttggtctgcttactcctctgtaatccacgtatgcagaagggagttaataaggtgatcaccatctccccagaattcaaaggtctttgcctctataaggtctgcccctatggggccaggaaaatgtaaacctatataaggacttgcaagagagcataaagaaggtagaaaaggtttacttgttgggttttcaagccttcaagttgaatgagtcttagcttttgctgggcagttgttctggacaagtcatcagtttcatgtggagaactcagtgtaagcccaaggctaatgaatgagaggggtcccatggaaacacagctgaaatgaaatgggactttatccatcttctttgagaatggaagagcttttgtgaagcagtacatcattgctcaagataatggttgataagcattagattttatagatctaataaggaaaatattttattatctcaagttaacaaaacatttttttacctctcgagtgcctcataggaccaactattactctttggcttttatttttctttttgnattatttntatatattctttaaccttgctgactagtattgactgaaatctttanactttgcct

SEQ ID NO: 1934 - DNA, 789 bp, Homo sapiens
  misc_feature (691)..(691): "n" may be a, t, c, g, other or unknown
  misc_feature (752)..(752): "n" may be a, t, c, g, other or unknown
  misc_feature (784)..(784): "n" may be a, t, c, g, other or unknown
gtgacggagcggcggccccgcccggtgcgctggaggtcgaagcttccaggtagcggcccgcagagcctgacccaggctctggacatcctgagcccaagtcccccacactcagtgcagtgatgagtgcggaagtgaaggtgacagggcagaaccaggagcaatttctgctcctagccaagtcggccaagggggcagcgctggccacactcatccatcaggtgctggaggcccctggtgtctacgtgtttggagaactgctggacatgcccaatgttagagagctggctgagagtgactttgcctctaccttccggctgctcacagtgtttgcttatgggacatacgctgactacttagctgaagcccggaatcttcctccactaacagaggctcagaagaataagcttcgacacctctcagttgtcaccctggctgctaaagtaaagtgtatcccatatgcagtgttgctggaggctcttgccctgcgtaatgtgcggcagctggaagaccttgtgattgaggctgtgtatgctgacgtgcttcgtggctccctggaccagcgcaaccagcggctcgaggttgactacagcatcgggcgggacatccagcgccaggacctcagtgccattgccgaaccctgcaggaatggtgtgtggcttgtgaagtcgtgctgtcaggcattgaggaacangtgagccgtgccaaccaacacaaggagcacaactggcctgaagcagcagattgagagtgangttgccaaccttaaaaaaacccttaaggttcnacgga

SEQ ID NO: 1935 - DNA, 828 bp, Homo sapiens
  misc_feature (768)..(768): "n" may be a, t, c, g, other or unknown
  misc_feature (784)..(784): "n" may be a, t, c, g, other or unknown
  misc_feature (800)..(800): "n" may be a, t, c, g, other or unknown
aggatgcaagagtcagagtgagggatctgtccctggatggggacaataaggggtcagttcagggggacttccttgagctctgaagtttcacctgagaatgggagattcagaacttggtgacagagtttgtggagctcactgtgtctttgctgatccttcagcaaaggaagtgagattgtttctagcttttctgtttggggtgcttctctgtcaactaaaagtcttcatcctttaaatattgcatcatttgtgtatacttcattcattcacttactcatgacccactcctcgagtgcctgcaatgggcaagcgtctgtcctaggagccgtgtgctgggccacagttaaatctgagagatcatgtgtggcatttctcatggattgagatgtctgagtgtcattgttttgagagagctagtggcatggtttataaagctgtttttcattttctccatacaggacaacagctttgagcagttcattattaattattgtaacgaaaagctgcaacaaatcttcattgaacttactcttaaagaagagcaggaggagtatatacgggaggatatagaatggactcacattgactacttcaataatgctatcatttgtgacctaatagaaaataacacaaatggaatcctgccatgctggatgaagagtgcctcagacctggcacagtcactgatgagaccttcttagaaaagctgaaccaagtatgtgccacccaccagcattttgaaagcaggatgaaccaagtgctctcggntcctcaatgacacgtnttttgcttacagctgntttaggatccaccattatcctggaaaag

SEQ ID NO: 1936 - DNA, 820 bp, Homo sapiens
  misc_feature (751)..(751): "n" may be a, t, c, g, other or unknown
  misc_feature (757)..(757): "n" may be a, t, c, g, other or unknown
  misc_feature (818)..(818): "n" may be a, t, c, g, other or unknown
gtctgtgagggcagactgatccgagcacccaaaccctcggcggacagcggagccagtggtagccgcacggccctaaaaccatggaggagggcggcagcactggcagtgctggcagtgacagcagcaccagcgggagtggcggggcgcagcaaagggagctggagcgcatggctgaggtcttggtcaccggggaacagctacggctcaggctgcacgaagaaaaggttattaaagatagacgtcatcatctcaagacctacccaaactgttttgtcgcaaaagaactgattgactggctgattgaacacaaagaggcttctgacagagagacggcaattaaactcatgcagaaattagcagaccggggcattattcaccatgtgtgtgatgagcataaggaattcaaggatgtcaaactcttctaccgctttagaaaggatgacggcaccttcccattggataatgaagtgaaggcctttatgagaggacagaggctatatgaaaagctgatgagccctgaaaacacactcctgcagcccagggaggaggaaggggtcaagtatgagcgcaccttcgtggcatctgaattcctggactggctggttcaggaaggtgaggccaccacgaggaaagaggcagagcagctttgccaccggcttatggagcatggcatcatccagcatgtgtccagcaagcacccatttgtggacagcaatcttctctaccagttcagaatgaactttcggcggangcgaanactgatggagctgctcaatgaaaaagtccccttcttccaggaaactcatgacagtcccttntg

SEQ ID NO: 1937 - DNA, 844 bp, Homo sapiens
  misc_feature (638)..(638): "n" may be a, t, c, g, other or unknown
  misc_feature (689)..(689): "n" may be a, t, c, g, other or unknown
  misc_feature (779)..(779): "n" may be a, t, c, g, other or unknown
  misc_feature (792)..(792): "n" may be a, t, c, g, other or unknown
  misc_feature (816)..(816): "n" may be a, t, c, g, other or unknown
ttggagggccgagaggagtgatgcgggcacttataaagaggagagaaaggaggagaggctcaccctcacgaggcttctgagaagggggtgaactgcagaagtgcagagggcaggagagacctcagcatctacccagtatgaggagtgtatcagagctgggaaggtgattccagagcaggggaaaatgcaagctccactaatacaaatgaggtgaggcaaccagtgcacagcgaggggttccacaagacccaacaacctcacaaatccaacagacgaccaacaatagctggggacatgctcaagacccacagagcaagtgcatgaagccagggcaaggggcagcagtgaggacaaatctctccatgagtactgtgggtcttagcctcaactcactaaaaggcctctagagacaataattaaaataaccagtggctcctcgaggaatggaggctaaggagcaaactgccaaacttattctggctggaattggtggctgttttctatggaacacacaagactcaagaatggccaatgaccactctcactggggggttgcagttggcaactggagggatgctcatatttaactgacttagaattggcttgtgtttagcttggcatgatggtattcccattgnttagtatttcaatttcaacatcaaaataaaggctggataagggtgaatgangaggtagctgctacccaagacaagtcttcatttgaaagggtggctaattacattttccttaatttacaaattggatttgacccactgggnatttctttaaagntcgcacagagtttggggtattcantttcagaagagaaacgttatggatcttg

SEQ ID NO: 1938 - DNA, 795 bp, Homo sapiens
  misc_feature (731)..(731): "n" may be a, t, c, g, other or unknown
  misc_feature (753)..(753): "n" may be a, t, c, g, other or unknown
  misc_feature (793)..(793): "n" may be a, t, c, g, other or unknown
gtgcggatgcggggaggctgcgtgtgtgcgcagggagagaacgccggccaccttcccgcttccgagctgggtgcgcgccgagcacaggagattgcctgcgtttaggaggtggctgcgttgtgggaaaagctatcaaggaagaaattgccaaaccatgtctttttttctgttttcagagtagttcacaacagatctgagtgttttaattaagcatggaatacagaaaacaacaaaaaacttaagctttaatttcatctggaattccacagttttcttagctccctggacccggttgacctgttggctcttcccgctggctgctctatcacgtggtgctctccgactactcaccccgagtgtaaagaaccttcggctcgcgtgcttctgagctgctgtggatggcctcggctctctggactgtccttccgagtaggatgtcactgagatccctcaaatggagcctcctgctgctgtcactcctgagtttctttgtgatgtggtacctcagccttccccactacaatgtgatagaacgcgtgaactggatgtacttctatgagtatgagccgatttacagacaagactttcacttcacacttcgagagcattcaaactgctctcatcaaaatccatttctggtcattctggtgaccttccacccttcagatgtgaaagccaggcaggccattagagttacttggggtgaaaaaaagtcttggtggggatatganggtcttacatttttcttattangccaagaagctgaaaaaggaagacaaaatggtggcattgncc

SEQ ID NO: 1939 - DNA, 856 bp, Homo sapiens
  misc_feature (712)..(712): "n" may be a, t, c, g, other or unknown
  misc_feature (720)..(720): "n" may be a, t, c, g, other or unknown
  misc_feature (847)..(847): "n" may be a, t, c, g, other or unknown
aggacaagagaaaccaagcccagctacagtcagaagcacagatcctgtcacgacaaaggagactaaagcagtctcagaaatgtctactgaaataggaacaatgatctcggtatcatctgcagaatatggtactaatgcaaaggagtctgtaacagactatactacaccctcttcttctttgcctaacaccgtggctactaataatacaaagatggaggatactttggttaataatgtgcccctgcccaacacccttcccctccctaagagggagactatacaacagagctccagcctaacttcagttcctcccactactttcagcctcaccttcaagatggagtctgcacgcaaagcatgggagaattctccaaatgtaagggaaaaggggtctccagtaacttccacagcacctccaattgcaactggagtcagcagtagtgccagtggaccaagcactgctaattacaattcgttctcaagtgcatccatgccccagattcctgttgcttcagtcactcctacagcatcactatcaggagctggtacatacactacctcttctttgagcacaaaatctacaaccacatcggaccctccaaatatttgtaaagtgaaacctcagcagttacagacaagcagcctgccttctgcaagtcatttttcacagttaagctgtatgccttccttattgcccagcagcaacagaatnccgcaggnttatgtgtctcagtctgcagcaagctcaaatcccagccttctatatgggccccaagtcatttattcaatacccaacatgccccgaatggcttccgccatccttgggtcaacaacaggggtttccaancaggtcttt

SEQ ID NO: 1940 - DNA, 838 bp, Homo sapiens
  misc_feature (694)..(694): "n" may be a, t, c, g, other or unknown
  misc_feature (757)..(757): "n" may be a, t, c, g, other or unknown
  misc_feature (762)..(762): "n" may be a, t, c, g, other or unknown
  misc_feature (837)..(837): "n" may be a, t, c, g, other or unknown
agatctgaatccagaggctctcggaggaagagctcaggccactgaggcggctcccagctgcgttggcgacatggccgacacccccagagatgccgggctcaagcaggcgcctgcatcacggaacgagaaggccccggtggacttcggctacgtggggattgactccatcctggagcagatgcgccggaaggccatgaagcagggcttcgagttcaacatcatggtggtcgggcagagcggcttgggtaaatccaccttaatcaacaccctcttcaaatccaaaatcagccggaagtcggtgcagcccacctcagaggagcgcatccccaagaccatcgagatcaagtccatcacgcacgatattgaggagaaaggcgtccggatgaagctgacagtgattgacacaccagggttcggggaccacatcaacaacgagaactgctggcagcccatcatgaagttcatcaatgaccagtacgagaaatacctgcaggaggaggtcaacatcaaccgcaagaagcgcatcccggacacccgcgtccactgctgcctctacttcatccccgccaccggccactccctcaggcccctggagcagaaagtgcctttatctcagccatccgcagactgctcggccagatgcggggacaggctggaatgagggaggcgtcttcatctcctggcatcccctctnacgccacccccggccccaccgggcttgaagtgctgctgatgccctgggatctgattgaggatnaaaanggaaggagagatgacccctacccttattccccagttttgaaaaggtctaaccaagtgaatctggtggaagaactna

SEQ ID NO: 1941 - DNA, 658 bp, Homo sapiens
  misc_feature (179)..(179): "n" may be a, t, c, g, other or unknown
  misc_feature (345)..(345): "n" may be a, t, c, g, other or unknown
  misc_feature (482)..(482): "n" may be a, t, c, g, other or unknown
  misc_feature (515)..(515): "n" may be a, t, c, g, other or unknown
  misc_feature (569)..(569): "n" may be a, t, c, g, other or unknown
  misc_feature (609)..(609): "n" may be a, t, c, g, other or unknown
  misc_feature (625)..(625): "n" may be a, t, c, g, other or unknown
  misc_feature (634)..(634): "n" may be a, t, c, g, other or unknown
  misc_feature (645)..(645): "n" may be a, t, c, g, other or unknown
agtcgcgcagagtggagtcaaaggcaaccagtgctcgctgcggtctctggggatcgggaccgcggcggcggcccgcgagcgggatgttccggggcttgagcagttggttgggcttgcagcagccggtggcaggcggtgggcagcccaatggagatgctccacccgagcagccgtccganacggtggctgagtctgcggaggaggagctgcagcaagcgggagaccaggagctcctccaccaggccaaagacttcggcaactatttatttaactttgcatctgctgccacaaaaaagataactgaatcagttgctgaaacagcacaaacaataaagaaatccgtanaagaaggaaaaatagatggcatcactgacaagacaattataggagattttcagaaggaacagaaaaaatttgttgaagagcaacatacaaagaatcagaagcagctgtgcccccatgggttgacactaacgatgaanaaacaattcaacaacaaattttggccttatcanctgacaagaagaatttccttcgtgaccctccggctggcgtgcaatttaatttcnactttgatcagatgtccccgtggccctggtcatgctccangaagataactgctaanccagatganatttgccctcnttcctaaacttgt

SEQ ID NO: 1942 - DNA, 398 bp, Homo sapiens
  misc_feature (343)..(343): "n" may be a, t, c, g, other or unknown
  misc_feature (351)..(351): "n" may be a, t, c, g, other or unknown
  misc_feature (363)..(363): "n" may be a, t, c, g, other or unknown
  misc_feature (369)..(369): "n" may be a, t, c, g, other or unknown
  misc_feature (388)..(388): "n" may be a, t, c, g, other or unknown
aggcccggcgctcctcaagatggctgccgacagtgagcccgaatccgaggtatttgagatcacggacttcaccactgcctcggaatgggaaaggtttatttccaaagttgaagaagtcttgaatgactggaaactgattggaaactctttgggaaagccactcgaaaagggtatatttacttctggcacatgggaagagaaatcagatgaaatttcctttgctgacttcagttctcagtcactcatcattatcttgtacagagtccactgataagaaggaaggatgattatagaggatgtgtcccacaacctatgccaagaattggctggggtttgaattaanaacttccncccaaaaccacntggccngttaaaatggtttgggctncttaattcct

SEQ ID NO: 1943 - DNA, 641 bp, Homo sapiens
  misc_feature (334)..(334): "n" may be a, t, c, g, other or unknown
  misc_feature (566)..(566): "n" may be a, t, c, g, other or unknown
  misc_feature (584)..(584): "n" may be a, t, c, g, other or unknown
  misc_feature (593)..(593): "n" may be a, t, c, g, other or unknown
  misc_feature (616)..(616): "n" may be a, t, c, g, other or unknown
  misc_feature (624)..(624): "n" may be a, t, c, g, other or unknown
gttatggcggccgcctaagtcccacagagacgggagtcgggtgggatcccaggctgggccccgcggcggctggattctcttccctggccaagtctctgagatcttctcccagggcgatgcaaagctactcgctaccagcttggacctgtctgcagtatctcctctgggacctgccatgctgaggacccattctcacctctgagggactcctgtcctaggactaaggtggagcctgggccatggtacagctggctcctgcggcagccatggacgaggtcacctttaggagcgacactgtgctgtcagatgtccacctctataccccgaaccatanacatctcatggtacggctgaacagcgtggggcagccagttttcctgtcccaattcaagcttctatggagccaagactcttggacagattcaggagccaagggtggcagtcacagagatgttcacacaaaggagcctccttctgctgagacaggcagcacagggtcccctccaggaagtggccatggtaatgagggtttctccctccaggccgggactgacaccactggccangaagtggctgaagctcanctggatgangatggggatttggacgtggtganaaaacacnaaccgcctctgattcca

SEQ ID NO: 1944 - DNA, 845 bp, Homo sapiens
  misc_feature (293)..(293): "n" may be a, t, c, g, other or unknown
  misc_feature (497)..(497): "n" may be a, t, c, g, other or unknown
  misc_feature (646)..(646): "n" may be a, t, c, g, other or unknown
  misc_feature (651)..(651): "n" may be a, t, c, g, other or unknown
  misc_feature (693)..(693): "n" may be a, t, c, g, other or unknown
  misc_feature (751)..(751): "n" may be a, t, c, g, other or unknown
  misc_feature (759)..(759): "n" may be a, t, c, g, other or unknown
  misc_feature (793)..(793): "n" may be a, t, c, g, other or unknown
  misc_feature (828)..(828): "n" may be a, t, c, g, other or unknown
  misc_feature (840)..(840): "n" may be a, t, c, g, other or unknown
actttccgggatggcagcaaggtgacttcggctgaggatgaccctgactgaaaggctgcgtgagaagatatctcgggccttctacaaccatgggctcctctgtgcatcctatcccatccccatcatcctcttcacagggttctgcatcttagcctgctgctacccactgctgaaactccccttgccaggaacaggacctgtggaattcaccacccctgtgaaggattactcgcccccacctgtggactctgaccgcaaacaaggagagcctactgagcagcctgagtggcganattttcccctaccttgtggtggttattgggttagagaatgtgttggtgctcaccaagtctgtggtctcaaccccggtagacctggaggtgaagctgcggatcgcccaaggcctaagcagcgagagctggtccatcatgaaaaacatggccacggagctgggcatcatcctcatcggctacttcaccctagtgcccgccatccangagttctgtctctttgctgtcgtggggctggtgtctgacttcttccttcagatgctgtttttcaccactgtcctgtccattgacattcgccgggatggagctagcagacctgaacaagcgactgccccctgaagcctgcctgccctcanccaanccagtggggcagccaacgcgctacgaacggcaactggctgtnaagccgtccacaccccacaccatcacgttgcagccgtcttccttccgaaaactgcggntccccaanaagctgcttttgtctacttcctggcccggcaccncctggcacagcgcctcatcttggtggacgttgttngattggctctgnataac

SEQ ID NO: 1945 - DNA, 821 bp, Homo sapiens
  misc_feature (351)..(351): "n" may be a, t, c, g, other or unknown
  misc_feature (356)..(356): "n" may be a, t, c, g, other or unknown
  misc_feature (509)..(509): "n" may be a, t, c, g, other or unknown
  misc_feature (580)..(580): "n" may be a, t, c, g, other or unknown
  misc_feature (649)..(649): "n" may be a, t, c, g, other or unknown
  misc_feature (666)..(666): "n" may be a, t, c, g, other or unknown
  misc_feature (669)..(669): "n" may be a, t, c, g, other or unknown
  misc_feature (723)..(723): "n" may be a, t, c, g, other or unknown
  misc_feature (762)..(762): "n" may be a, t, c, g, other or unknown
  misc_feature (768)..(768): "n" may be a, t, c, g, other or unknown
  misc_feature (785)..(785): "n" may be a, t, c, g, other or unknown
  misc_feature (817)..(817): "n" may be a, t, c, g, other or unknown
gacaagaagaggaagtgaaggctacagggtatccacgtgggttctgagcgtgtttctacgtccctggaagccggtcatttaagctcattcctcgccacggcttagtcaacatgggtcgctcgggaaagttgccctctggtgtctcagctaagttgaagcgctggaagaaaggccacagcagcgacagcaaccccgccatctgccgccaccgtcaggccgcccgcagccgcttcttcagccggccgtcaggaaggagtgacctgacagtcgatgctgtgaagttacataatgagctgcagtcagggtccttgcgcttgggcaaaagcgaagccccggagacgcccatggaanaagangcggagctggttctcaccgaaaagtcctcgggcaccttcctgagtggcctttccgactgcacaaacgtcaccttcagcaaagtacagcgcttctgggagtccaactcggctgcccacaaggagatctgtgctgttctggctgctgtcactgangtgattcgctcccagggaagggaaggagacggagactgagtactttgctgctctgatgacaacaatggaancagtggagtcccggagtccctggccgccgttgcttacctgctgaaccttgtcctgaaacgtgttcccanccctgtgctttattaanaanttctctgaatgcctccaaaagccttcatggatatcatgttcagctcaaggccancaacgggttccacctctgtcctccgaatggggttccttnctgccntggccacccttcctgcngaaaccaaaaacttggaaaggcctgggggctncccc

SEQ ID NO: 1946 - DNA, 570 bp, Homo sapiens
  misc_feature (363)..(363): "n" may be a, t, c, g, other or unknown
  misc_feature (483)..(483): "n" may be a, t, c, g, other or unknown
  misc_feature (492)..(492): "n" may be a, t, c, g, other or unknown
  misc_feature (541)..(541): "n" may be a, t, c, g, other or unknown
  misc_feature (556)..(556): "n" may be a, t, c, g, other or unknown
  misc_feature (568)..(568): "n" may be a, t, c, g, other or unknown
aagtaactcgggaagacgaccaagcgggagcgggagcgggagcgggagccggagcgagagcgcgcgggcgcggccgacagtgcctgatttgagatggggtcccaggtctcggtggaatcgggagctctgcacgtggtgattgtgggtgggggctttggcgggatcgcagcagccagccagctgcaggccctgaacgtccccttcatgctggtggacatgaaggactccttccaccacaatgtggctgctctccgagcctccgtggagacagggttcgccaaaaagacattcatttcttactcggtgactttcaaggacaacttccggcaggggctagtagtggggatagacctgaagaaccanatggtgctgctgcagggtggcgaggccctgcccttctctcatcttatcctggccacgggcagcactgggcccttcccgggcaagtttaatgaggtttccagccagcaggccgctatccangcctatgangacatggtgaggcaggtccagcgctcacggttcatcgtggtggtgggangaagctcggctggantggaaatggcanca

SEQ ID NO: 1947 - DNA, 535 bp, Homo sapiens
  misc_feature (372)..(372): "n" may be a, t, c, g, other or unknown
  misc_feature (381)..(381): "n" may be a, t, c, g, other or unknown
  misc_feature (391)..(391): "n" may be a, t, c, g, other or unknown
  misc_feature (464)..(464): "n" may be a, t, c, g, other or unknown
  misc_feature (497)..(497): "n" may be a, t, c, g, other or unknown
  misc_feature (503)..(503): "n" may be a, t, c, g, other or unknown
  misc_feature (507)..(507): "n" may be a, t, c, g, other or unknown
  misc_feature (521)..(521): "n" may be a, t, c, g, other or unknown
attataattacgatgatgaagatgaagatgaaaatgcaatggatgctgatggtggtgatgatgatgatcaagggagtgatgatgaatacagtgatgatgatgacatgagttggaaagtgagacgtgcagctgcgaagtgcttggatgccgtagttagcacaaggcatgaaatgcttccagaattctacaagaccgtctctcctgcactaatatccagatttaaagagcgtgaagagaatgttaaggcagatgtttttcacgcatacctttctcttttgaagcaaactcgtcctgtacaaagttggctatgtgaccctgatgcaatggagcagggagaaacacctttaacaatgcttcagagtcaggttcccnacattgttnaagctcttcncaaacagatgaaagaaaaaagtgtgaagacccgacagtgttgttttaacatattaactgagctggtaaatgtnttacctgggggcctaactcaacacattcctgtncttgtnccangaatcattttctcnctgaatgataaatc

SEQ ID NO: 1948 - DNA, 562 bp, Homo sapiens
  misc_feature (232)..(232): "n" may be a, t, c, g, other or unknown
  misc_feature (421)..(421): "n" may be a, t, c, g, other or unknown
  misc_feature (428)..(428): "n" may be a, t, c, g, other or unknown
  misc_feature (442)..(442): "n" may be a, t, c, g, other or unknown
  misc_feature (473)..(473): "n" may be a, t, c, g, other or unknown
  misc_feature (487)..(487): "n" may be a, t, c, g, other or unknown
  misc_feature (544)..(544): "n" may be a, t, c, g, other or unknown
  misc_feature (556)..(556): "n" may be a, t, c, g, other or unknown
  misc_feature (560)..(560): "n" may be a, t, c, g, other or unknown
aaaagggaagcctgcaacaagttaagctgaagaccgaagcaagagctggttcagcctgccagtggagacactgggcccggcatccaggatggacccagaatctgagagagccctgcaggcccctcacagcccctccaagacagatgggaaagaattagctgggaccatggatggagaagggacgctcttccagactgaaagccctcagtctggcagcattctaacagagganactgaggtcaagggcaccctggaaggtgatgtttgtggtgtggagcctcctggcccaggagacacagtagtccaggggagacctgcaggagaccaccgtggtgacaggcctgggaccagacacacaggacctggaaggccagagccctccacagagcctgccttcaacccccaaagcagcttggttcanggagganggccgctgctccancagtgacgatgacaccgacgtggacatgganggtctgcggaaacngcggggccgggaagccggcccacctcacccatggtgcccctggctgtggaaaaccangctgggggttanggtnca

SEQ ID NO: 1949 - DNA, 584 bp, Homo sapiens
  misc_feature (491)..(491): "n" may be a, t, c, g, other or unknown
  misc_feature (506)..(506): "n" may be a, t, c, g, other or unknown
  misc_feature (508)..(508): "n" may be a, t, c, g, other or unknown
  misc_feature (515)..(515): "n" may be a, t, c, g, other or unknown
  misc_feature (559)..(559): "n" may be a, t, c, g, other or unknown
agacgattggtcgggccacgccagcccaggcccaagccagcccggagagaaaagacctgaggaggtggccctggggctgcaccaccgcctcccagcactgggaagagccctggggcacagcattcagcaacgagcgacctccacagccaagacttggtgggacagatatgaagagtttgttggactcaacgaggttcgagaggcccaggggaaaggtgacagaggctgagaaagtgttcatggtggctcgagggcttgtccgagaggctcgggaggacttggaagttcaccaggccaagctgaaggaggtgagggaccgcttggaccgtgtctccagggaggacagtcagtacttggaactggctactctcgagcacaggatgctgcaggaggagaagaagcttcgcacagcctatctgcgtgcagaagactctgagcgagagaagttctccctcttctctgcagctgtgcgggaaagtcatgaaaaggancgcacaagggctganangaccaanaactggtccctcattggctcatcctgggggccctgattggtgtngctggctcccctatgttaaccgtgt

SEQ ID NO: 1950 - DNA, 567 bp, Homo sapiens
  misc_feature (258)..(258): "n" may be a, t, c, g, other or unknown
  misc_feature (333)..(333): "n" may be a, t, c, g, other or unknown
  misc_feature (379)..(379): "n" may be a, t, c, g, other or unknown
  misc_feature (426)..(426): "n" may be a, t, c, g, other or unknown
  misc_feature (438)..(438): "n" may be a, t, c, g, other or unknown
  misc_feature (441)..(441): "n" may be a, t, c, g, other or unknown
  misc_feature (445)..(445): "n" may be a, t, c, g, other or unknown
  misc_feature (508)..(508): "n" may be a, t, c, g, other or unknown
  misc_feature (533)..(533): "n" may be a, t, c, g, other or unknown
  misc_feature (561)..(561): "n" may be a, t, c, g, other or unknown
  misc_feature (563)..(563): "n" may be a, t, c, g, other or unknown
  misc_feature (567)..(567): "n" may be a, t, c, g, other or unknown
tcgttggttccggaggtcgctgcggcggtgggaaatgctggcgcgcgcggcgcggggcactggggcccttttgctgaggggctctctactggcttctggccgcgctccgcgccgcgcctcctctggattgccccgaaacaccgtggtactgttcgtgccgcagcaggaggcctgggtggtggagcgaatgggccgattccaccggatcctggagcctggtttgaacatcctcatccctgtgttagaccggatccgatntgtgcagagtctcaaggaaattgtcatcaacgtgcctgagcagtcggctgtgactctcgacaatgtaactctgcnaatcgatggagtcctttacctgcgcatcatggacccttacaacgcnagctacggtgtggaggaccctgagtatgccgtcacccagctagctcnaacaaccatganatnaganctcggcaaactctctctggacaaagtcttccgggaacgggagtccctgaatgccagcattgtngatgccatccaaccaagctgctgantgctggggtatccgctgcctccgttatnanatcn

SEQ ID NO: 1951 - DNA, 568 bp, Homo sapiens
  misc_feature (248)..(248): "n" may be a, t, c, g, other or unknown
  misc_feature (471)..(471): "n" may be a, t, c, g, other or unknown
  misc_feature (494)..(494): "n" may be a, t, c, g, other or unknown
  misc_feature (497)..(497): "n" may be a, t, c, g, other or unknown
  misc_feature (528)..(528): "n" may be a, t, c, g, other or unknown
  misc_feature (543)..(543): "n" may be a, t, c, g, other or unknown
gaaatccaagatggcggcgctaggctgaccctcctgctggtgacggaagtaccgcctcctcccgtctgacgcccctcaggggaccctgcatcgctccagccgccgcggccatgtctgggccaggcaacaaacgcgccgccggcgacgggggctcagggcccccggaaaagaagctgagtcgtgaggagaagaccaccacgactcttatcgagcccattcgtcttggaggcatctcttccacggagganatggacctgaaggtactacagttcaaggacaagaaactggcagagcggctggaacaacggcaggcttgtgaagatgaactccgagaacgaattgagaagttggagaagcggcaggccacagatgatgccacactcctcatcgtcaatcgctactgggcccagctggatgaaactgtggaagcccctctccgatgccatgagagccagggggagctgtcttcancgcctgaggcacctgggacccangangggccaacatgtgatgggactcctctcccanaaccggggacatcanaactgaaaaaccccttgctgatgca

SEQ ID NO: 1952 - DNA, 573 bp, Homo sapiens
  misc_feature (236)..(236): "n" may be a, t, c, g, other or unknown
  misc_feature (284)..(284): "n" may be a, t, c, g, other or unknown
  misc_feature (310)..(310): "n" may be a, t, c, g, other or unknown
  misc_feature (323)..(323): "n" may be a, t, c, g, other or unknown
  misc_feature (340)..(340): "n" may be a, t, c, g, other or unknown
  misc_feature (458)..(458): "n" may be a, t, c, g, other or unknown
  misc_feature (490)..(490): "n" may be a, t, c, g, other or unknown
  misc_feature (518)..(518): "n" may be a, t, c, g, other or unknown
  misc_feature (532)..(532): "n" may be a, t, c, g, other or unknown
  misc_feature (562)..(562): "n" may be a, t, c, g, other or unknown
  misc_feature (568)..(568): "n" may be a, t, c, g, other or unknown
actttcccctctccgtctcctgcgggcgcaatggaggaggaggatgaggaagcgcgggcgctcctggcaggcggccctgacgaggccgacagaggtgccccggccgcccctggagccctgccggccctctgcgaccccagtcgcctggcgcaccggcttttggtgctgttactgatgtgcttccttggctttggcagctatttttgctatgataatcctgctgcccttcagactcnagttaaacgagatatgcaagtgaataccacgaaattcatgctgctgtntgcctggtattcttggcccaatgtanttttgtgtttctntggtggctttttgatanaccgagtatttggaatacgatggggcacaatcatttttagctgctttgtttgcattggacaggttgtttttgccctgggtggaatatttaatgctttttggctgatggaatttggaanatttgtatttgggattggtggcgaatccttancagttgcccacaatacatttgctgtganctggtttaaaggcnaagaattaaacctgggtgtttggacttcanctttancatgg

SEQ ID NO: 1953 - DNA, 690 bp, Homo sapiens
  misc_feature (562)..(562): "n" may be a, t, c, g, other or unknown
  misc_feature (590)..(590): "n" may be a, t, c, g, other or unknown
  misc_feature (611)..(611): "n" may be a, t, c, g, other or unknown
  misc_feature (634)..(634): "n" may be a, t, c, g, other or unknown
  misc_feature (682)..(682): "n" may be a, t, c, g, other or unknown
  misc_feature (689)..(690): "n" may be a, t, c, g, other or unknown
tttacgatatccaaataaactggacaccatcacatggacgtggcaaggacctggagcgctggaaatcctgtggctcacgctgtgtcagtttcacaaccaagtggaaatcgagttccttcctgtgtacagcccttctgaggaggagaagaggaaccccgcgctgtatgccagcaacgtgcggcgagtcatggccgaggccttgggtgtctccgtgactgactacacgttcgaggactgccagctggccctggcggaaggacagctccgtctccccgctgacacttgccttttagaatttgccaggctcgtgcggggcctcgggctaaaaccagaaaagcttgaaaaagatctggacagatactcagaaagagccaggatgaagggaggagagaagataggtattgcggagtttgccgcctccctggaagtccccgtttctgacttgctggaagacatgttttcactgttcgacgagagcggcagcggcgaggtggacctgcgagagtgtgtggttgccctgtctgtcgtctgccggccggcccggaccctggacaccatccanctggctttcaagacgtacggagcgcaanaagacggcagcgtccgcgaangtgaactgtcctgcatcctccanacggcctgggggtggcagaactcaccgtgaccgacctattccgaaccnttgaccnn

SEQ ID NO: 1954 - DNA, 772 bp, Homo sapiens
  misc_feature (689)..(689): "n" may be a, t, c, g, other or unknown
  misc_feature (715)..(715): "n" may be a, t, c, g, other or unknown
  misc_feature (731)..(731): "n" may be a, t, c, g, other or unknown
  misc_feature (747)..(747): "n" may be a, t, c, g, other or unknown
  misc_feature (760)..(760): "n" may be a, t, c, g, other or unknown
aaaagacaatcaagacggccggccgaggcccctggaacggcttaggcggctgcggctgctacggcggcgcatgctaggggattctgccgggtagaaaagctgggcctggaacccagccctgaggacatcctgcggcccaggggcaagtgacacctgctgagagaggcccaggatggtggaggctgaggaactggcacagctgcggctgctcaatctggagctcctgaggcagctgtgggtggggcaggatgctgtgcggcggtcagtggccagggcagcctcggagtcaagcctggaatccagcagcagctacaactcagagactccatcgaccccagagacgtcctcaacttccttgagcacctcctgcccacggggccggtcctccgtgtggggcccaccagatgcctgtcgaggggacctccgtgatgtggccagatcgggggtggcctctctcccacctgccaattgccagcaccaggaatccctgggccgaccgagaccccactcagcaccctcgctgggcacctcaagcctgaaggacccagagccctcagggaagctgggtgatccaggacccaggaggcacagaccccgaggtcatcctggctcaacagagcaactgtccaagcccagggtgacttctctgaagaatctgcattccctgaaaagaacttgcgcctccaggncataccttgggtatgaatggattgcntttttcttgaaaccanctctttccatcaccancccaccctaaggncttcttctccaa

SEQ ID NO: 1955 - DNA, 623 bp, Homo sapiens
  misc_feature (73)..(73): "n" may be a, t, c, g, other or unknown
  misc_feature (187)..(187): "n" may be a, t, c, g, other or unknown
  misc_feature (230)..(230): "n" may be a, t, c, g, other or unknown
  misc_feature (232)..(232): "n" may be a, t, c, g, other or unknown
  misc_feature (343)..(343): "n" may be a, t, c, g, other or unknown
  misc_feature (346)..(346): "n" may be a, t, c, g, other or unknown
  misc_feature (358)..(358): "n" may be a, t, c, g, other or unknown
  misc_feature (528)..(528): "n" may be a, t, c, g, other or unknown
  misc_feature (539)..(539): "n" may be a, t, c, g, other or unknown
  misc_feature (558)..(558): "n" may be a, t, c, g, other or unknown
  misc_feature (613)..(613): "n" may be a, t, c, g, other or unknown
  misc_feature (622)..(622): "n" may be a, t, c, g, other or unknown
tccgccggctcacgtgaccgtctttgggccggcgcgaaccatggccggcatggtggacttccaggatgaggancaggtcaagtcctttttggagaacatggaggtggagtgcaactaccactgctaccacgaaaaggacccggacggttgctatcggctggtggactatttggaagggatccggaanaattttgatgaggctgccaaggtgttgaagtttaactgtgaananaaccagcacagtgatagctgctacaaactgggggcccactatgtgactggaaaaggtggtctgacccaggacctgaaagctgccgccaggtgctttttgatggcgtgtganaancctggaaagaantcaatagcagcatgtcacaacgttggcctcctggcacatgatggacaggttaatgaggatggccagcctgacttgggaaaggccaggggactactacacaagggcctgtgatggtggctatacttccagttgcttcaacctcagtgccatgttcctgcagggtgccccangctttcccaangacatggacctggcatgtnaatactccatgaaagcctgtgacctgggtcatatctgggcctgtgccaatgccantcccatgtnc

SEQ ID NO: 1956 - DNA, 830 bp, Homo sapiens
  misc_feature (126)..(126): "n" may be a, t, c, g, other or unknown
  misc_feature (163)..(163): "n" may be a, t, c, g, other or unknown
  misc_feature (194)..(194): "n" may be a, t, c, g, other or unknown
  misc_feature (209)..(209): "n" may be a, t, c, g, other or unknown
  misc_feature (262)..(262): "n" may be a, t, c, g, other or unknown
  misc_feature (530)..(530): "n" may be a, t, c, g, other or unknown
  misc_feature (541)..(541): "n" may be a, t, c, g, other or unknown
  misc_feature (555)..(555): "n" may be a, t, c, g, other or unknown
  misc_feature (702)..(702): "n" may be a, t, c, g, other or unknown
  misc_feature (764)..(764): "n" may be a, t, c, g, other or unknown
  misc_feature (772)..(772): "n" may be a, t, c, g, other or unknown
  misc_feature (796)..(796): "n" may be a, t, c, g, other or unknown
  misc_feature (803)..(803): "n" may be a, t, c, g, other or unknown
  misc_feature (817)..(817): "n" may be a, t, c, g, other or unknown
gtaacttttaagtggtcggaacacgccccgcgctgctgggtcccgccagacacgccgccgccgcaggaaagtctacagtttggtaccccaggactcgctggtcaggaaagccctgcaggacatgantgttaggcccgacgcctggcccttggcagcttgggangtggctggggctgcttttgcctttgccaganacagctccaactgangacctctccaacgggcccatccacagtccttccttcccctagtgtctgggaanacaggcgcgatgatggactccccgttcctggagctgtggcagtccaaggcagtgtccatcagggagcagctgggactcggggaccggcccaacgactcctattgctacaactcggccaaaaacagcaccgtgctccagggggtcacctttggtggcatccccactgtcctgctcatagacgtcagctgcttcctgttcttaatcttggtgttttctattataagaagaaaattctgggactatggccgcattgccctggtgtcagaancagacagcgantccagatttcaganattgtcatcgacttcctcctcaggtcaacaagactttgaaaatgaactggggatgctgtccctgggctgacttgccatcttccgtctgcatgatgaacaaatcctggaatggtgttgggaagacccatccactacctgtccttccanaaggcacatcatcttccctgtttggtgggtggtcacttttttgtccctgtgttttcacctgnctgttaanctctccaggggaatttcttggganaaaaaanccttttaatttttngggaagaaaacca

SEQ ID NO: 1957 - DNA, 457 bp, Homo sapiens
  misc_feature (78)..(78): "n" may be a, t, c, g, other or unknown
  misc_feature (130)..(130): "n" may be a, t, c, g, other or unknown
  misc_feature (133)..(133): "n" may be a, t, c, g, other or unknown
  misc_feature (244)..(244): "n" may be a, t, c, g, other or unknown
  misc_feature (256)..(256): "n" may be a, t, c, g, other or unknown
  misc_feature (262)..(262): "n" may be a, t, c, g, other or unknown
  misc_feature (318)..(318): "n" may be a, t, c, g, other or unknown
  misc_feature (378)..(378): "n" may be a, t, c, g, other or unknown
  misc_feature (382)..(382): "n" may be a, t, c, g, other or unknown
  misc_feature (394)..(394): "n" may be a, t, c, g, other or unknown
  misc_feature (422)..(422): "n" may be a, t, c, g, other or unknown
  misc_feature (454)..(454): "n" may be a, t, c, g, other or unknown
aaaaggccagcggcgcaaaatggcggcggcgatgaccttctgccggctgctgaaccggtgtggcgaggcggcgcggancctgcccctgggcgccaggtgtttcggggtgcgggtctcgccgaccgggganaangtcacgcacactggccaggtttatgatgataaagactacaggagaattcggtttgtaggtcgtcagaaagaggtgaatgaaaactttgccattgatttgatagcagagcancccgtgagcgangtgganactcgggtgataccgtgcgatggcggcgggggagctcttggccacccaaaagtgtntataaacttggacaaagaaacaaaaaccggcacatgcggttactgtgggctccagttcanacancaccaccactanagcgtgtggcacgccgggggtcccgcancatcctgtgagcatttccgcggggaagctgancac

SEQ ID NO: 1958 - DNA, 734 bp, Homo sapiens
  misc_feature (591)..(591): "n" may be a, t, c, g, other or unknown
  misc_feature (620)..(620): "n" may be a, t, c, g, other or unknown
  misc_feature (655)..(655): "n" may be a, t, c, g, other or unknown
  misc_feature (686)..(686): "n" may be a, t, c, g, other or unknown
  misc_feature (702)..(702): "n" may be a, t, c, g, other or unknown
  misc_feature (720)..(720): "n" may be a, t, c, g, other or unknown
  misc_feature (723)..(723): "n" may be a, t, c, g, other or unknown
gtcggagggcggcgggcgccgacctcagcgcgcacctatgggctcgctaccaggacatgcggagactggtgcacgacctcctgccccccgaggtctgcagtctcctgaacccagcagccatctacgccgacaacgagatcagcctgcgtgacgttgaggtctacggctttgactacgactacaccctggcccagtatgcagacgcactgcaccccgagatcttcagtaccgcccgtgacatcctgatcgagcactacaagtacccagaagggattcggaagtatgactacaaccccagctttgccatccgtggcctccactatgacattcagaagagccttctgatgaagattgacgccttccactacgtgcagctggggacagcctacaggggcctccagcctgtgccagacgaggaggtgattgagctgtatgggggtacccagcacatcccactataccagatgagtggcttctatggcaagggtccctccattaagcagttcatggacatcttctcgctaccggagatggctctgctgtcctgtgtggtggactactttctgggccacagcctggaatttgaccaancacatctctacaaggacgttacggacccntccgaaacttcatgttaaagggcctcatgttccanttggattcaaccaggacatggaaaaaattcntcctgaaaaggggatnaaaactttgcttttcctnaanccccctggtgg

SEQ ID NO: 1959 - DNA, 676 bp, Homo sapiens
  misc_feature (364)..(364): "n" may be a, t, c, g, other or unknown
  misc_feature (605)..(605): "n" may be a, t, c, g, other or unknown
  misc_feature (632)..(632): "n" may be a, t, c, g, other or unknown
  misc_feature (634)..(634): "n" may be a, t, c, g, other or unknown
  misc_feature (667)..(667): "n" may be a, t, c, g, other or unknown
  misc_feature (669)..(669): "n" may be a, t, c, g, other or unknown
tttacgatatccaaataaactggacaccatcacatggacgtggcaaggacctggagcgctggaaatcctgtggctcacgctgtgtcagtttcacaaccaagtggaaatcgagttccttcctgtgtacagcccttctgaggaggagaagaggaaccccgcgctgtatgccagcaacgtgcggcgagtcatggccgaggccttgggtgtctccgtgactgactacacgttcgaggactgccagctggccctggcggaaggacagctccgtctccccgctgacacttgccttttagaatttgccaggctcgtgcggggcctcgggctaaaaccagaaaagcttgaaaaagatctggacagatactcngaaagagccaggatgaagggaggagagaagataggtattgcggagtttgccgcctccctggaagtccccgtttctgacttgctggaagacatgttttcactgttcgacgagagcggcagcggcgaggtggacctgcgagagtgtgtggttgccctgtctgtcgtctgccggccggcccggaccctggacaccatccagctggctttcaagacgtacggaacgcaagaagacggcagcgtcngcgaaagtgacctgtcctgcatcctcnanacggcctgggggtggcagaactcaccgtgaccnanctattcc

SEQ ID NO: 1960 - DNA, 586 bp, Homo sapiens
  misc_feature (109)..(109): "n" may be a, t, c, g, other or unknown
  misc_feature (320)..(320): "n" may be a, t, c, g, other or unknown
  misc_feature (400)..(400): "n" may be a, t, c, g, other or unknown
  misc_feature (461)..(461): "n" may be a, t, c, g, other or unknown
  misc_feature (463)..(463): "n" may be a, t, c, g, other or unknown
  misc_feature (465)..(465): "n" may be a, t, c, g, other or unknown
  misc_feature (499)..(499): "n" may be a, t, c, g, other or unknown
  misc_feature (538)..(538): "n" may be a, t, c, g, other or unknown
  misc_feature (569)..(569): "n" may be a, t, c, g, other or unknown
  misc_feature (582)..(582): "n" may be a, t, c, g, other or unknown
  misc_feature (586)..(586): "n" may be a, t, c, g, other or unknown
cttgtgggtggaaacgcgctggctgactggggtcggcgtttagttcagcgcagcgactcggggacctggagctgacgcctagacacttgtattagctttaatagaaganaaatggaggagccatagaatattaaggatgaattcaggaaggcctgagaccatggaaaacttgcctgctctctacactattttccaaggagaggttgctatggtgacagactatggggcctttatcaaaatcccaggctgtcggaagcaaggtctggtccatcgaactcatatgtcatcctgtcgggtggataagccctctgagatagtanatgttggagataaagtgtgggtgaagcttattggccgagagatgaaaaatgatagaataaaagtatccctctccatgaangttgtcaatcaagggactgggaaagaccttgatcccaacaatgttatcattgagcaagaananangcggaagcgatccttccaggattacactgggcanaaaatcacccttgaagctgtcttgaacactacctgcaanaaatgtggctgtaaaggccactttgcaaaanattgtttcatgcnaccn

SEQ ID NO: 1961 - DNA, 721 bp, Homo sapiens
  misc_feature (160)..(160): "n" may be a, t, c, g, other or unknown
  misc_feature (478)..(478): "n" may be a, t, c, g, other or unknown
  misc_feature (490)..(490): "n" may be a, t, c, g, other or unknown
  misc_feature (493)..(493): "n" may be a, t, c, g, other or unknown
  misc_feature (546)..(546): "n" may be a, t, c, g, other or unknown
  misc_feature (607)..(607): "n" may be a, t, c, g, other or unknown
  misc_feature (625)..(625): "n" may be a, t, c, g, other or unknown
  misc_feature (664)..(664): "n" may be a, t, c, g, other or unknown
  misc_feature (674)..(674): "n" may be a, t, c, g, other or unknown
  misc_feature (691)..(691): "n" may be a, t, c, g, other or unknown
  misc_feature (718)..(718): "n" may be a, t, c, g, other or unknown
tgttaccactacggtgaccagcccagttctgtgtaataacaacatctccgagggcgaagggtatgtggagtctccagatctggggagccccgtcagccgcaccctggggctcctggactgcacttacagcatccatgtctaccctggctacggcattganatccaggtgcagacgctgaacctgtcacaggaagaagggctcctggtgctggctggtgggggatccccaggcctggccccccgactcctggccaactcatccatgcttggagaaggacaagtccttcggagcccaaccaaccggctgcttctgcacttccagagcccacgggtcccaaggggcggtggcttcaggatccactatcaggcctacctcctgagctgtggcttccctccccggccggcccatggggacgtgagtgtgacggacctgcaccctgggggcactgccacctttcactgtgattcgggctaccanctgcagggaganganaccctcatctgcctcaatggcacccggccatcctggaacggtgaaacccccanctgcatggcatcctgtggtggcaccatccacaatgccaccctgggccgcatcgtgtcccanaacctgggggaaccgtanggcccaacctcacctgccgttgggtccttgaaacaactnaagggccccngctgcacctgcactttnaaaaggtctccctggatgaagaacatnaac

SEQ ID NO: 1962 - DNA, 762 bp, Homo sapiens
  misc_feature (125)..(125): "n" may be a, t, c, g, other or unknown
  misc_feature (203)..(203): "n" may be a, t, c, g, other or unknown
  misc_feature (205)..(205): "n" may be a, t, c, g, other or unknown
  misc_feature (268)..(268): "n" may be a, t, c, g, other or unknown
  misc_feature (270)..(270): "n" may be a, t, c, g, other or unknown
  misc_feature (352)..(352): "n" may be a, t, c, g, other or unknown
  misc_feature (485)..(485): "n" may be a, t, c, g, other or unknown
  misc_feature (552)..(552): "n" may be a, t, c, g, other or unknown
  misc_feature (623)..(623): "n" may be a, t, c, g, other or unknown
  misc_feature (646)..(646): "n" may be a, t, c, g, other or unknown
  misc_feature (703)..(703): "n" may be a, t, c, g, other or unknown
  misc_feature (713)..(713): "n" may be a, t, c, g, other or unknown
  misc_feature (729)..(729): "n" may be a, t, c, g, other or unknown
  misc_feature (745)..(745): "n" may be a, t, c, g, other or unknown
  misc_feature (757)..(757): "n" may be a, t, c, g, other or unknown
atattccatggagaccctggctggaggattgcaggagagtcccaggaggcaggactgccaatggcaccaggcttcgcagccatgcacctgcagccctcaggcagcactgtccattgtcatacgantgtggcaggtgtgaggcatcgcatctgctcaccccgggggataatgcacagcagctacaggcagatttcgggccaganancaaccgagtgagccttgcagcctctgctgccagcacaggcttgttccttcaacactggtggananagacacgctgtcatcaggcccaagaaatactgccttccccatcctatccccggtcactgggtgcccgcagagtgtcccagangagggagggagggaccctccactggttcaaatggcctgttctcagagatgcagcaatggaccctcgtgaatactgaactgataatcatgggaaggagactggctctcctggattccctcatgattcctctgantgacaatgtgatgttggccgactgtgtcttcttcagaatatcatatacacttgaggtctccaggaancctccaattacattattttcctggctcatacagtgacaagtaattcttatcctggattcctcgttactganacttttcttgccttttttgttancttatgatttattctaaggacttcctccaacaggttatacttaactgtctacctcantctctggaanttttaaaaatgttcancttaattaaaaaaatnaattctcctggnaaacc

SEQ ID NO: 1963 - DNA, 829 bp, Homo sapiens
  misc_feature (690)..(690): "n" may be a, t, c, g, other or unknown
  misc_feature (693)..(693): "n" may be a, t, c, g, other or unknown
  misc_feature (698)..(698): "n" may be a, t, c, g, other or unknown
  misc_feature (777)..(777): "n" may be a, t, c, g, other or unknown
  misc_feature (790)..(790): "n" may be a, t, c, g, other or unknown
  misc_feature (809)..(809): "n" may be a, t, c, g, other or unknown
  misc_feature (811)..(811): "n" may be a, t, c, g, other or unknown
  misc_feature (820)..(820): "n" may be a, t, c, g, other or unknown
agttgctgcagggaatcttttaaacgagagcgagaaggactgcgggcaggaccggcgggctcctggggttcagccgtgccgcctcgttacgatgaccagtgtggttaagacagtgtatagcctgcagcccccctctgcgctgagcggcggccagccggcagacacacaaactcgggccacttctaagagtctcttacctgttaggtccaaagaagtcgatgtttccaaacagcttcattcaggaggtccagagaatgatgttacaaaaatcaccaaactgagacgagagaatgggcaaatgaaagctactgacactgccaccagaaggaatgtcagaaaaggtacaactattattacagctacaaaccactgagtaagcaaaaatcagaggaagagctcaaggacaagaaccagctgttagaagccgtcaacaagcagttgcaccagaagttgactgaaactcagggagagctgaaggacctgacccagaaggtagagctgctggagaagtttcgggacaactgtttggcaattttggagagcaagggccttgatccagctttaggcagtgagaccctggcatcacgacaagaatccactactgatcacatggactctatgttgctgttagaaactttgcaagaaggactgaagctttttaacgaaacagccaaaaagcagatggaaganttncaggncttaaaggttaagctggagatgaaagaagaaagaatccgattcctagaacagcaaaccttatgttacaatccagttaantgatttaaccacngcccttaaagaaaatggancngcttattanaaaatgtta

SEQ ID NO: 1964 - DNA, 462 bp, Homo sapiens
  misc_feature (74)..(74): "n" may be a, t, c, g, other or unknown
  misc_feature (260)..(260): "n" may be a, t, c, g, other or unknown
  misc_feature (266)..(266): "n" may be a, t, c, g, other or unknown
  misc_feature (290)..(290): "n" may be a, t, c, g, other or unknown
  misc_feature (352)..(352): "n" may be a, t, c, g, other or unknown
  misc_feature (379)..(379): "n" may be a, t, c, g, other or unknown
  misc_feature (391)..(391): "n" may be a, t, c, g, other or unknown
  misc_feature (397)..(397): "n" may be a, t, c, g, other or unknown
  misc_feature (427)..(427): "n" may be a, t, c, g, other or unknown
  misc_feature (458)..(458): "n" may be a, t, c, g, other or unknown
gtgcggccggcgcatccccgatggatcgcggcggcggcggctccgggacgggatcccggcctgaggggactgcncggggaacctctctcccaggggaagatcgcagaaccgggcgcggtgcggacctctcagcccaactaccggcctcaaggcatggagggatttttgaaatcagatgagaggcagagattggccaaagaaagacgagaagaaagagaaaaatgtctggctgctcgggagcaacagatcctggagaaacngaaaanagccaggctgcagtacgaaaagcnaatggaggagcgatggcgaaaactggaagagcagcggcagcgggaggaccaaaagagagctnctgtggaagagaaaaggaaacataaanctccgggaggangacganccgctggaggcgatgatgcgccggtccctngagcgcacacagcagctgggagctgaaaaanaagt

SEQ ID NO: 1965 - DNA, 671 bp, Homo sapiens
  misc_feature (518)..(518): "n" may be a, t, c, g, other or unknown
  misc_feature (529)..(529): "n" may be a, t, c, g, other or unknown
  misc_feature (548)..(548): "n" may be a, t, c, g, other or unknown
  misc_feature (595)..(595): "n" may be a, t, c, g, other or unknown
  misc_feature (597)..(597): "n" may be a, t, c, g, other or unknown
  misc_feature (642)..(642): "n" may be a, t, c, g, other or unknown
  misc_feature (652)..(652): "n" may be a, t, c, g, other or unknown
  misc_feature (656)..(656): "n" may be a, t, c, g, other or unknown
agctggagcccgcggagcccacggagcccacggaggagcccacggaggagccccagcgtccgaacgggcagaccccctcgagccgcgaaggagcccgagaagcagccacgatgtgcggaatctttgcctacatgaaccacagagtcccccggacgaggaaggagatcttcgaaaccctcatcaagggcctgcagcggctggagtacagaggctacgactcggcaggtgtggcgatcgatgggaataatcacgaagtcaaagaaagacacattcagctggtcaagaaaagggggaaagtcaaggctctcgatgaagaactttacaaacaagacagcatggacttaaaagtggagtttgagacacacttcggcattgcccacacgcgctgggccacccacggggtccccagtgctgtcaacagccaccctcagcgctcagacaaaggcaacgaatttgttgtcatccacaatgggatcatcacaaattacaaagatcttgaggaaatttctgggaaagcnaaggctacgantttgagtcagaaacagatncagaagaccatcgccaaagctgattaaattatgtgttcgacaacagnanaaactgaaggacattacgtttttccaccgttggttccaaaaaaanttcattccancaantttgggaaaggtgca

SEQ ID NO: 1966 - DNA, 738 bp, Homo sapiens
  misc_feature (399)..(399): "n" may be a, t, c, g, other or unknown
  misc_feature (466)..(466): "n" may be a, t, c, g, other or unknown
  misc_feature (517)..(517): "n" may be a, t, c, g, other or unknown
  misc_feature (548)..(548): "n" may be a, t, c, g, other or unknown
  misc_feature (556)..(556): "n" may be a, t, c, g, other or unknown
  misc_feature (558)..(558): "n" may be a, t, c, g, other or unknown
  misc_feature (577)..(577): "n" may be a, t, c, g, other or unknown
  misc_feature (663)..(663): "n" may be a, t, c, g, other or unknown
  misc_feature (672)..(672): "n" may be a, t, c, g, other or unknown
  misc_feature (698)..(698): "n" may be a, t, c, g, other or unknown
  misc_feature (713)..(713): "n" may be a, t, c, g, other or unknown
gtcactgcaaggcgccggggggacacgttggctgcgttttcggcgggcttcccgggtacaaaaatggctgtggctagcgatttctacctgcgctactacgtagggcacaagggcaagtttgggcacgagtttctggagttcgaatttcggccggacggaaagcttagatatgccaacaacagcaattacaaaaatgatgtgatgatcagaaaagaggcttatgtgcacaagagtgtaatggaagaactgaagagaattattgatgacagtgaaattacaaaagaagatgatgctttgtggcctccccctgatagggttggccgacaggagcttgaaattgtaattggagatgagcacatatcttttaccacatcaaaaataggttctcttattgatgtnaatcagtcaaaggatcctgaaggccttcgagtattttactatttggtacaagacttgaaatgtttanttttcagtcttattgggattacacttcaagattaaaccaatttaaattgtntgttttcaggctgtttgtatatttaattaanggatgggnangggttatttgtcatttacngtattgggggtttttatgaaatgttgaagccaaaccaaaaaaaatttgttatgttaaactggaaaaataaagaaaaatacatttanccaaagctntaaatggttatccctttaactttganttcccccattggggnttgggacaagtccccccacaacaac

SEQ ID NO: 1967 - DNA, 533 bp, Homo sapiens
  misc_feature (30)..(30): "n" may be a, t, c, g, other or unknown
  misc_feature (409)..(409): "n" may be a, t, c, g, other or unknown
  misc_feature (442)..(442): "n" may be a, t, c, g, other or unknown
  misc_feature (483)..(483): "n" may be a, t, c, g, other or unknown
  misc_feature (497)..(497): "n" may be a, t, c, g, other or unknown
  misc_feature (506)..(506): "n" may be a, t, c, g, other or unknown
  misc_feature (531)..(531): "n" may be a, t, c, g, other or unknown
aatgccaaaatggcgatgcctaccacctanaactggattgtgcgctccatttctttcacctcaaagctggccgccaccgctgccacctgctcagagtgaaataatgaaggtggtcaacctgaagcaagccattttgcaagcctggaaggagcgctggagtgactaccaatgggcaatcaacatgaagaaattctttcctaaaggagccacctgggatattctcaacctggcagatgcgttactagagcaggccatgattggaccatcccccaatcctctcatcttgtcctacctgaagtatgccattagttcccagtttgatgacttttctcgggacctgtgtgtccaggcattgctggacatcatggacatgttttgtgaccgtctgagctgtcacggcaaagcagangaaatgcatcggactgtgccgagcccttcttancgccctccactggctgctgcgctgcacggcagcctctgcanaacggctgcgggangggctggangccggcactccagccgctggggganaa

SEQ ID NO: 1968 - DNA, 613 bp, Homo sapiens
  misc_feature (346)..(346): "n" may be a, t, c, g, other or unknown
  misc_feature (546)..(546): "n" may be a, t, c, g, other or unknown
  misc_feature (588)..(588): "n" may be a, t, c, g, other or unknown
  misc_feature (591)..(591): "n" may be a, t, c, g, other or unknown
  misc_feature (596)..(596): "n" may be a, t, c, g, other or unknown
  misc_feature (600)..(600): "n" may be a, t, c, g, other or unknown
aagaaggcggcgggggaagaggcggtcctggggtagagtttgcaagctttctgactaggctagtcgagtaactattcgggtcatggcgtcaaactcaactaagtctttcctggcagatgccggctatggcgaacaggaactggatgccaactctgcccttatggaattggacaaaggcctaagatctggcaaacttggtgaacagtgtgaagcagttgttcgctttcccagactttgtcagaagtatccattccctattcttatcaattctgcattcctaaagttagctgatgttttcagagttggaaataatttcctgaggctatgtgttcttaaagttacccancaaagtgagaaacatttggagaacattctaaatgtggatgaatttgtgaagagaattttttctgtgattcatagtaatgatcctgtggcaatagccatcaccctccggatgttgggaagtctggcatcaataattcctgagaggaagaatgctcatcatagtattcgtcagaatttagattcacatgataatgttacaanttgaagcttgctgtttttggctgcctgcaaacttctctggcnccngtccnaaanggattttgcttgt

SEQ ID NO: 1969 - DNA, 741 bp, Homo sapiens
  misc_feature (3)..(3): "n" may be a, t, c, g, other or unknown
  misc_feature (213)..(213): "n" may be a, t, c, g, other or unknown
  misc_feature (432)..(432): "n" may be a, t, c, g, other or unknown
  misc_feature (612)..(612): "n" may be a, t, c, g, other or unknown
aanatggcggcgcgctgggagcgtatcatctgcgtttctaggagcttcgctatgcggctgctttaagattctagggttgtacaggcccacgccagacacgacgtctggcaggaacctcggcctcagagatggctctgagtaaatcaatgcatgcaagaaatagatacaaggacaaacctcctgactttgcatatctggcatccaaatatccanattttaagcagcatgttcagataaatctggatggaagagtgagccttaattttaaagaccccgaagcagtcagagctctgacgtgtactctcctaagggaagattttggactttctattgatattccattggagagactaattcccacagttcccttgagactcaactatattcactgggtagaagatctgatcggtcaccaggattctgacaaaagtnctctccgaagaggaattgacataggcacgggggcatcttgcatctaccccttacttggagcaaccttgaaatggctgggtatttcctcgcaacagaaagtggatgatatgtgtttcaactatgcaaaagaaaaatgtggaacagaataacttatctgatctccataaaaagtggtggaangttgccacagaaagacactccttgaatgggatgctccttaaagaaagaaatctgaagaataatcctatgaactttttgcattgttgccaaacccctcccctttttttttggccaaattccaatttggga

SEQ ID NO: 1970 - DNA, 727 bp, Homo sapiens
  misc_feature (14)..(14): "n" may be a, t, c, g, other or unknown
  misc_feature (26)..(26): "n" may be a, t, c, g, other or unknown
  misc_feature (40)..(40): "n" may be a, t, c, g, other or unknown
  misc_feature (431)..(431): "n" may be a, t, c, g, other or unknown
  misc_feature (568)..(568): "n" may be a, t, c, g, other or unknown
  misc_feature (707)..(707): "n" may be a, t, c, g, other or unknown
  misc_feature (710)..(710): "n" may be a, t, c, g, other or unknown
  misc_feature (723)..(725): "n" may be a, t, c, g, other or unknown
aacaagaggggtcnagtgacacaacnagctgactcccgtnagaggaagacactgtggaggccagttctggagctattgcagcctcggttgcccggccgggggacccgagccgaaaagttatcgtcagaatgtcgggcaaagaccgaattgaaatctttccctcgcgaatggcacagaccatcatgaaggctcgtttaaagggagcacagacaggtcgaaacctcctgaagaaaaaatctgatgccataactcttcgatttcgacagatcctaaagaagataatagagactaaaatgttgatgggcgaagtgatgagagaagctgccttttcactagctgaagccaagttcacagcaggtgacttcagcactacagttatccaaaatgtcaataaagcgcaagtgaagattcgagcgaagaaagataatgtngcaggtgttactttgccagtatttgaacattaccatgaaaggccaaagcagtggaaactactggtggaaactagcttctctgcagacttcttttgttactttggatgaagctattaagataaccaacagggcgtgtnaattgccattggaacatgtcatccattcccccgggattggaacgttactccttggcttattatcatccaccagaaactgggaatgaagaagaagaagccgaagaaaggggttcctattagggtttaaaaagaaaaattnccnggaagaaagaaannnag

SEQ ID NO: 1971 - DNA, 609 bp, Homo sapiens
  misc_feature (281)..(281): "n" may be a, t, c, g, other or unknown
  misc_feature (287)..(287): "n" may be a, t, c, g, other or unknown
  misc_feature (417)..(417): "n" may be a, t, c, g, other or unknown
  misc_feature (467)..(467): "n" may be a, t, c, g, other or unknown
  misc_feature (487)..(487): "n" may be a, t, c, g, other or unknown
  misc_feature (544)..(545): "n" may be a, t, c, g, other or unknown
  misc_feature (569)..(569): "n" may be a, t, c, g, other or unknown
  misc_feature (589)..(589): "n" may be a, t, c, g, other or unknown
  misc_feature (602)..(602): "n" may be a, t, c, g, other or unknown
acaatcctttgcggtggttcaagatggcggcgcccagtggcactgtgagcgattcggaaagtagtaacagcagtagcgatgcggaggagctggagcggtgccgcgaggcggcaatgccggcttggggcttggagcaacgcccgcacgtggcagggaagccaagagccggtgctgcaaatagccagttgtcaacctcccaaccgagcctcaggcataaggtgaatgagcatgaacaagatggcaacgagcttcagaccacccctgaattccgagcccacgtntccaanaagctgggagccctgctggacagcttcattaccatctcagaagcagcaaaggagccagcaaaagctaaggtacagaaagtcgctttggaggatgatggtttccgccttttcttcacatctgtccctggangccgtgagaaagaaaatctccccaaccccgccgaaagcgacagcctccanctccagtgaagacagtgacnaagattgcggcggtgcccggaagcactgtttcggcttcgacatcctacaggaattcnncctccacagccttgaactgtgganaaagaagccaagaaaaaaangaagttgaaaaanaaaccca

SEQ ID NO: 1972 - DNA, 739 bp, Homo sapiens
  misc_feature (540)..(540): "n" may be a, t, c, g, other or unknown
  misc_feature (581)..(581): "n" may be a, t, c, g, other or unknown
  misc_feature (633)..(633): "n" may be a, t, c, g, other or unknown
  misc_feature (693)..(693): "n" may be a, t, c, g, other or unknown
  misc_feature (728)..(728): "n" may be a, t, c, g, other or unknown
agagcgcgggtgagaccccagccctgtgagcctgtaggagtagaatggctccccaaatgtatgagttccatctgccattatccccagaggagttgttgaaaagtggaggggtgaatcagtatgttgtgcaagaggtactgtccatcaaacatcttccaccacagcttagagcttttcaggctgcctttcgagctcaggggcccctggctatgctgcagcactttgatactatctacagcattttgcatcactttcgaagtatagatcctggcctcaaagaagatactctggaattcctgataaaagtggtatcccgccactcccaggagcttccagctatcctggatgatacaactttgagtggatcagatagaaacgcccatctaaatgccctcaaaatgaactgttatgctctgatacgtctcctggaatcctttgagaccatggccagccagacaaaccttgtggacctggaccttggtgggaaaggtaagaaagctcggaccaaggcagcccatggctttgactggggaagaaaanaagcaaccaattcttcagcttttaacacagcttacttccanttgggacatccgttcacctgtgggaaccactccaataaatttggaaagaaanaaatttgttcagtttgggttactggggctgtttggcttaacccggcccttccttgggaanaaatccccacccattttaaattcaccccagaaaanaaaaccggccc

SEQ ID NO: 1973 - DNA, 181 bp, Homo sapiens
ataaggaatgcacatgagatggcacacatatttatgctgtctgaaggtcacgatcatgttaccatatcaagctgaaaatgtcaccactatctggagatttcgacgtgttttcctctctgaatctgttatgaacacgttggttggctggattcagtaataaatatgtaaggcctttcttttt

SEQ ID NO: 1974 - DNA, 747 bp, Homo sapiens
  misc_feature (427)..(427): "n" may be a, t, c, g, other or unknown
  misc_feature (564)..(564): "n" may be a, t, c, g, other or unknown
  misc_feature (609)..(609): "n" may be a, t, c, g, other or unknown
  misc_feature (647)..(647): "n" may be a, t, c, g, other or unknown
  misc_feature (711)..(711): "n" may be a, t, c, g, other or unknown
  misc_feature (715)..(715): "n" may be a, t, c, g, other or unknown
ataatcgttgcgggctccgcgcggtcccacttcccggctcccttcgcctccaggatgcgctgagccctacaacacccccagcggccgccggctcccccacgaggtgtgaatgacagaggtggtgccatccagcgcgctcagcgaggtcagcctgcgcctcctctgccacgatgacatagacactgtgaagcacctgtgtggcgactggttccccatcgagtacccagactcatggtatcgtgatatcacatccaacaagaagttcttttcccttgctgcaacctacagaggtgccattgtgggaatgatagtagctgaaattaagaacaggaccaaaatacataaagaggatggagatattctagcatccaacttctctgttgacacacaagtcgcgtacatcctaagtctgggcgtcgtgaaaganttcaggaagcacggcattaggttccctcttacttgaaaagtttaaaggatcacatatcaaccaccgcccaggaccactgcaaaagccatttacctgcatgtcctcaccaccaacaacacagcaataaacttctattnaaaaacagaaaacttcaagccaagcaaccactaatctccccttanttacttactccattccaaaggggttcctccaaaaaatnggcttccaccctaatgttcctccttacattcaaaccggggggggggcaacccctccccttgggnaacnaatttttggggaacttaacattcccaagccaa

SEQ ID NO: 1975 - DNA, 734 bp, Homo sapiens
  misc_feature (365)..(365): "n" may be a, t, c, g, other or unknown
  misc_feature (435)..(435): "n" may be a, t, c, g, other or unknown
  misc_feature (446)..(446): "n" may be a, t, c, g, other or unknown
  misc_feature (468)..(468): "n" may be a, t, c, g, other or unknown
  misc_feature (487)..(487): "n" may be a, t, c, g, other or unknown
  misc_feature (499)..(499): "n" may be a, t, c, g, other or unknown
  misc_feature (548)..(548): "n" may be a, t, c, g, other or unknown
  misc_feature (568)..(568): "n" may be a, t, c, g, other or unknown
  misc_feature (637)..(637): "n" may be a, t, c, g, other or unknown
  misc_feature (647)..(647): "n" may be a, t, c, g, other or unknown
  misc_feature (659)..(659): "n" may be a, t, c, g, other or unknown
  misc_feature (708)..(708): "n" may be a, t, c, g, other or unknown
  misc_feature (733)..(733): "n" may be a, t, c, g, other or unknown
atagaagatcctcggagagcgctgcctctgggttggcgggctggcaggctgtagccgagcgcgggcaggactcgtcccggcagggttccagagccatgggagcggaaaggaggctgctgtcgattaaggaggcctttcggctggcgcagcagccgcaccagaaccaggcgaagctggtggtggcgctgagccgcacctaccgcacgatggatgataagacagtttttcatgaggagttcattcattaccttaaatatgttatggtggtctataaacgtgaaccagctgtggagagggtaatagaatttgcagcaaagtttgttacctcatttcaccaatcagatatggaagatgatgaggaagangaagatggtggccttttaaattatttgtttacttttctcttaaagtctcatgaagcaaacagcaatgcantggggatttanagtgtgcctgctcataaacaancttttgggaagtatgccanaaaaatgctcanattgatgatgatgtttttgataaaattaataaagccatgctttattaanattgaaagataagattcccnaatgtttaaaaataccagggcagttctggcgctttcacgacttccagggatcccccaagggattgaatnaatgccccanttggttaaatgncattattgcctactttttgaattggaaaaattgaattcccaattcccanaaaattttaaaaccggggccatttnt

SEQ ID NO: 1976 - DNA, 743 bp, Homo sapiens
  misc_feature (382)..(382): "n" may be a, t, c, g, other or unknown
  misc_feature (425)..(425): "n" may be a, t, c, g, other or unknown
  misc_feature (564)..(564): "n" may be a, t, c, g, other or unknown
  misc_feature (567)..(567): "n" may be a, t, c, g, other or unknown
  misc_feature (640)..(640): "n" may be a, t, c, g, other or unknown
  misc_feature (647)..(647): "n" may be a, t, c, g, other or unknown
  misc_feature (649)..(649): "n" may be a, t, c, g, other or unknown
  misc_feature (733)..(733): "n" may be a, t, c, g, other or unknown
agtagcgcctctgccgccgcggagcttcccgaacctcttcagccgcccggagccgctcccggagcccggccgtagaggctgcaatcgcagccgggagcccgcagcccgcgccccgagcccgccgccgcccttcgagggcgccccaggccgcgccatggtgaaggtgacgttcaactccgctctggcccagaaggaggccaagaaggacgagcccaagagcggcgaggaggcgctcatcatcccccccgacgccgtcgcggtggactgcaaggacccagatgatgtggtaccagttggccaaagaagagcctggtgttggtgcatgtgctttggactagcatttatgcttgcaggtgttattctaggaggagcatacttgttncaaatattttgcacttcaaccagatgacgtgtactactgtggnaataaagtacatcaaagatgatgtcatcttaaatgagccctcttgcagatgccccagctgctctctaccagacaattgaagaaaatattaaaatctttgagaagaagaagttgaatttatcaagtgttgcctgtcccanaantttgcagaatagttgatccctggccaacatttgttccaatgaacttttaacaaagaaaactttacagccttanttttaanantcttaacccttgggaataaagttgcttattgttgaatcccctctttgaaacactttcccattttggtttattgccacccccaanaaaaaccctt

SEQ ID NO: 1977 - DNA, 727 bp, Homo sapiens
  misc_feature (601)..(601): "n" may be a, t, c, g, other or unknown
  misc_feature (653)..(653): "n" may be a, t, c, g, other or unknown
  misc_feature (669)..(669): "n" may be a, t, c, g, other or unknown
  misc_feature (724)..(724): "n" may be a, t, c, g, other or unknown
aagagtgctccggccgcggccctgggagctggaggaacgcgtctgggcccgcaggcaagccgcttcttgccctctgcccggagctctcccgcatcctccccagagctgccctggcgacctcgaggtctcctcaaccttccccgaagccgctcacagccttgtgatctggatgcccgcaaaactggggtcaagcggcgccacgaggaagacccccggcgtctgcggccttcgttggactttgacaagatgaatcagaaaccatactcaggaggtctttgtctccaagaaacagcccgggaaggcagcagcatctctccaccatggttcatggcctgtagccccccacccctctctgcttcctgcagccccactgggggttcctcccaggtgctgagtgaaagcgaagaggaggaggagggggctgtgcggtggggtcggcaggcgctgagcaagcggacactgtgccagcgggactttggggacctggacttgaatttgattgaggaaaactaaaactgagaggctacttcctggggccacacagactgactctctcatggctactaacaagtgttcgaagccccaaggctgggggggcccnaaccttggggaatggggggtttaattggaagggctcccgactccaagggcancttgggaaaaatcttncttccgcctccaagcaaaagctccgaaccaattgcccaaagaaaaacttgggccnggg

SEQ ID NO: 1978 - DNA, 732 bp, Homo sapiens
  misc_feature (502)..(502): "n" may be a, t, c, g, other or unknown
  misc_feature (634)..(634): "n" may be a, t, c, g, other or unknown
  misc_feature (697)..(697): "n" may be a, t, c, g, other or unknown
  misc_feature (700)..(700): "n" may be a, t, c, g, other or unknown
aatatgttgctgctggagatcaatgaagccgagtggatgggggctgaatgtgcgagtccatagctgaagaggagcgccagatggtggaggaatacacttatttatgaagtggacttagtagttttaagcagaaccatgaaaacctctgtgacaactccctccagctccaagagtgccgggaggtggggggcggcgcatccgcggcctcgagcttgctacctcagcccatccccaccacccctgacatcgagaacgctgagctcacccccatcttgcccttcctgttccttggcaatgagcaggatgctcaggacctggacaccatgcagcggctgaacatcggctacgtcatcaacgtcaccactcatcttcccctctaccactatgagaaaggcctgttcaactacaagcggctgccagccactgacagcaacaagcagaacctgcggcagtactttgaagaggcttttgagttcattggaggaagctcaccagtgtgggnaaggggcttctcatccactgccaggctgggggtgtcccgctccgccaccatcgtcatcgcttacttgaatgaaagcacacttcgggatgaccatggactggatgctttataaatttgttcaaagggcaaaancgaaccaatttaatcttcccccaaaacctttaacttccattggggggcaagtttgctaaaaanttncgaaaggaaagaaccttaaaaccaaacgggtt

SEQ ID NO: 1979 - DNA, 765 bp, Homo sapiens
  misc_feature (362)..(362): "n" may be a, t, c, g, other or unknown
  misc_feature (524)..(524): "n" may be a, t, c, g, other or unknown
  misc_feature (570)..(570): "n" may be a, t, c, g, other or unknown
  misc_feature (600)..(600): "n" may be a, t, c, g, other or unknown
  misc_feature (609)..(609): "n" may be a, t, c, g, other or unknown
  misc_feature (660)..(660): "n" may be a, t, c, g, other or unknown
  misc_feature (722)..(722): "n" may be a, t, c, g, other or unknown
  misc_feature (742)..(742): "n" may be a, t, c, g, other or unknown
  misc_feature (755)..(755): "n" may be a, t, c, g, other or unknown
  misc_feature (765)..(765): "n" may be a, t, c, g, other or unknown
ctccaggctgccgagactataaaggcgccaggttttctcaatgaagccgggacgcactccggagcgcactgcgtggtcgcaccctacccgggctgccttggaagtcgtccccgccgcccctccgcaccggcatgaagcttatcgtgggcatcggaggcatgaccaacggcggcaagaccacgctgaccaacagcctgctcagagccctgcccaactgctgcgtgatccatcaggatgacttcttcaagccccaagaccaaatagcagttggggaagacggcttcaaacagtgggacgtgctggagtctctggacatggaggccatgctggacaccgtgcaggcctggctgagcagcccgcanaagtttgcccgtgcccacggggtcagcgtccagccagaggcctcgggacacccacatcctcctcctggaaggcttcctgctctacagctacaagcccctggtggacttgtacagccgccggtacttcctgaccgtcccgtatgaagagtgcaagtggagganaaatacccgcaactacacagtcccttgatccccccggcctcttccnatggccacgttgtggcccattgttacccanaaagtatangcaggaaaatgggaagccaacgggtgttggaaaattggtctacctggaacngcattgaaattccccgaaaaaagaactcttcccgttgaaattccttggaaaaaaaatttcanaaactccccttgcttgaaanccgcctccccaangaaaattcan

SEQ ID NO: 1980 - DNA, 556 bp, Homo sapiens
  misc_feature (5)..(5): "n" may be a, t, c, g, other or unknown
  misc_feature (8)..(8): "n" may be a, t, c, g, other or unknown
  misc_feature (10)..(10): "n" may be a, t, c, g, other or unknown
  misc_feature (30)..(30): "n" may be a, t, c, g, other or unknown
  misc_feature (98)..(98): "n" may be a, t, c, g, other or unknown
  misc_feature (163)..(163): "n" may be a, t, c, g, other or unknown
  misc_feature (193)..(193): "n" may be a, t, c, g, other or unknown
  misc_feature (195)..(195): "n" may be a, t, c, g, other or unknown
  misc_feature (251)..(251): "n" may be a, t, c, g, other or unknown
  misc_feature (258)..(258): "n" may be a, t, c, g, other or unknown
  misc_feature (330)..(330): "n" may be a, t, c, g, other or unknown
  misc_feature (381)..(381): "n" may be a, t, c, g, other or unknown
  misc_feature (488)..(488): "n" may be a, t, c, g, other or unknown
  misc_feature (492)..(492): "n" may be a, t, c, g, other or unknown
  misc_feature (511)..(511): "n" may be a, t, c, g, other or unknown
  misc_feature (524)..(524): "n" may be a, t, c, g, other or unknown
  misc_feature (535)..(535): "n" may be a, t, c, g, other or unknown
gtgtncgnanccgccgccgcaccgcgtcgntctccaacgccagcgccggctctcgctcgccgagctccagccgaaggagaaggggggtaagtaaggangtctctgtaccatggctcgtacaaagcagactgcccacaaatcgaccggtggtaaagcacccaanaagcaactggctacaaaagccgctcgcaanantgcgccctctactggaggggtgaaaaaacctcatcgttacaggcctggtactgtgncgctccntgaaattagacgttatcagaagtccactgaacttctgattcgcaaacttcccttccagcgtctggtggcganaaattgctcaagactttaaaacagatctgcgcttccagaacgcaactatcngtgctttgcaagaagcaaatgaggcctatctggttggactttttgaaaacaccaacctgtgtgctatccatgccaaacatgtaacaattatgccaaaagacatccancttngcacgccgcatacgtgganaacgttgcttaanaatccactatnatgggaaacatttcattctcc

SEQ ID NO: 1981 - DNA, 742 bp, Homo sapiens
  misc_feature (253)..(253): "n" may be a, t, c, g, other or unknown
  misc_feature (614)..(614): "n" may be a, t, c, g, other or unknown
  misc_feature (650)..(650): "n" may be a, t, c, g, other or unknown
  misc_feature (684)..(684): "n" may be a, t, c, g, other or unknown
  misc_feature (702)..(702): "n" may be a, t, c, g, other or unknown
  misc_feature (718)..(718): "n" may be a, t, c, g, other or unknown
  misc_feature (736)..(736): "n" may be a, t, c, g, other or unknown
tactggatccggtctccgttttggaagacccgcctcggcacagccaggctcagtccggccttgcgctgagaaaagatgacagcaatcaagcatgcattacaaagagacatttttacaccaaatgatgaacgcctgctgagcattgtgaatgtctgcaaagcaggaaaaaagaaaaagaactgttttttatgtgccacagtgacaactgaacgccctgtgcaggttaaggtggtcaaagtcaagaaatccgatnagggagatttctacaaaaggcagattgcatgggcccttcgaggtcttgctgtggtagatgccaaagatgctatcaaagaaaatcctgaatttgatttacactttgaaaaaatatataaatgggttgccagcagcactgctgaaaagaatgcatttatttcatgcatttggaaattgaatcagcgatatctccgggaagaaaattgattttgtcaatgttagctcacagcttttggaaagaatctgttccaagtgggagaaaatcagagtgtgacagggaggtgatgaaagaaagtagtagatgaataccaagaagttaaattgccaagaagaagaaacaggatatcgaaattaatgatggnaaggctgttgaatattgcaatctccgaaatgccggnaagcctttggcagaaaaaatttgtcccaaaaaancttgccagggttgcttanaatgggggcttaacantcccagttccaatccatngggcat

SEQ ID NO: 1982 - DNA, 763 bp, Homo sapiens
  misc_feature (754)..(754): "n" may be a, t, c, g, other or unknown
  misc_feature (763)..(763): "n" may be a, t, c, g, other or unknown
acatcagctttgaaagccaacacatcctcctgagaggggacaagacaagcagggatatgtgggccactggatctttgccagacttcccggctgcagccaagttcttagggttccgtcagcgctgcatccccaggagcctctgcctcagtgagtgtcctctggagcccccaagcctcacccgcctctgtgccactctgaaggactgcccgggacccctggaactgcaattgtcctgtgagttcctgagtgaccagagcctggagactctactggactgcttacctcaactccctcagctgagcctgctgcagctgagccagacgggactgtccccgaaaagccccttcctgctggccaacaccttaagcctgtgtccacgggttaaaaaggtggatctcaggtccctgcaccatgcaactttgcacttcagatccaacgaaggaggaggaaggcgtgtgctgtggtctctcagcaaacctgctgggcgacagcgggactcagatgccttctggaatgtctgccgcaggtgcccatctccggtttgcttgatctgagtcacaacagcatttctcagggaaagtgccctgttacctgctggaaaacactggccctccttgccccacgttgtccggggaaggcctccagttgaaaccttggggctcttgaaacaaaaacttcccgggattccactttctcccagaaaaaaaggaaccaagggcttgggggaaaaaaaaactccagggcttaaaatttnaagttgccn

SEQ ID NO: 1983 - DNA, 480 bp, Homo sapiens
  misc_feature (313)..(313): "n" may be a, t, c, g, other or unknown
  misc_feature (384)..(384): "n" may be a, t, c, g, other or unknown
  misc_feature (394)..(394): "n" may be a, t, c, g, other or unknown
  misc_feature (396)..(396): "n" may be a, t, c, g, other or unknown
  misc_feature (467)..(467): "n" may be a, t, c, g, other or unknown
  misc_feature (470)..(470): "n" may be a, t, c, g, other or unknown
ggggaaaaaaatatgttttggccgcttcaagatggcggtgcaggagtcggcggctcagttgtccatgaccctgaaggtccaggagtacccgaccctcaaggtgccctacgagacgctgaacaaacgctttcgcgccgctcagaagaacattgaccgggagaccagccacgtcaccatggtggtggccgagctggagaagacgttgagcggctgccccgccgtggactccgtggtcagcctgctggacggcgtggtggagaagctcagcgtcctcaagaggaaggcggtggaatccatccaggccgaggacganagcgccaagctgtgcaagcgccggatcgagcacctcaaagagcatagcagcgaccagcccgcggcggccancgtgtggaanangaagcgcatggatcgcatgatggtggaacaccttgctgcgtttgcggctacttacaacacggcttgttccnaancgcccccccc

SEQ ID NO: 1984 - DNA, 778 bp, Homo sapiens
  misc_feature (545)..(545): "n" may be a, t, c, g, other or unknown
  misc_feature (563)..(563): "n" may be a, t, c, g, other or unknown
  misc_feature (710)..(710): "n" may be a, t, c, g, other or unknown
  misc_feature (723)..(723): "n" may be a, t, c, g, other or unknown
  misc_feature (736)..(736): "n" may be a, t, c, g, other or unknown
  misc_feature (742)..(742): "n" may be a, t, c, g, other or unknown
  misc_feature (766)..(766): "n" may be a, t, c, g, other or unknown
gacagtggagtgaggccacacttccctgcccccaggcatgcagcaccctgccagtggcccagctgaggtactcagttccagccccaagctggatcctcccccatctccccactccaaccggaagaagcaccggagggaaaaagagcaccgggaccccccgaccagacggccccagcagtgctactgaagaggcagaggagtcgtttgaatttgtggtggtgtccctcactgggcagacgtggcacttcgaggcttcaacggcggaggagcgggagctgtgggttcagagtgtgcaggcccagatccttgccagcctgcaaggctgccgcagtgccaaggacaagactcgactggggaaccagaacgcagctctggctgtgcaggccgtccgcaccgtccgcggcaacagcttttgtatcgactgcgatgcacccaatccagactgggccagcctgaacctgggtgccctgatgtgcattgagtgctcaggcatccaccgacacctgggggctcacctgtcccgggtgcgctccctttgacctccnatgactggccgccttganctgcttggctgtcatgactgccatgggcaatgccctccgccaacaagcgtctggggaaagggggccttggggttggcttactccaaagcccaaggggccttgaatgcccttgccagaaaaagggaaaaaaggaaacgcctgggaatnccggggcccaaanttttttgaaacangaaaancttccttcccttggggcccccccncttggcccaaaa

SEQ ID NO: 1985 - DNA, 787 bp, Homo sapiens
  misc_feature (7)..(7): "n" may be a, t, c, g, other or unknown
  misc_feature (476)..(476): "n" may be a, t, c, g, other or unknown
  misc_feature (655)..(655): "n" may be a, t, c, g, other or unknown
  misc_feature (690)..(690): "n" may be a, t, c, g, other or unknown
  misc_feature (714)..(714): "n" may be a, t, c, g, other or unknown
  misc_feature (755)..(755): "n" may be a, t, c, g, other or unknown
  misc_feature (771)..(771): "n" may be a, t, c, g, other or unknown
  misc_feature (787)..(787): "n" may be a, t, c, g, other or unknown
aatgaangcaggccacttccggcgtagccatggcggctaacgctactaccaacccgtcgcagctgctgccgttagagcttgtggacaaatgtataggatcaagaattcacatcgtgatgaagagtgataaggaaattgttggtactcttctaggatttgatgactttgtcaatatggtactggaagatgtcactgagtttgaaatcacaccagaaggaagaaggattactaaattagatcagattttgctaaatggaaataatataacaatgctggttcctggaggagaaggacctgaagtgtgaatgagtttccttgacttacactagattttgttttggcttataatgacaagaaaatggaattttttttcccactttctaatgtttaaatcccataaagctaagtttcccgttaaagggaagtgctttgaagatgtgtacccatttttgtaagttaatcatgattatcctggnaaaaagaagaaaagagcttcttctttgcagatgaaaaataaaggtgtttttggttaactgtcattttgtttattctactgcagtagccagtggaaacaaaagtttgtagttatttttgccacttacttttctgtcattatatgcttatttgtttttgtcattttacgttgaccatttgnattctcaaacaaaaaagttgttcccaaacaaaaantgaatgaaactttttgaattttgnaaacaagggttggcatttttaaaaccaaaccccgggaaaantggatccacttttaanaaaaaaattcccattn

SEQ ID NO: 1986 - DNA, 698 bp, Homo sapiens
  misc_feature (395)..(395): "n" may be a, t, c, g, other or unknown
  misc_feature (632)..(632): "n" may be a, t, c, g, other or unknown
  misc_feature (635)..(635): "n" may be a, t, c, g, other or unknown
  misc_feature (649)..(649): "n" may be a, t, c, g, other or unknown
  misc_feature (672)..(672): "n" may be a, t, c, g, other or unknown
  misc_feature (687)..(687): "n" may be a, t, c, g, other or unknown
gaaaaacatgacaataacttgtctcagtctggatcagactcaagttgctctccagaatgcctctgggaggaaggcaaagaagttatcccaactttctttagtaccatgaacacaagctttagtgacattgaacttctggaagacagtggcattcccacagaagcattcttggcatcatgttgtgctgtggttccagtattagacaaacttggccctacagtgtttgctcctgttaagatggatcttgttgaaaatattaagaaagtaaatcagaagtatataaccaacaaagaagagtttaccactctccagaagatagtgctgcacgaagtggaggcggatgtagcccaggttaggaactcagcgactgaaagccctcttgtggctgaagagangtctcaaatttttgaaagggatttttgacagaaagtgaaaaatggggaaaaggatatccagacagccctgaaataacgcatatggtaaaacattgcggcaacaccatggctgggtaattcgaggggtttttgcgttagctttaaggggcaactccatcctatgaagattttgtggccgcgttaaccgtaaagggaaggtgaccaccgggaaagaagctttccagttttttggggatnccnaaaaggggaccccnccctttaacccccccggcccctngaaaaaaacccaaantgggccttccc

SEQ ID NO: 1987 - DNA, 766 bp, Homo sapiens
  misc_feature (624)..(624): "n" may be a, t, c, g, other or unknown
  misc_feature (691)..(691): "n" may be a, t, c, g, other or unknown
  misc_feature (714)..(714): "n" may be a, t, c, g, other or unknown
  misc_feature (731)..(731): "n" may be a, t, c, g, other or unknown
  misc_feature (752)..(752): "n" may be a, t, c, g, other or unknown
  misc_feature (758)..(758): "n" may be a, t, c, g, other or unknown
gctggagagggggcgctgagctgttgggatgagctttgatccaaaccttctccacaacaatggacataatgggtaccctaatggtacttcagcagcactgcgtgaaactggggttattgtaaaactgttaacctcttacggatttattcagtgttcagaacgtcaagctagacttttcttccactgttcacagtataatggcaacctgcaagacttaaaagtaggagatgatgttgaatttgaagtatcatcggaccgacggactgggaaacccattgctgttaaactggtgaagataaaacaagaaatcctccctgaagaacgaatgaatggacaagaagtgttttatctgacttacacccctgaagatgtcgaagggaacgttcagctggaaactggagataaaataaactttgtaattgataacaataaacatactggtgctgtaagtgctcgcaacattatgctgttgaaaaaagaaacaagcccgctgtcaggggaagtagtttgtgccatgaaaggaaggcatttggctttattgaaaagaagtgatgtttgtaaaaagaaaatattcctttccactattagttgaaatttaaggggttgactttaaaaaaccttaanagccctgggcgaatgaatgttggaaatttccacaaatcccaagggaaccagaaaaattggttaaaanaaaaattttgccaaaccagaatnttccagaaacttaattngccctccaaaggggaaaacangttccntttttttt

SEQ ID NO: 1988 - DNA, 698 bp, Homo sapiens
  misc_feature (620)..(620): "n" may be a, t, c, g, other or unknown
  misc_feature (652)..(652): "n" may be a, t, c, g, other or unknown
  misc_feature (659)..(659): "n" may be a, t, c, g, other or unknown
  misc_feature (665)..(665): "n" may be a, t, c, g, other or unknown
  misc_feature (674)..(674): "n" may be a, t, c, g, other or unknown
tagctgatcatgtgacaatccaagatggcggtgcccggcgaggcggaggaggaggcgacagtttacctggtagtgagcggtatcccctccgtgttgcgctcggcccatttacggagctattttagccagttccgagaagagcgcggcggtggcttcctctgtttccactaccggcatcggcctgagcgggcccctccgcaggccgctcctaactctgccctaattcctaccgacccagccgctgagggccagcttctctctcagacttcggccaccgatgtccggcctctctccactcgagactctactccaatccagacccgcacctgctgctgcgtcatctcggtaagggggttggctcaagctcagaggcttattcgcatgtactcgggccgccggtggctggattctcacgggacttggctaccgggtcgctgtctcatccgcagacttcggctacctacggaggcatcaggtctgggcccctttcccttcaagacccgggaaggaactgcagagttggaaggcagagaatgaagccttcaccctggctgacctgaagcaactgccggagctgaacccaccagtgctgaatgcccaaaaagggaaatgttgggggnactcccccttggccggggttctttttttgggnaattttnaatccnggggccctngcccgcccttaacccccctcccgg

SEQ ID NO: 1989 - DNA, 475 bp, Homo sapiens
  misc_feature (440)..(440): "n" may be a, t, c, g, other or unknown
  misc_feature (473)..(473): "n" may be a, t, c, g, other or unknown
  misc_feature (475)..(475): "n" may be a, t, c, g, other or unknown
actcagctttgaaagccaacacatcctcctgagaggggacaagacaagcagggatatgtgggccactggatctttgccagacttcccggctgcagccaagttcttagggttccgtcagcgctgcatccccaggagcctctgcctcagtgagtgtcctctggagcccccaagcctcacccgcctctgtgccactctgaaggactgcccgggacccctggaactgcaattgtcctgtgagttcctgagtgaccagagcctggagactctactggactgcttacctcaactccctcagctgagcctgctgcagctgagccagacgggactgtccccgaaaagccccttcctgctggccaacaccttaagcctgtgtccacgggttaaaaaggtggatctcaggtccctgcaccatgcaactttgcacttcagatccaacgaangaaggaaggaaggcgtgtgcttggtttttttgngn

SEQ ID NO: 1990 - DNA, 463 bp, Homo sapiens
  misc_feature (343)..(343): "n" may be a, t, c, g, other or unknown
  misc_feature (359)..(359): "n" may be a, t, c, g, other or unknown
  misc_feature (389)..(389): "n" may be a, t, c, g, other or unknown
  misc_feature (396)..(396): "n" may be a, t, c, g, other or unknown
  misc_feature (405)..(405): "n" may be a, t, c, g, other or unknown
  misc_feature (443)..(443): "n" may be a, t, c, g, other or unknown
  misc_feature (462)..(462): "n" may be a, t, c, g, other or unknown
gtgcagttgcggctccagggccatggcggaggagcagggccgggaacgggactcggttcccaagccgtcggtgctgttcctccacccagacctgggcgtgggcggcgctgagcggctggtgttggacgcggcgctggcgctgcaggcgcgcgggtgtagcgtgaagatctggacagcgcactacgacccgggccactgtttcgccgagagccgcgagctaccggtgcgctgtgccggggactggctgccgcgaggcctgggctggggcggccgcggcgccgccgtctgcgcctacgtgcgcatggttttcctggcgctctacgtgctgttcctcgccgacgangagttcgacgtggtantgtgcgaccaggtgtctgcctgtatcccantgttcangctggctanacggcggaagaagatcctattttactgtcacttcccanatctgcttctcaccaagana

SEQ ID NO: 1991 - DNA, 281 bp, Homo sapiens
  misc_feature (112)..(112): "n" may be a, t, c, g, other or unknown
  misc_feature (226)..(226): "n" may be a, t, c, g, other or unknown
  misc_feature (268)..(268): "n" may be a, t, c, g, other or unknown
  misc_feature (270)..(270): "n" may be a, t, c, g, other or unknown
  misc_feature (277)..(277): "n" may be a, t, c, g, other or unknown
  misc_feature (279)..(279): "n" may be a, t, c, g, other or unknown
atccctgaggcagtggcgacagcggcggcgagaggatgaacaacaagttcgacgctttgaaagatgatgacagtggggaccatgatcagaatgaagaaaacagcacacaganagatggtgagaaggaaaaaacggaacgagacaagaatcagagcagtagcaacagaaaggctgttgtccctggaccggcagagcatcccctgcagtacaactacactttttggtnctccaggagaacccccggccgtcccacgagctcacagagctntnaacagantntc

SEQ ID NO: 1992 - DNA, 725 bp, Homo sapiens
  misc_feature (106)..(106): "n" may be a, t, c, g, other or unknown
  misc_feature (127)..(127): "n" may be a, t, c, g, other or unknown
  misc_feature (141)..(141): "n" may be a, t, c, g, other or unknown
  misc_feature (157)..(157): "n" may be a, t, c, g, other or unknown
  misc_feature (177)..(177): "n" may be a, t, c, g, other or unknown
  misc_feature (339)..(339): "n" may be a, t, c, g, other or unknown
  misc_feature (358)..(358): "n" may be a, t, c, g, other or unknown
  misc_feature (437)..(437): "n" may be a, t, c, g, other or unknown
  misc_feature (443)..(443): "n" may be a, t, c, g, other or unknown
  misc_feature (469)..(469): "n" may be a, t, c, g, other or unknown
  misc_feature (472)..(472): "n" may be a, t, c, g, other or unknown
  misc_feature (589)..(589): "n" may be a, t, c, g, other or unknown
  misc_feature (606)..(606): "n" may be a, t, c, g, other or unknown
  misc_feature (614)..(614): "n" may be a, t, c, g, other or unknown
  misc_feature (646)..(646): "n" may be a, t, c, g, other or unknown
  misc_feature (662)..(662): "n" may be a, t, c, g, other or unknown
  misc_feature (710)..(710): "n" may be a, t, c, g, other or unknown
  misc_feature (714)..(714): "n" may be a, t, c, g, other or unknown
  misc_feature (717)..(717): "n" may be a, t, c, g, other or unknown
cctttgccttcggacttctccggggccagcagccgcccgaccaggggcccggggccacgggctcagccgacgaccatgggctccgtgtccaaccagcagtttgcangtggctgcgccaaggcggcanaacaggcgcccgangaggcgccggaggacncggcccgggcggcggacgancctcagctgctgcacggtgcgggcatctgtaagtggttcaacgtgcgcatggggttcggcttcctgtccatgaccgcccgcgccggggtcgcgctcgaccccccagtggatgtctttgtgcaccagagtaacctgcacatggaagggttccggaacttgaangagggtgaggcagtggganttcacctttaagaaatcagccaagggtctggaaatccatccatgtcaccggacctggtggaaatattctgtattgggantgagangcggccaaaaggaaagagcattgcanaancgccagatctaaaaggagacaggttgctacaacttgtggaaggtctaagatcatcatgcccaaagggaatgcaagcttgcccacccccagcccaaagaaaatgccacttcttgccantaagcatcgagcccatnttggtaanccctccattgttccgccttgaaaagggccccnacccaaggggcccctnacttgcccccacgggggaaaaagcccataccccttaacttttttcccnaagnaantggaaaag

SEQ ID NO: 1993 - DNA, 499 bp, Homo sapiens
  misc_feature (439)..(439): "n" may be a, t, c, g, other or unknown
gacgcagttagtcggctgcaatggcgccggtgaggcggtccgcgaagtggcggcctggtggtattgaggcgcgtggtgaaggggtttccactgtcgggtacaggaataagaatgtgagacagaagacatggcggcctaaccacccgcaagccttcgtggggagcgttcgcgagggacaaggctttgcttttcgaagaaaactgaaaatacagcaaagttacaagaaattgctacggaaggaaaagaaggctcaaacgtcactggaatctcaattcacagatcgatacccagataatctgaaacatctctatttagctgaagaggaaagacataggaagcaagcaagaaaagtcgaccatcctttgtcagaacaagttcaccagccgttgcttgaagaacagtgtagcattgacgagcctttatttggagatcagtgtanctttgaccagcctcagccagaagaacaatgtattaaaacagtaaactcctttacaattcc

SEQ ID NO: 1994 - DNA, 762 bp, Homo sapiens
  misc_feature (515)..(515): "n" may be a, t, c, g, other or unknown
  misc_feature (518)..(518): "n" may be a, t, c, g, other or unknown
  misc_feature (610)..(610): "n" may be a, t, c, g, other or unknown
  misc_feature (707)..(707): "n" may be a, t, c, g, other or unknown
  misc_feature (711)..(711): "n" may be a, t, c, g, other or unknown
  misc_feature (716)..(717): "n" may be a, t, c, g, other or unknown
tatgccttgatgactaaaaggcactagaaaggttgtgtctactaacttcagccctaatcagaacagatgcctagaaggagcatttttgtgacaacttcatagtgattagaatcagtggagaactccatcttagtggcaggaatataatgaaactacccacgcaagaacatggttgaatcacatttgcttgacttagggcaaagtacgaaagagagacaaaagggttctcttggaaacaagaagagtgactccagatgtggcctgaataattgccatgttaagttaatgcaaaagatcagaacagggctacatttgcacaggcagtttctctccgggccgtagttttcactgatgatcacctttcacagcattttccccaaccagcatttcacttagtcttctctatacccagcacctcccccggcacccccggcaagcccactatcacttccgacttccaacgtggcatccgtgagatctgtccacattaggcgaagcagggagaacactgagancancaggatgggtttgggaaagaacatgcctctgggaaacacagcttcctggggaattcacattgaaggccagtccttaccgaagaacaaagatncacccccagggatttcttccattttcttaataaaattttggggaattgctcccattttcccccgaacaggcgaaatttccccccttgaagaaaaacnaatnccttnnaacccctggggttttggccccacccttggttaacttccttccctt

SEQ ID NO: 1995 - DNA, 758 bp, Homo sapiens
  misc_feature (686)..(686): "n" may be a, t, c, g, other or unknown
  misc_feature (699)..(699): "n" may be a, t, c, g, other or unknown
  misc_feature (711)..(711): "n" may be a, t, c, g, other or unknown
  misc_feature (757)..(757): "n" may be a, t, c, g, other or unknown
tctttgccaagactggaaaccctagtagctgaggttcaggcttggaaagaatgtgctgttaatacattcttgactgagaattctccatattctctcttagaggtgctgtgtcctcgatgtgatattggccttttgggattgaaagggaagcagagaaagttaaaggagcccttgccaaatggaaagaaaaaaagcaccaaattagagagtctgagtgacctggagagagctttaactgaaagcaaggagactgcttcagctatggcaactcttggggaagctcgcctaagggaaatggaagccttgcagtctctcagactcgccaatgaagggaaattgctgtcgcctctccaagatgtggatataaaaatctgcctatgtcagaaggccccagctgcccctatgattcaatgtgaactctgcagggatgctttccacaccagttgtgtggcggtacccagtatttcacagggcctgcgaatctggctttgtccccattgtcggaggtcagagaaacctccattagagaaaattctgcccctgctcgcctcccttcagcgtatccgagttcgccttcctgagggagatgcacttcgatatatgattgaaaagaaaccgtggaactggcagcacaagaacccaagccaaactgcttttcgttcaggggaaatcttaaattttgttgncaaagaatccaanttggggctccanggacttgtttattattagccagaattgggcaaagcctccagccaang

SEQ ID NO: 1996 - DNA, 766 bp, Homo sapiens
  misc_feature (619)..(619): "n" may be a, t, c, g, other or unknown
  misc_feature (718)..(718): "n" may be a, t, c, g, other or unknown
  misc_feature (766)..(766): "n" may be a, t, c, g, other or unknown
cttttattacaacattcacagacacagcattaaaggaatgaatatgccaaagttaaaaaagtttttgtgctatttatctcaagcaggctttcgagtaagccgaactcattttgacccaatgggtgtacgcacagatgcacctctgatgcagtttaaatctatccttttaaagtacagcacccccacctacactggaggacagtcagaaagccgtgtccagtcagcatctgaagatacagtaactgaaagagttgaaatgtcagtgaatgacaaagcagaagcaagtggctgcagaagatggtaaacgtagagaagaattggttctcaggtgtctgtatagatggcctaatagttctctataccaactgtagttctttttctgttctttcaattcagtagagtaaaaataaaaaacagtgtcattttcattcagaaactgagcagtttctaacttagctggtttgggagctttgctttccaagttttttttgttttaaggcaaacttaaaattttaatgggaaacatttcatatgaaagccaagtctcactgagatcaccctactgctttaataattcagaaaaattttcacatggcaaaagtgtttgggaattttatgntatgtttatgaaaagccatctttttaacaatttcttaaatccacatctctggccttaaactggattccatgaatggtttaatggtttttccctggtttnggtaagttgttaccaaaaaatggaaagcttgaaaagggctccaccatn

SEQ ID NO: 1997 - DNA, 784 bp, Homo sapiens
  misc_feature (29)..(30): "n" may be a, t, c, g, other or unknown
  misc_feature (655)..(655): "n" may be a, t, c, g, other or unknown
  misc_feature (747)..(747): "n" may be a, t, c, g, other or unknown
  misc_feature (751)..(751): "n" may be a, t, c, g, other or unknown
tggttggttgtgcaagatggatctgtgannctatttcaaattaccccagacaaaatccagtttgaaagaaattttgatcggcagaaaagtcgcatcctgagtctcagctggcatccctctggtacccacattgcagctggttccatagactacattagtgtgtttgatgtcaaatcaggcagcgctgttcataagatgattgtggacaggcagtatatgggcgtgtctaagcggaagtgcatcgtgtggggtgtcgccttcttgtccgatggcactatcataagtgtggactctgctgggaaggtgcagttctgggactcagccactgggacgcttgtgaagagccatctcatcgctaatgctgacgtgcagtccattgctgtagctgaccaagaagacagtttcgtggtgggcacagccgagggaacagtcttccattttcagctggtccctgtgacatctaacagcagtgagaagcagtgggtgcggacaaaaccgttccagcatcacactcatgacgtgcgccactgtggcccacagcccaacagcgctgatatctggaggcactgacacccacttagtctttcgtcctctcatggaagaaggtggaagtaaagaatttacgaatgcccggctcctcccgaaaaaaatccanccttttcccccacccgaatgttctccatcctccctggtttcctaaaaaaaagaaaggccaaggctttcctcccttcctttccccaagttttngccntccattccaacttttaaaaaaacttttttgggg

SEQ ID NO: 1998 - DNA, 500 bp, Homo sapiens
  misc_feature (140)..(140): "n" may be a, t, c, g, other or unknown
  misc_feature (213)..(213): "n" may be a, t, c, g, other or unknown
  misc_feature (265)..(265): "n" may be a, t, c, g, other or unknown
  misc_feature (334)..(334): "n" may be a, t, c, g, other or unknown
  misc_feature (368)..(368): "n" may be a, t, c, g, other or unknown
  misc_feature (467)..(467): "n" may be a, t, c, g, other or unknown
  misc_feature (469)..(469): "n" may be a, t, c, g, other or unknown
  misc_feature (484)..(484): "n" may be a, t, c, g, other or unknown
  misc_feature (487)..(487): "n" may be a, t, c, g, other or unknown
  misc_feature (497)..(497): "n" may be a, t, c, g, other or unknown
ggttacgcctcccagcaatggcgccaccatcggtcccggagtcccagtgatgctctgtgccatagagcccccataacttcactactacgtgatagtaaatccccggcaaaaaccagcagcgccttgcaagcccacgccancccaagcatcccaggactcttctgagacgactccgggctaccagatcggccgtccagttggaatcaaccgatngaggctccgctgcaaactggaatggcgcttggcgtgatgatcggggccggantggcggtggtggtcacggccgtgctcatcctcctggtggtgcggaggctgcgagtgccaaaaaccccanccccggatggcccccggtatcggttccggaaganggacaaagtgctcttctatggccggaagattatgcggaaggtgtcacaatccacctcctccctcgtggatacctctgtctccgccacctcccggccacncntgaggaaagaaactnaanatgctcaacnttg

SEQ ID NO: 1999 - DNA, 754 bp, Homo sapiens
  misc_feature (753)..(753): "n" may be a, t, c, g, other or unknown
agagaaaatgttaaagaggtattggaagattttgctgaagatggtgagaagaagattaaattgcttactggtaaacgcgttcaactggcggaagacctcaagaaagttagagaaattcaagaaaaacttgatgctttcattgaagctcttcatcaggagaaataaattaaaatcgtactcataatcagctctgcatacatctgaagaacaaaaacatcaacgtcttttgtccagcctctttttcttctgctgttccacctttctaaacgtacaataaagtcatgggataaaaataatcgatgtatgttacgggcgctttaaccatcagctgcctctcgaatggaagaacagtggtaatggattaacatcctattttgttgtactaaagtgacaaatcggaataatataattggtatggccattaggttcagtccttgaaagataagaagcttgttctctgtttgttgtcttatttgtggtggcactcgtttaatggattaacttgaggttgctcaatgttcagtttcttttccagaaatacaatgctaggtgttttgaaaattaaaacttatatagcaattgtttaaaagttatcaattggtattattaaaaatccaccagttagccctggcttaaaatcatttgttatgttgttctggtagttattctattccccaagaaaacttatttggaaccatggaataattccagtttttaatatttcccccaccattggaaaaagaaaaaaaattng

SEQ ID NO: 2000 - DNA, 745 bp, Homo sapiens
  misc_feature (670)..(670): "n" may be a, t, c, g, other or unknown
  misc_feature (695)..(695): "n" may be a, t, c, g, other or unknown
  misc_feature (703)..(703): "n" may be a, t, c, g, other or unknown
  misc_feature (724)..(724): "n" may be a, t, c, g, other or unknown
agatccccacgcggcacctggccatgctctcagctctcccgccgcgggatggtgccttgagtgaatgacccccttggagaacattcttccgcatccctcgcctcaagccagcctcagacagaaaactgaagattcagcagatccagtgcttcctgctcctcttctgcccaggaacacgcttgccttccccaaggcttccagaagctctgaggcaggaggcaccaagttctacctcatgtttggaggatcttgctagctatggccctcgtactcggctccctgttgctgctggggctgtgcgggaactccttttcaggagggcagccttcatccacagatgctcctaaggcttggaattatgaattgcctgcaacaaattatgagacccaagactcccataaagctggacccattggcattctctttgaactagtgcatatctttctctatgtggtacagccgcgtgatttcccagaagatactttgagaaaattcttacagaaggcatatgaatccaaaattgattatgacaagattgtctactatgaagcagggattattctatgctgtgtcctggggctgctgtttattattctgatgcctctggtgggggttatttctttttggtattgttgttcgttgcttgttaacaaaatgttgggttgggaanaaaatgcaccaagccgaacagaaanggaaaaantgggggcccttccctgaaagnaaaattgcttttggccaatct

SEQ ID NO: 2001 - DNA, 750 bp, Homo sapiens
  misc_feature (531)..(531): "n" may be a, t, c, g, other or unknown
  misc_feature (534)..(534): "n" may be a, t, c, g, other or unknown
  misc_feature (587)..(587): "n" may be a, t, c, g, other or unknown
  misc_feature (625)..(625): "n" may be a, t, c, g, other or unknown
  misc_feature (629)..(629): "n" may be a, t, c, g, other or unknown
  misc_feature (632)..(632): "n" may be a, t, c, g, other or unknown
  misc_feature (662)..(662): "n" may be a, t, c, g, other or unknown
  misc_feature (719)..(719): "n" may be a, t, c, g, other or unknown
  misc_feature (729)..(729): "n" may be a, t, c, g, other or unknown
  misc_feature (745)..(745): "n" may be a, t, c, g, other or unknown
  misc_feature (750)..(750): "n" may be a, t, c, g, other or unknown
aaacttcaacatggccgaagcaagtagcgccaatctaggcagcggctgtgaggaaaaaaggcatgaggggtcgtcttcggaatctgtgccacccggcactaccatttcgagggtgaagctcctcgacaccatggtggacacttttcttcagaagctggtcgccgccggcagctaccagagattcactgactgctataagtgcttctaccagttgcagcctgcgatgacacagcaaatctatgacaagtttatagctcagttgcagacatctatccgggaggaaatctctgacatcaaagaggaggggaacctagaagctgtcttgaatgccttggataaaattgtggaagaaggcaaagtccgcaaagagcagcctggcgccccagcgggatcccagagaaggatctgcacagtgttatggcaccctacttcctgcagcaacgggacaccctgcggcgccatgtgcagaaacaggaggccgagaaccagcagctggcagatgccgtcctggcagggcggaagcaggtgganganctgcagctacaggtccaggcccagcagcaggcctggcaggctctacacagaanaacagaaggagctggttgctgtgctgaaggaacctgantganganaccgccagccccagaagcagaaggcagtcnaggtcaagaacctgtggtccaacatgcctggcctgggcgggctacctctgaaaaacngctgaaattngttgccaatccatcanccatn

SEQ ID NO: 2002 - DNA, 806 bp, Homo sapiens
  misc_feature (554)..(554): "n" may be a, t, c, g, other or unknown
  misc_feature (565)..(565): "n" may be a, t, c, g, other or unknown
  misc_feature (711)..(711): "n" may be a, t, c, g, other or unknown
  misc_feature (720)..(720): "n" may be a, t, c, g, other or unknown
  misc_feature (794)..(794): "n" may be a, t, c, g, other or unknown
  misc_feature (803)..(803): "n" may be a, t, c, g, other or unknown
  misc_feature (806)..(806): "n" may be a, t, c, g, other or unknown
cacggagtggctacatgaagttctgaaggatgttcagccccgggtcactccacttggctatgtcttgcccagccacgtgactgaggagatgctatgggagtgcaagcagcttggggctcactccccctccaccttgctgaccaccctcatgttctttaataccaagtacttcctattgaagacagtggaccagcacatgaagctggccttctccaaggtcttgcgacagacaaagaagaacccctctaatcccaaggataaaagcacgagtatccggtacttgaaggcccttggaatacaccagactggccagaaagttacagatgacatgtatgcagaacagacggaaaatccagagaatccattgagatgtcccatcaagctctatgatttctacctcttcaaatgcccccagagtgtgaaaggccggaatgacaccttttacctgacacctgagccagtggtggcccccaacagcccaatctggtactcagtccagcctatcagcagagagcagatgggacaaatgctgacgcggatcctggtgataaganaaattcaggangccatcgcagtggccaatgcaagcactatgcactgagatgccttggccatggcacaagaaaaaaccagccaggaaaaaaccagacagactttcacactaaagaaaaaggctccatttttttttttcctttttttattgggtgttanttaccaaancctttccaggctgcttctgtttaaaatataaaaaaaaacttttgcccctttgcatcttcctaaaacctgctgcnggaaaatcnccn

SEQ ID NO: 2003 - DNA, 720 bp, Homo sapiens
  misc_feature (578)..(578): "n" may be a, t, c, g, other or unknown
  misc_feature (696)..(696): "n" may be a, t, c, g, other or unknown
  misc_feature (700)..(700): "n" may be a, t, c, g, other or unknown
  misc_feature (706)..(706): "n" may be a, t, c, g, other or unknown
  misc_feature (711)..(711): "n" may be a, t, c, g, other or unknown
  misc_feature (715)..(715): "n" may be a, t, c, g, other or unknown
attgcttttgctgcttttctggctttccctttcggacatgcgcgctcggagcaaggcgccctcgcactcagcttaccgcgcatgtacgttgccaggggtaacgcaggtagccaaagtggcttgtggagtggcgaccgttagtgaggcggttgctgagacagacgctgaggcgggtaggaggagcccgagccgtaagggaagccgtgatgagagccgtgttgacgtggagagataaagccgagcactgtataaatgacatcgcatttaagcctgatggaactcaactgattttggctgccggaggcagattactggtttatgacacctctgatggcaccttacttcagcccctcaagggacacaaagacactgtgtactgtgtggcatatgcgaaggatggcaagcgctttgcttctggatcagctgacaaaagcgttattatctggacatcaaaactggaaggcattctgaagtacacgcacaatgatgctatacaatgtgtctcctacaatcctattactcatcaactggcatcttgttcctccagtgactttgggttgtggtctcctgaacagaantctgtctccaaacacaaatcaagcagcaagatcatctgctgcagctggacaaatgatggtcagtacctggcgctgggggatgttcaatgggatcatcacatacggaacaaaaatggcnaagnaaaaanttaanatcnaacgg

SEQ ID NO: 2004 - DNA, 848 bp, Homo sapiens
  misc_feature (695)..(695): "n" may be a, t, c, g, other or unknown
  misc_feature (709)..(709): "n" may be a, t, c, g, other or unknown
  misc_feature (764)..(764): "n" may be a, t, c, g, other or unknown
  misc_feature (786)..(786): "n" may be a, t, c, g, other or unknown
  misc_feature (833)..(833): "n" may be a, t, c, g, other or unknown
  misc_feature (841)..(841): "n" may be a, t, c, g, other or unknown
  misc_feature (845)..(845): "n" may be a, t, c, g, other or unknown
acctaagcaagcctgggcaatggcgggcgcccctcccccagcctcgctgccgccttgcagtttgatctcagactgctgtgctggcaatcagcgagactccgtgggcgtaggaccctccgagccaggctgctatccatgtccagggccaaacatgaatcctattgctcttgggagccgctggcttgcttatgcagaaaacaagttgattcgatgtcatcagtcccgtggtggagcctgtggagacaacattcagtcttatactgccacagtcattagtgctgctaaaacattgaaaagtggcctgacaatggtagggaaagtggtgactcagctgacaggcacactgccttcaggtgtgacagaagatgatgttgccatccacagtaattcacggcggagtcctttggtcccaggcatcatcacagttattgacaccgaaaccgttggagagggccaggtgcttgtgagtgaggattctgacagtgatggcattgtggcccacttccctgcccatgaaaagccagtgtgctgcatggcttttaatacaagtggaatgcttctagtccaacagacacccttggccatgactttcatgtcttccaaattctgactcatccttggtcagtactctccggggtacttcccacgttttccccatcaacccttaatggttggccaaccttgttgttcgtacncatatgtcaccacnaattattgaatcccattgaacccgtttccaaaaaaaattgctgggaactggaaanaaaattgaaacaaagaaattgnacgttctaaaccaaaggaaggtcccttgtttacccctgtttccaagnttcttatnaaancca

SEQ ID NO: 2005 - DNA, 859 bp, Homo sapiens
  misc_feature (651)..(651): "n" may be a, t, c, g, other or unknown
  misc_feature (682)..(682): "n" may be a, t, c, g, other or unknown
  misc_feature (715)..(715): "n" may be a, t, c, g, other or unknown
  misc_feature (730)..(730): "n" may be a, t, c, g, other or unknown
  misc_feature (789)..(789): "n" may be a, t, c, g, other or unknown
  misc_feature (792)..(792): "n" may be a, t, c, g, other or unknown
  misc_feature (800)..(800): "n" may be a, t, c, g, other or unknown
  misc_feature (840)..(840): "n" may be a, t, c, g, other or unknown
  misc_feature (854)..(854): "n" may be a, t, c, g, other or unknown
cacagctatgaataagctttcaggttttattaaaacctagaggaaaaaatcaggaatgacctgaatctcaacccaaatattaaacaaaatccacataatccctcatttcaatttccaattccattaagggaccctctctttttggatggcagagatggttttttaatgaaatcccaccatctatctgagtgagtctggcaggctttttagttcctgagttaaatttgtaatagaaccaaggcaatgctgctgactttgatatgtatgactcagtctttcaatatgtggttttcaaaaaattgttgaagacgtgacttcatagcaatatatagagaataaattaaaatcagcagattgagttttcaacattgcaaaatcagttttttacctctttcctaccaatttcacattttgcagaaacttgttcacatttccaacaatatcagaattagaaaacagttcagataacaagaaagattaagaattagggaaattctgatatcaccataaagcactattttacatttagagattacatttaagataaagtcatcatacacaaaaacaataaatatttataactttctctataaggtccgcatatactgtatatattgaaacaatctgaatgactagtagatttcatatgancattgttatttccactttctccaatacttgntattttatgctacatgttaatgaaagttggganctttttattatttantaattcctatatgttcccaatacttttcattttccaaaatgaatggctctattgtttcntgnttgtttcnaaccaatatatctccatgaaaaatatgccctcctgtttcntattggaaaaattntaaaa

SEQ ID NO: 2006 - DNA, 756 bp, Homo sapiens
  misc_feature (494)..(494): "n" may be a, t, c, g, other or unknown
  misc_feature (586)..(586): "n" may be a, t, c, g, other or unknown
  misc_feature (640)..(640): "n" may be a, t, c, g, other or unknown
  misc_feature (669)..(669): "n" may be a, t, c, g, other or unknown
  misc_feature (696)..(696): "n" may be a, t, c, g, other or unknown
  misc_feature (732)..(732): "n" may be a, t, c, g, other or unknown
  misc_feature (741)..(741): "n" may be a, t, c, g, other or unknown
aggcgctcaggagcgctagggtttgaggcctgctttctgctcgcgccagcagagcactacctgaggcagcgaggcgcagcgagcctagcctccccgcgccctgggcagtgtggccatggagaatcaggtgttgacgccgcatgtctactgggctcagcgacaccgcgagctatatctgcgcgtggagctgagtgacgtacagaaccctgccatcagcatcactgaaaacgtgctgcatttcaaagctcaaggacatggtgccaaaggagacaatgtctatgaatttcacctgaagttcttagaccttgtgaaaccagagcctgtttacaaactgacccagaggcaggtaaacattacagtacagaagaaagtgagtcagtggtgggagagactcacaaagcaggaaaagcgaccactgtttttggctcctgactttgatcgttggctggatgaatctgatgcggaaatggagctcagagctaagggaagaagancgcctaaataaactccgactgggaaagcgaaggctctccttgaaactcttacaaacttaagggaaaggatacctgtttatgtataatcttgntgccaattcttgggggattctcctgggaatcttttgttcaaccctgactgttgncgaattctgttatccttgggggaaaaaanaattcctttttaatgacacatttccantaacttggttgggcttgaacattgaatgttattttncttgcccanaattgcttggggcaa

SEQ ID NO: 2007 - DNA, 753 bp, Homo sapiens
  misc_feature (439)..(439): "n" may be a, t, c, g, other or unknown
  misc_feature (517)..(517): "n" may be a, t, c, g, other or unknown
  misc_feature (631)..(631): "n" may be a, t, c, g, other or unknown
  misc_feature (660)..(660): "n" may be a, t, c, g, other or unknown
  misc_feature (688)..(688): "n" may be a, t, c, g, other or unknown
  misc_feature (741)..(741): "n" may be a, t, c, g, other or unknown
aactccaggagctagcagcgggcgcggaccgggcagtttccgcgctcagcacaggcagctcgcggtcatgggcggctcagcctccagccagctggacgagggcaagtgcgcttacatccgagggaaaactgaggctgccatcaaaaacttcagtccctactacagtcgtcagtactctgtggctttctgcaatcacgtgcgcactgaagtagaacagcaaagagatttaacgtcacagtttttgaagaccaagccaccattggcgcctggaactattttgtatgaagcagagctatcacaattttctgaagacataaagaagtggaaggagagatacgttgtagttaaaaatgattatgctgtggagagctatgagaataaaggggcctatcagagaggagctgctcctaaatgtcgaattcttccagccggtggcaangtgttaacctcagaagatgaatataatctgttgtctgacaggcatttcccagaccctcttgcctccagtgagaagganaacactcagccctttgtggtcctgcccaagggaattcccagtgttacctgttggcagcccttcttcagacaccggcttacttctgcttccacgaaggctgctggacccagaaanaaagttttaattggccctccttggaattngacttgccgttcagggcattctccaatncattgaaattaccttgaaaagccagaatgaacatttttggaaagccccaaagnccctttttttaa

SEQ ID NO: 2008 - DNA, 753 bp, Homo sapiens
  misc_feature (574)..(574): "n" may be a, t, c, g, other or unknown
  misc_feature (746)..(746): "n" may be a, t, c, g, other or unknown
gcgatctttaagtgactgaggcagatccccacgcggcacctggccatgctctcagctctcccgccgcgggatggtgccttgagtgaatgacccccttggagaacattcttccgcatccctcgcctcaagccagcctcagacagaaaactgaagattcagcagatccagtgcttcctgctcctcttctgcccaggaacacgcttgccttccccaaggcttccagaagctctgaggcaggaggcaccaagttctacctcatgtttggaggatcttgctagctatggccctcgtactcggctccctgttgctgctggggctgtgcgggaactccttttcaggagggcagccttcatccacagatgctcctaaggcttggaattatgaattgcctgcaacaaattatgagacccaagactcccataaagctggacccattggcattctctttgaactagtgcatatctttctctatgtggtacagccgcgtgatttcccagaaagatactttgagaaaattcttacagaaaggcatatgaatccaaaattgattatgacaaagattgtctactaatgnaagcagggattattctatggctgttgtcctgggggctgctgttttattattcctgaatgcctcctggggtggggggtatttcctttttgttatgttgttcgttggcttgttaaacaaaattgttggttgggaaaaaaaattgccacccaagcgaacaagaaaaggaaaaaantgggggc

SEQ ID NO: 2009 - DNA, 769 bp, Homo sapiens
  misc_feature (500)..(500): "n" may be a, t, c, g, other or unknown
  misc_feature (520)..(520): "n" may be a, t, c, g, other or unknown
  misc_feature (559)..(559): "n" may be a, t, c, g, other or unknown
  misc_feature (586)..(586): "n" may be a, t, c, g, other or unknown
  misc_feature (596)..(596): "n" may be a, t, c, g, other or unknown
  misc_feature (629)..(629): "n" may be a, t, c, g, other or unknown
  misc_feature (672)..(672): "n" may be a, t, c, g, other or unknown
  misc_feature (744)..(744): "n" may be a, t, c, g, other or unknown
  misc_feature (752)..(752): "n" may be a, t, c, g, other or unknown
  misc_feature (759)..(759): "n" may be a, t, c, g, other or unknown
  misc_feature (762)..(762): "n" may be a, t, c, g, other or unknown
gctggagagggggcgctgagctgttgggatgagctttgatccaaaccttctccacaacaatggacataatgggtaccctaatggtacttcagcagcactgcgtgaaactggggttattgtaaaactgttaacctcttacggatttattcagtgttcagaacgtcaagctagacttttcttccactgttcacagtataatggcaacctgcaagacttaaaagtaggagatgatgttgaatttgaagtatcatcggaccgacggactgggaaacccattgctgttaaactggtgaagataaaacaagaaatcctccctgaagaacgaatgaatggacaagaagtgttttatctgacttacacccctgaagatgtcgaagggaacgttcagctggaaactggagataaaataaactttgtaattgataacaataaacatactggtgctgtaagtgctcgcaacattatgctgttgaaaaagaaacaagcccgctgtcagggantagtttgtgccatgaaggangcatttggctttattgaaagaagtgatgttgtaaaaganatattctttcactatagtgaatttaanggtgacttanaaaccttacagcctggcgatgatgtggaattcncaatcaaggacagaaatggtaaagaaattgcaacagatgtcanactattgcctccaggaacagtcatttttgaaaaatatcacattgaacattttgaaaggaactgttaccaaanttatcccnaaaattnccngttaaaa

SEQ ID NO: 2010 - DNA, 884 bp, Homo sapiens
  misc_feature (243)..(243): "n" may be a, t, c, g, other or unknown
  misc_feature (549)..(549): "n" may be a, t, c, g, other or unknown
  misc_feature (580)..(580): "n" may be a, t, c, g, other or unknown
  misc_feature (602)..(602): "n" may be a, t, c, g, other or unknown
  misc_feature (609)..(609): "n" may be a, t, c, g, other or unknown
  misc_feature (698)..(698): "n" may be a, t, c, g, other or unknown
  misc_feature (705)..(705): "n" may be a, t, c, g, other or unknown
  misc_feature (770)..(770): "n" may be a, t, c, g, other or unknown
  misc_feature (819)..(819): "n" may be a, t, c, g, other or unknown
  misc_feature (833)..(833): "n" may be a, t, c, g, other or unknown
  misc_feature (851)..(851): "n" may be a, t, c, g, other or unknown
  misc_feature (853)..(853): "n" may be a, t, c, g, other or unknown
  misc_feature (875)..(875): "n" may be a, t, c, g, other or unknown
tttaaaaagccccacacaacaaaatggaaacatacatgtacaactcctgtgagggctggagtcttggggttcaggaggaggttagaagttacaggcatctcttcaggcttgcttggtacttggcacacacaggatggtgttttaaagagtgggctgcaccccccacacgccatttacatcagcttcataaacacttttcttcctccctgtaacttaaccttttttcccttttatgaagttganaggctttatgaaataagtttgcattgcacatccgtgcagaaatctttctgactttgaaattttcaggacgtcagctgtcagatacgaaaggtagatatcaggtaagaatctggacttaggaaatagtcacaaaactgtcataggttgtaattttatcaacattcgcttctagtaaaattaaagtcaattaagaaatagaacttgggtcaaaattctgttacaaagcttcataatttgtcccgaagcatatggtggagcattctgagaaatttgctttttgtgtgtttgacattcctaatttgggantccttcagctgaattactattcttttagaanttgagacagcaggtaagcaaangaactanttcatgttaacatggacatcatgatggctatttaaaaaatatttgttctacaccttctcccctgaagcttgggggaatgttttcaaccncttgcantttctctgctcatggaaagtcttgtttggatctgttgctgggcggctgaaacatttaatgtttancccattgaaccatgaactttgccgctcctttttaaggggccaaaattcngggcccatccttanttaattggggcctgaaangnccttcccaaaaaccttttaatnttcccccct

SEQ ID NO: 2011 - DNA, 787 bp, Homo sapiens
  misc_feature (647)..(647): "n" may be a, t, c, g, other or unknown
  misc_feature (699)..(699): "n" may be a, t, c, g, other or unknown
  misc_feature (707)..(707): "n" may be a, t, c, g, other or unknown
  misc_feature (733)..(733): "n" may be a, t, c, g, other or unknown
  misc_feature (751)..(751): "n" may be a, t, c, g, other or unknown
  misc_feature (780)..(780): "n" may be a, t, c, g, other or unknown
agcgatccgaggcccggccccggccccgccccgcgccgcgccgcgccgcttgccgccgggctagcactgacgtgtctctcggcggagctgctgtgcagtggaacgcgctgggccgcgggcagcgtcgcctcacgcggagcagagctgagctgaagcgggacccggagcccgagcagccgccgccatggcaatcaaatttctggaagtcatcaagcccttctgtgtcatcctgccggaaattcagaagccagagaggaagattcagtttaaggagaaagtgctgtggaccgctatcaccctctttatcttcttagtgtgctgccagattcccctgtttgggatcatgtcttcagattcagctgaccctttctattggatgagagtgattctagcctctaacagaggcacattgatggagctagggatctctcctattgtcacgtctggccttataatgcaactcttggctggcgccaagataattgaagttggtgacaccccaaaagaccgagctctcttcaacgggagcccaaaagttatttggcatgatcattactatcggccagtctatcgtgtatgtgatgaccgggatgtatggggaccttctgaaatgggtgctgggaatttgcctgctaatcaccattcanctctttgttgctggcttaattgtcctacttttggatgaactcctgcaaaaangatatggncttgggctctggtatttctctcttcnttgcaactaacatctgtnaaaaccatccttttgggaaaggattccanccccact

SEQ ID NO: 2012 - DNA, 523 bp, Homo sapiens
  misc_feature (469)..(469): "n" may be a, t, c, g, other or unknown
  misc_feature (475)..(475): "n" may be a, t, c, g, other or unknown
  misc_feature (495)..(495): "n" may be a, t, c, g, other or unknown
  misc_feature (504)..(504): "n" may be a, t, c, g, other or unknown
  misc_feature (510)..(510): "n" may be a, t, c, g, other or unknown
gtaacagggcggagcgcgcacctgggcacctgggcagccgccgcggcgctggctagacgtgcgcgatggagggcgacggcgggaccccatgggccctggcgctgctgcgcaccttcgacgcgggcgagttcacgggctgggagaaagtgggctcgggcggcttcgggcaggtgtacaaggtgcgccatgtccactggaagacctggctggccatcaagtgctcgcccagcctgcacgtcgacgacagggagcgcatggagcttttggaagaagccaagaagatggagatggccaagtttcgctacatcctgcctgtgtatggcatctgccgcgaacctgtcggcctggtcatggagtacatggagacgggctccctggaaaagctgctggcttcggagccattgccatgggatctccggttccgaatcatccacgaaacgcggtgggcatgaacttcctgcactgcatnggcccnccactcctgcacctggaacntcaagcccncgaaanatcctgctggata

SEQ ID NO: 2013 - DNA, 851 bp, Homo sapiens
  misc_feature (468)..(468): "n" may be a, t, c, g, other or unknown
  misc_feature (674)..(674): "n" may be a, t, c, g, other or unknown
  misc_feature (725)..(725): "n" may be a, t, c, g, other or unknown
  misc_feature (739)..(739): "n" may be a, t, c, g, other or unknown
  misc_feature (807)..(807): "n" may be a, t, c, g, other or unknown
  misc_feature (813)..(813): "n" may be a, t, c, g, other or unknown
  misc_feature (834)..(834): "n" may be a, t, c, g, other or unknown
  misc_feature (839)..(839): "n" may be a, t, c, g, other or unknown
  misc_feature (843)..(843): "n" may be a, t, c, g, other or unknown
ttgaccaggaatataaaatcaattctcgactacttcagaacattctagatgcaggtttccaaatgcctacgccaatccaaatgcaagccatcccagttatgctgcatggtcgggaacttctggcttctgctccaactggatctggaaaaacattagcttttagcattcctattttaatgcagctgaaacaacccgcaaataaaggcttcagagccctgattatatcaccaacacgagaacttgccagccagattcacagagagttaataaaaatttctgagggaacaggattcagaatacacatgatccacaaagcagcagtggcagccaagaaatttggacctaaatcatctaaaaagtttgatattcttgtgactactccaaatcgactaatctatttattaaagcaagatccccccggaatcgacctagcaagcgttgagtggcttgtagtagacgaatcagatnaactgtttgaagatggcaaaactgggttcagagaccagctggcttccattttcctggcctgcacatcccacaaggtccgaagagctatgttcagtgcaacttttgcatatgatgttgaacagtggtgcaaactcaacctggacaatgtcatcagtgtgtccattgggagcaagggaattctgcagtagaaactgtagaacaagaancttctctttgtttgggatctgaagaacgggaaaacttctggccgtgaaganaacttgttaaaaanggtttcaatccaccttgttcttgtttttgtttcagtcccattgaaaaggggttaaaagaaattttttncatganctcatattttgaaaggtattnaatgntggnatgttatt

SEQ ID NO: 2014 - DNA, 841 bp, Homo sapiens
  misc_feature (754)..(754): "n" may be a, t, c, g, other or unknown
  misc_feature (765)..(765): "n" may be a, t, c, g, other or unknown
  misc_feature (793)..(793): "n" may be a, t, c, g, other or unknown
  misc_feature (803)..(803): "n" may be a, t, c, g, other or unknown
  misc_feature (815)..(815): "n" may be a, t, c, g, other or unknown
tcttctgtcctctgaagcagtgcttcctgacctgaccgatgaacttgcccctgtttttctccttcgatggttctactctgcttctgactacatctcagactgctgggatagcatttttcacaacaactggagggaaatgatgcccctgctgtccctgatcttctctgccctcttcatcctcttcggcactgtcatcgttcaggctttcagcgactctaatgatgagcgagagtcaagccctccagaaaaagaggaagcccaagagaagactgggaaaactgagccaagcttcaccaaagaaaacagcagcaagattcctaaaaaaggctttgtggaggtaactgaactcacagatgtaacatacaccagtaacttggtacgtctgaggccaggccacatgaatgtggtcctcatcctgtcgaattctaccaagaccagcctactacagaaatttgctttggaggtctacacatttactgggagcagctgcctacacttctccttcctgagtctagataaacacagagaatggctagaatacttactagaatttgctcaagatgcagctccaatcccaaaccaatatgataagcatttcatggagcgtgactacactggttatgtactggctctgaatggccacaagaaatacttctgcctcttcaagccccaaaagacagtcgaagaagaagaaccatagggtcctgcagtgatgttgactcttccctctacctgggtgaatctcgaaggaaancttcctgttgncttggattcaagcccatccaaaggaaanttgaaccaanctctcttttatngaattggaacccctgctgggaagggc

SEQ ID NO: 2015 - DNA, 424 bp, Homo sapiens
  misc_feature (24)..(24): "n" may be a, t, c, g, other or unknown
  misc_feature (267)..(267): "n" may be a, t, c, g, other or unknown
  misc_feature (329)..(329): "n" may be a, t, c, g, other or unknown
  misc_feature (377)..(377): "n" may be a, t, c, g, other or unknown
  misc_feature (384)..(384): "n" may be a, t, c, g, other or unknown
  misc_feature (394)..(394): "n" may be a, t, c, g, other or unknown
  misc_feature (421)..(421): "n" may be a, t, c, g, other or unknown
atcgctctcccgggcttagaaggnccggctactgacgcgcagtgccagaccttacccctcacggtccttaagtctcggtcgccctcgcctcgcagcctgccacccgcgctcagctgcccgcctcctcagccagccatgctggagcatctgagctcgctgcccacgcagatggattacaagggccagaagctagctgaacagatgtttcagggaattattcttttttctgcaatagttggatttatctacgggtacgtggctgaacanttcgggtggactgtctatatagttatggccggatttgctttttcatgtttgctgacacttcntccatggcccatctatcgccggcatcctctcaagtggttacccgttcnacaatcnagcacagacnacaagaaaccaggggaaagaaaaattnaga

SEQ ID NO: 2016 - DNA, 669 bp, Homo sapiens
  misc_feature (466)..(466): "n" may be a, t, c, g, other or unknown
  misc_feature (603)..(603): "n" may be a, t, c, g, other or unknown
  misc_feature (611)..(611): "n" may be a, t, c, g, other or unknown
  misc_feature (619)..(619): "n" may be a, t, c, g, other or unknown
  misc_feature (652)..(652): "n" may be a, t, c, g, other or unknown
  misc_feature (662)..(662): "n" may be a, t, c, g, other or unknown
tgggcgatccgctcgtattgaagggggaagagacctgggaaattaagtttcttgcggagtacggtggggattgcagctgctgagcagggattctggaaagcattgcgtacctgagcccccagcatggcgggcctaaagcggcgggcaagccaggtgtggccagaagagcatggtgagcaggaacatgggctgtacagcctgcaccgcatgtttgacatcgtgggcactcatctgacacacagagatgtgcgcgtgctttctttcctctttgttgatgtcattgatgaccacgagcgtggactcatccgaaatggacgtgacttcttattggcactggagcgccagggccgctgtgatgaaagtaactttcgccaggtgctgcagctgctgcgcatcatcactcgccacgacctgctgccctacgtcaccctcaagaggagacgggctgtgtgccctgatcttgtanacaagtatctggaggagacatcaattcgctatgtgacccccagagccctcagtgatccagaaccaaggcctccccagccctctaaaacagtgcctccccactatcctgtggtgtgttgccccacttcgggtcctcanatgtgtancaagcggncagcccgaaggaaaaccacacttggggaaccancgaaaacccngaagccc

SEQ ID NO: 2017 - DNA, 774 bp, Homo sapiens
  misc_feature (564)..(564): "n" may be a, t, c, g, other or unknown
  misc_feature (582)..(582): "n" may be a, t, c, g, other or unknown
  misc_feature (676)..(676): "n" may be a, t, c, g, other or unknown
  misc_feature (702)..(702): "n" may be a, t, c, g, other or unknown
  misc_feature (714)..(714): "n" may be a, t, c, g, other or unknown
  misc_feature (724)..(724): "n" may be a, t, c, g, other or unknown
  misc_feature (758)..(758): "n" may be a, t, c, g, other or unknown
aggccagctatggcccccgacccggtggccgccgggaccgcggctcagggacctaccccgcgctacttcacctgggacgaggtggcccagcgctcagggtgcgaggagcggtggctagtgatcgaccgtaaggtgtacaacatcagcgagttcacccgccggcatccagggggctcccgggtcatcagccactacgccgggcaggatgccacggatccctttgtggccttccacatcaacaagggccttgtgaagaagtatatgaactctctcctgattggagaactgtctccagagcagcccagctttgagcccaccaagaataaagagctgacagatgagttccgggagctgcgggccacagtggagcggatggggctcatgaaggccaaccatgtcttcttcctgctgtacctgctgcacatcttgctgctggatggtgcagcctggctcaccctttgggtctttgggacgtcctttttgcccttcctcctctgtgcggtgctgctcagtgcagttcaagcccaagctggctggctgcagcatgactttgggcacctgtcngtcttcagcacctcaaantggaaccatctgctacatcattttgtgattggccacctgaaaggggcccccgccaatttggtggaaccacatgcacttccagcaccatgccaancccaactgcttccgcaaaagacccanaaattcaacatngcatcccttncttcctttgccttgggggaaaaatcctctctgtnggaacttggggaaacc

SEQ ID NO: 2018 - DNA, 762 bp, Homo sapiens
  misc_feature (446)..(446): "n" may be a, t, c, g, other or unknown
  misc_feature (600)..(600): "n" may be a, t, c, g, other or unknown
  misc_feature (629)..(629): "n" may be a, t, c, g, other or unknown
  misc_feature (679)..(679): "n" may be a, t, c, g, other or unknown
  misc_feature (684)..(684): "n" may be a, t, c, g, other or unknown
  misc_feature (706)..(706): "n" may be a, t, c, g, other or unknown
  misc_feature (719)..(719): "n" may be a, t, c, g, other or unknown
  misc_feature (741)..(741): "n" may be a, t, c, g, other or unknown
ggagaccgaacatggcgaccgcgcgcaccttcgggcccgagcgggaagccgagccggccaaggaagcgcgcgtcgtgggctcggagcttgtggacacttatacggtttacatcatccaggtcactgatggcagccatgagtggacagtaaagcaccgctacagcgacttccatgacctgcatgaaaagctcgttgcagagagaaagattgataaaaacctgcttctgcccaaaaagataattgggaaaaactcaagaagcttggtggagaagagggagaaggatctggaggtctacctccagaagctcctggctgccttccctggcgtgacccccagagtactggcccacttcttgcattttcacttctatgagataaatggcatcaccgcggcactggctgaagagctctttgagaaaggagaacagctcctgggggccggcgangtctttgccattggacccctgcagctgtatgccgtcacggagcagctgcagcagggaaagcccacgtgcgccagtggggatgccaagaccgacctcgggcacatcctggacttcacctgtcgccttaagttccttaaggtttctggcacagaangaccttttgggaccagcaacattcaggancactcctgccgttcgacctatcaatattcaagtccctgcatcaggtgganataantcctgtgatgcttaacacatcnaaagggctggtcncatccaaacccaccttaacccnccctgaatttttcgcttctca

SEQ ID NO: 2019 - DNA, 580 bp, Homo sapiens
  misc_feature (516)..(516): "n" may be a, t, c, g, other or unknown
  misc_feature (528)..(528): "n" may be a, t, c, g, other or unknown
  misc_feature (532)..(532): "n" may be a, t, c, g, other or unknown
  misc_feature (548)..(548): "n" may be a, t, c, g, other or unknown
  misc_feature (552)..(552): "n" may be a, t, c, g, other or unknown
aagttctgccttgtctccgccgcgggtcaggggtgagagctggaatctctgcacgggccttggaaaacgactgtcttcttctgccaaaatgtcaggaattggaaataaaagagcagctggagaacctggcacctccatgcctcctgagaagaaggcagctgttgaagattcagggaccacagtggaaacaattaagctaggaggtgtctcttcaacggaggaactagacattagaacactgcaaaccaaaaaccgcaagctggcagaaatgttggatcagcggcaggccattgaagatgaacttcgtgagcacattgaaaaactggaacgacgacaggccactgatgatgcctcactattgattgtcaaccgatactggagtcagtttgatgaaaacatccgtatcatccttaaacgttatgatctggagcagggcttgggagacctactcacagaacgaaaagcccttgttgtgcctgaaccagaaccagactctgatagcaatcagggagcgtnaagatgaccganaganaagggaagggcaaganccanctttctctttccttgctactttgggcca

SEQ ID NO: 2020 - DNA, 673 bp, Homo sapiens
  misc_feature (423)..(423): "n" may be a, t, c, g, other or unknown
  misc_feature (467)..(467): "n" may be a, t, c, g, other or unknown
  misc_feature (625)..(625): "n" may be a, t, c, g, other or unknown
  misc_feature (652)..(652): "n" may be a, t, c, g, other or unknown
  misc_feature (664)..(664): "n" may be a, t, c, g, other or unknown
  misc_feature (668)..(668): "n" may be a, t, c, g, other or unknown
  misc_feature (672)..(672): "n" may be a, t, c, g, other or unknown
gagactggcgtccggtgtgcaggtggccacatgggatcctggcagccggtggcggaacctgcccagcgggcctagcctaaagcacttgactgacccctcttatggaatcccgcgggaacagcaaaaggcagcgttgcaggagctgacgcgggcgcacgtggagtccttcaactacgctgtgcacgagggtctcggcctcgcggtgcaggctgatatcaactgggcagtgaatggaatctcaaaaggaatcattaagcagtttcttggctacgttcccatcatggtgaaatccaagctttgcaacttacgtaaccttcccccacaagccctcattgagcaccatgaggaggcagaggaaatggggggctattttataatcaatggcattgaaaaagtcatccgaatgttgattatgcctcgganaaattttcccattgcaatgataagaccaaaatggaaaaccaganggcctggttatactcagtatggaatttcaatgcactgtgtgagggaagaacattccgctgtcaatatgaacctccactacttggaaaatggcacagttatgttgaactttatttaccgaaaagaactgttctttcgtcctttgggatttgcacttaangcacttgtcagcttttctgattatcanatctttcagganctcntccna

SEQ ID NO: 2021 - DNA, 576 bp, Homo sapiens
  misc_feature (91)..(91): "n" may be a, t, c, g, other or unknown
  misc_feature (119)..(119): "n" may be a, t, c, g, other or unknown
  misc_feature (362)..(362): "n" may be a, t, c, g, other or unknown
  misc_feature (473)..(473): "n" may be a, t, c, g, other or unknown
  misc_feature (515)..(515): "n" may be a, t, c, g, other or unknown
  misc_feature (542)..(542): "n" may be a, t, c, g, other or unknown
  misc_feature (554)..(554): "n" may be a, t, c, g, other or unknown
  misc_feature (557)..(557): "n" may be a, t, c, g, other or unknown
  misc_feature (575)..(575): "n" may be a, t, c, g, other or unknown
gagacttgttggccgcggagactgcgaccctcttctctcagtctgccttactaccatgccgctctacgagggcctggggagcggcgggganaagacggcggtcgtgatcgacctggganaggcctttaccaagtgtggatttgctggagaaactggtccaagatgtataattcctagtgtgataaaaagagctgggatgcctaagcctgtcagagttgttcagtataatatcaatacagaagaattatattcctacctaaaggaattcatccacatactatatttcaggcatctattggtgaatcccagagaccgccgagttgtgattatcgaatcggtattatgtccttctcacttcaganagacactcactcgtgttcttttcaaatattttgaggttccatctgtcttgcttgctccaagtcatctaatggctcttctgacgcttggaattaattctgccatggtcctanattgtggatatagggaaagcctggtgttacccatatatgaangaatcccagttctaaattgttggggancactacccctangangaaaagctcttcacaaana

SEQ ID NO: 2022 - DNA, 605 bp, Homo sapiens
  misc_feature (572)..(572): "n" may be a, t, c, g, other or unknown
  misc_feature (575)..(575): "n" may be a, t, c, g, other or unknown
  misc_feature (577)..(577): "n" may be a, t, c, g, other or unknown
  misc_feature (589)..(589): "n" may be a, t, c, g, other or unknown
  misc_feature (598)..(598): "n" may be a, t, c, g, other or unknown
aaagtcatggaggccatggggttggattgaaaccagctttggggggttcgtttccttccttttttgccaaattatactacaggcacatatatgccaaagtcagtgggggaccttccttggagcagaggtttgaatcctattacgactactgcaatctcttcaactacattcttaatgccgatggtcctgctccccttgaactacccaaccagtggctctgggatattatcgatgagttcatctaccagtttcagtcattcagtcagtaccgctgtaagactgccaagaagtcagaggaggagattgactttcttcgttccaatcccaaaatctggaatgttcatagtgtcctcaatgtccttcattccctggtagacaaatccaacatcaaccgacagttggaggtatacacaagcggaggtgaccctgaaagtgtggctggggagtatgggcggcactccctctacaaaatgcttggttacttcagcctggtcgggcttctccgcctgcactccctgttaggagattactaccaggccatcaaggtgctggagaacatcgaactgaacaanaanantatgttttcccntgttgccanaatgcca

SEQ ID NO: 2023 - DNA, 784 bp, Homo sapiens
  misc_feature (89)..(89): "n" may be a, t, c, g, other or unknown
  misc_feature (253)..(253): "n" may be a, t, c, g, other or unknown
  misc_feature (276)..(276): "n" may be a, t, c, g, other or unknown
  misc_feature (337)..(337): "n" may be a, t, c, g, other or unknown
  misc_feature (373)..(373): "n" may be a, t, c, g, other or unknown
  misc_feature (529)..(529): "n" may be a, t, c, g, other or unknown
  misc_feature (535)..(535): "n" may be a, t, c, g, other or unknown
  misc_feature (564)..(564): "n" may be a, t, c, g, other or unknown
  misc_feature (638)..(638): "n" may be a, t, c, g, other or unknown
  misc_feature (649)..(649): "n" may be a, t, c, g, other or unknown
  misc_feature (659)..(659): "n" may be a, t, c, g, other or unknown
  misc_feature (696)..(696): "n" may be a, t, c, g, other or unknown
  misc_feature (734)..(734): "n" may be a, t, c, g, other or unknown
  misc_feature (746)..(746): "n" may be a, t, c, g, other or unknown
  misc_feature (760)..(760): "n" may be a, t, c, g, other or unknown
  misc_feature (763)..(763): "n" may be a, t, c, g, other or unknown
agtctagttagtatcggcctgttatctccttttgcgcgacacggtctcagctgttccgcctgaggcgagtgacgctggccgccaacgangtatacgtactgggaccctcgccctcagtctcgtctccggcgcggctacctgccccgttttccctgtgagttgacctgctccgggccgcgggccgccaatggcaggggccgctccgaccacggccttcgggcaggcggtgatcggcccgccgggctcagggaanactacgtactgcctgggcatgantgagttcctgcgcgcgctgggccggcgcgtggcggtggtgaacctggacccggccaacgangggctgccgtacgagtgtgccgtggacgtgggcganctggtggggctgggcgacgtgatggacgcgctgcgcctggggcccaacggcggcctgctctactgcatggagtacctggaagccaacctggactggctgcgtgccaagctcgaccccctccgcggccactacttcctcttcgactgcccaggccangtgganctctgcacgcatcacggggccttgcgcancatcttctcccaaatggcgcagtgggacctcaggctgactgccgtccacctcctggattctcactactgcacanaccctgccaanttcatttcantactgttgtacctcccttggccaccatgctgcacgtngaaactgcccacatcaacctcctttcccaagaatgganctcattgaaccnttatggggaaactnggncttcaacctggaactaactac

SEQ ID NO: 2024 - DNA, 631 bp, Homo sapiens
  misc_feature (444)..(444): "n" may be a, t, c, g, other or unknown
  misc_feature (585)..(585): "n" may be a, t, c, g, other or unknown
  misc_feature (600)..(600): "n" may be a, t, c, g, other or unknown
  misc_feature (602)..(602): "n" may be a, t, c, g, other or unknown
  misc_feature (607)..(607): "n" may be a, t, c, g, other or unknown
  misc_feature (628)..(628): "n" may be a, t, c, g, other or unknown
tcctgagatagaaccgtttggttcaatgagggactgtgttgctaagaacgttgggggcaaagccaggctggttccttggcctcggggtttcctgggtcggggacacggtgaagaggctccagcgggacctgcccatcagtcctgggccaggaggggctccaagcagcacccagcggtccgggggagtctcagacccggcatgcgtggctggcagacctgggagagccagggcagggttttgcgttcagagaaggattgccccagagacccgtggtggacttcatgggtgctgagtggcccgtgtgacagtgatgacacgaaggcttcggcgtttgagtgggtgcaggtgcacgccagggcttggtgcttccctgcctggccctggagggagctgggtggcctggcttcaggggaagacaggagccaggacacacgtcagcccancaggtgtggggggtgctgcagccctcggcagtggggtcaggccctgggggatgtttccaatggtgggcagcctggccaggccggagaagacatgttcacgggcatctatcagatgcccccttgaagaagctgggttatttnaaggctgctgcaaantncctangctcaaattctcttttcccancca

SEQ ID NO: 2025 - DNA, 717 bp, Homo sapiens
  misc_feature (319)..(319): "n" may be a, t, c, g, other or unknown
  misc_feature (348)..(348): "n" may be a, t, c, g, other or unknown
  misc_feature (517)..(517): "n" may be a, t, c, g, other or unknown
  misc_feature (648)..(648): "n" may be a, t, c, g, other or unknown
  misc_feature (651)..(651): "n" may be a, t, c, g, other or unknown
  misc_feature (686)..(686): "n" may be a, t, c, g, other or unknown
  misc_feature (703)..(703): "n" may be a, t, c, g, other or unknown
  misc_feature (713)..(713): "n" may be a, t, c, g, other or unknown
aaaaggagccaagaccatggcgaaagccggggataagagcggcagcagcgggaagaaaagtctaaaacggaaagccgctgccgaagaacttcaggaggctgcaggcgctggggatggggcgacggaaaacggggtccaacccccgaaagcggctgcctttccgccaggctttagcatttcggagattaaaaacaaacagcggcgacacttaatgttcacgcggtggaaacagcagcagcggaaggaaaagttggcagctaagaaaaaacttaaaaaagaaagagaggctcttggcgataaggctccaccaaagcctgtncccaagaccattgacaaccagcgagtgtntgatgaaaccacagtagaccctaatgatgaagaggtcgcttatgatgaagctacagatgaatttgcttcttacttcaacaaacagacttctcccaagattctcatcacaacatcagatagacctcatgggagaacagtacgactctgtgaacagctctccacagttatnccaaactcacatgtttattacagaagaagactggctctgaaaaaaattattccacagtgcatcgcaagaagatttcacagacctgattgttattaatgaagatcgtaaaacccaaatggacttattttgantcncttgcccaatggccaactgctccttttaaaatgancatgttcctcttccttnagaaattaanaaaa

SEQ ID NO: 2026 - DNA, 866 bp, Homo sapiens
  misc_feature (334)..(334): "n" may be a, t, c, g, other or unknown
  misc_feature (696)..(696): "n" may be a, t, c, g, other or unknown
  misc_feature (741)..(741): "n" may be a, t, c, g, other or unknown
  misc_feature (814)..(814): "n" may be a, t, c, g, other or unknown
  misc_feature (843)..(843): "n" may be a, t, c, g, other or unknown
  misc_feature (847)..(847): "n" may be a, t, c, g, other or unknown
  misc_feature (851)..(851): "n" may be a, t, c, g, other or unknown
  misc_feature (859)..(859): "n" may be a, t, c, g, other or unknown
aaaaaaaaacgcgcctccgcggaggtagccgttccctgacctagccatggcacagaacactgaaaaccacgaccctgtcggatccatcttaatccagatccatgaagacctttatcagttaaaggagaaattaacaaaattctcacctgaggaaaaaggagagactctagacattcagagtcttgaaacagcaatcaaaaggactgaagtggggttaagaggattttaagtatgatagaacgagggctgattccaccaacagcaaggattacctttcagaatccacccattacacccagagcagctcctctgcatagttttgatgaagcacgtnagattccaactgtagccactttcactatacctcgggaaccacctccatctccagcagaagtgaagttctttcccaagaaacaaagatcaaaggggaaaagcagaaggtcaagaggacatcatgataggaagatttgtgatcctaatccacctgggacagccccagatatgttcctaagaagaaaccagacttaagaataaaagaacacgtgtcaagagaaacctaagaatgacaaagggcatgaaagtcaaaacacctttgagagccctgaaatcactgtggggattatgactttttaatttatgatggtgtcatagacaatacagcccccagacttcttagcattccagggaacattttancttaacttggggaagtattttttctctcttgggaacacgttcaanaaatttctcaggaactatgctattccagaaatccaaattaaaagggaataatttgggtgggcctcccttcccnaattttgaagcttgacgaaataaactttncccnaatntgaacctnccctcca

SEQ ID NO: 2027 - DNA, 760 bp, Homo sapiens
  misc_feature (600)..(600): "n" may be a, t, c, g, other or unknown
  misc_feature (609)..(609): "n" may be a, t, c, g, other or unknown
  misc_feature (647)..(647): "n" may be a, t, c, g, other or unknown
  misc_feature (686)..(686): "n" may be a, t, c, g, other or unknown
  misc_feature (726)..(726): "n" may be a, t, c, g, other or unknown
  misc_feature (734)..(734): "n" may be a, t, c, g, other or unknown
  misc_feature (736)..(736): "n" may be a, t, c, g, other or unknown
  misc_feature (757)..(757): "n" may be a, t, c, g, other or unknown
ataataccaaaaagtctgataaaactctgcaagcaattcagcgtgtaggacaagctgtcaacttggcagttggaagatttgttaaagtaggagaagctatagccaatgaaaactgggatttgaaagaagaaataaatattgcttgtattgaagctaaacaagcaggagaaacaattgcagcacttacagacataaccaacttgaaccatctggaatctgatgggcagatcacaatttttacagacaaaacaggagtgataaaggctgcaagattacttctttcttcagtgacaaaagtgttgttgctggcagaccgagtagtcattaaacagataacaacatcaagaaataaggttctcgcaactatggaaagactagagaaagtgaatagctttcaagagtttgtccaaatattcagtcaatttggaaatgaaatggtggagtttgcacatctgagtggagatagacaaaatgatttgaaagatgaaaagaaaaaggcaaaaatggcagcagctagggcagttcttgaaaagtgtacaatgatgcttctcacagcttcaaagacatgtctgaagcatcctaactgcgaatcagcccatnaaaacaaanaaggagtatttgaccgtatgaaagtggcattggataangtccttgaaattgtgactgactgttaaccgaatggaganactgacatttcatctatcagtatttttactgggaattaanggaattcnanatgaatattgaagctcttccngga

SEQ ID NO: 2028 - DNA, 692 bp, Homo sapiens
  misc_feature (533)..(533): "n" may be a, t, c, g, other or unknown
  misc_feature (612)..(612): "n" may be a, t, c, g, other or unknown
  misc_feature (618)..(618): "n" may be a, t, c, g, other or unknown
  misc_feature (644)..(644): "n" may be a, t, c, g, other or unknown
  misc_feature (661)..(661): "n" may be a, t, c, g, other or unknown
  misc_feature (664)..(664): "n" may be a, t, c, g, other or unknown
tcccccgggtggggccccgggccgaggcgatggcgccctgggcgctcctcagccctggggtcctggtgcggaccgggcacaccgtgctgacctggggaatcacgctggtgctcttcctgcacgataccgagctgcggcaatgggaggagcagggggagctgctcctgcccctcaccttcctgctcctggtgctgggctccctgctgctctacctcgctgtgtcactcatggaccctggctacgtgaatgtgcagccccagcctcaggaggagctcaaagaggagcagacagccatggttcctccagccatccctcttcggcgctgcagatactgcctggtgctgcagcccctgagggctcggcactgccgtgagtgccgccgttgcgtccgccgctacgaccaccactgcccctggatggagaactgtgtgggagagcgcaaccacccactctttgtggtctacctggcgctgcagctggtggtgcttctgtggggcctgtacctggcatggtcaggcctccggttcttccanccctggggtctgtggttgcggtccaacgggctcctgttcgccaccttcctgctgctgtcccacttcttctgtggatggncctcanggtcctggggaaacctctgggctgangaagaagaaaaaggcancancccaactgtttaaggttgcttggaagcc

SEQ ID NO: 2029 - DNA, 914 bp, Homo sapiens
  misc_feature (502)..(502): "n" may be a, t, c, g, other or unknown
  misc_feature (576)..(576): "n" may be a, t, c, g, other or unknown
  misc_feature (581)..(581): "n" may be a, t, c, g, other or unknown
  misc_feature (639)..(639): "n" may be a, t, c, g, other or unknown
  misc_feature (650)..(650): "n" may be a, t, c, g, other or unknown
  misc_feature (656)..(656): "n" may be a, t, c, g, other or unknown
  misc_feature (680)..(680): "n" may be a, t, c, g, other or unknown
  misc_feature (705)..(705): "n" may be a, t, c, g, other or unknown
  misc_feature (747)..(747): "n" may be a, t, c, g, other or unknown
  misc_feature (764)..(764): "n" may be a, t, c, g, other or unknown
  misc_feature (773)..(773): "n" may be a, t, c, g, other or unknown
  misc_feature (818)..(818): "n" may be a, t, c, g, other or unknown
  misc_feature (850)..(850): "n" may be a, t, c, g, other or unknown
  misc_feature (865)..(865): "n" may be a, t, c, g, other or unknown
  misc_feature (884)..(884): "n" may be a, t, c, g, other or unknown
  misc_feature (895)..(895): "n" may be a, t, c, g, other or unknown
cagcaatgagtcggcaattgacttctacaggaagtttggctttgagattattgagacaaagaagaactactataagaggatagagcccgcagatgctcatgtgctgcagaaaaacctcaaagttccttctggtcagaatgcagatgtgcaaaagacagacaactgaacaaattacaaatgaactttcttacacttgcttgtcgccaaataaaagagaggcccattgattcctcccccaccccaacacttttcttttaaagcttttctccctccttgttcttgtttttctttcttcctttccttttttctgagagttttaatacttccaaggactttaaaaaaataatcatgtttgaattgttttctcttatttttgtgaggtggtttgaaggaaggacaaggtagatctgtttagttttgcagttgaagttagatggtcctaaacatttaattgtcaaataatttcaaatttaatgtcctgctttcacattgaagggcagancctacaaaacattgtatatttcaaaagacaaaaagaagcagcagcagtatcttgttctctaattcatagacaanttgantgtgtttctggtactttgggtttttaaacactttggaatactaatccctaaacattgncttcactccanctttantccttctgaacactctctcggganttggaacattgttatccttgttaanaaatactaagcttatgttgaattttaagttattatatcttcnctcctgccggtgggttngggcatttnggttaatgttatactttgggtctaagtttttgaatttaactggcntttttggctaatgaattgggctggttttttancaaggtttgtttttncccgctgtttgaatggttnccaattgggcnttaactttttaaaaaattt

SEQ ID NO: 2030 - DNA, 799 bp, Homo sapiens
  misc_feature (76)..(76): "n" may be a, t, c, g, other or unknown
  misc_feature (566)..(566): "n" may be a, t, c, g, other or unknown
  misc_feature (701)..(701): "n" may be a, t, c, g, other or unknown
  misc_feature (709)..(709): "n" may be a, t, c, g, other or unknown
  misc_feature (785)..(785): "n" may be a, t, c, g, other or unknown
  misc_feature (788)..(788): "n" may be a, t, c, g, other or unknown
  misc_feature (794)..(794): "n" may be a, t, c, g, other or unknown
agggggaaaaatgcggcctttgactgaagaggagacccgtgtcatgtttgagaagatagcgaaatacattgggganaatcttcaactgctggtggaccggcccgatggcacctactgtttccgtctgcacaacgaccgggtgtactatgtgagtgagaagattatgaagctggccgccaatatttccggggacaagctggtgtcgctggggacctgctttggaaaattcactgaaacccacaagtttcggttgcacgtcacagctctggattaccttgcaccttatgccaagggttttggggtggcagccaaatctacacaagactgcagaaaagtagaccccatggcgattgtggtatttcatcaagcagacattggggaatatgtgcggcatgaagagacgttgacttaaaacgaagccattccaaggacagacggctgtatggaaaggccgagctttgtttcctgtgtttgtgtggactccaccatcatgttgaattttgtcaacactctggcctcttcagggacttcttatttactgtactctctatcactgacaaatgcangctggattcttattatatacagagatggctcaaaaatggggtttcagatctttgtgacgaaataaaatactgtttcatatttgaatcagaaggcttcttgttctgaaaaaataagttcaaaatcattggaaccangaaacaanaataacttattgttatctgtgataacactgtcttctaaaacaccaaggatttcttttttattaatatgccacatanacnttgccntaacc

SEQ ID NO: 2031 - DNA, 722 bp, Homo sapiens
  misc_feature (7)..(7): "n" may be a, t, c, g, other or unknown
  misc_feature (380)..(380): "n" may be a, t, c, g, other or unknown
  misc_feature (413)..(413): "n" may be a, t, c, g, other or unknown
  misc_feature (491)..(491): "n" may be a, t, c, g, other or unknown
  misc_feature (503)..(503): "n" may be a, t, c, g, other or unknown
  misc_feature (524)..(524): "n" may be a, t, c, g, other or unknown
  misc_feature (650)..(650): "n" may be a, t, c, g, other or unknown
  misc_feature (652)..(652): "n" may be a, t, c, g, other or unknown
  misc_feature (656)..(656): "n" may be a, t, c, g, other or unknown
  misc_feature (664)..(664): "n" may be a, t, c, g, other or unknown
  misc_feature (718)..(718): "n" may be a, t, c, g, other or unknown
gtccaanatggcggcgtgcggttccgctgtgtgaaacgagcgcggggcggcgggttactcagctccgcggagacgacctccgacgacccgcaacaatgaagggaaaagagcgctcgccagtgaaggccaaacgctcccgtggtggtgaggactcgacttcccgcggtgagcggagcaagaagttagggggctctggtggcagcaatgggagcagcagcggaaagaccgatagcggcggtgggtcgcggcggaatctcctcctggacaagtccagcagtcgaggtggcagccgcgagtatgataccggtgggggcagctccagtagccgcttgcatagttatagctccccgagcaccaaaaattcttcgggcgggggcgantcgcgcagcagctcccggggtggaggcggggantcacgttcctctggggccgcctcctcagctcccggcggcggggacggcgcggaatacaagactctgaagataagcganttggggtcccancttaatgacgaagcggtggangacgcctgtttcatgagttcaaacgcttcggtgatgtaagtgtgaaaatcagtcatctgtcgggttctggcacggggatgaacgggtacctttgtgaacttccggcggccaaaagacgcgcgggcngncaancatgccanaaggccgcctggtgctctatgaaccggcctctgaaaataaaaactgtttttgtnaacc

SEQ ID NO: 2032 - DNA, 772 bp, Homo sapiens
  misc_feature (631)..(631): "n" may be a, t, c, g, other or unknown
  misc_feature (659)..(659): "n" may be a, t, c, g, other or unknown
  misc_feature (704)..(704): "n" may be a, t, c, g, other or unknown
  misc_feature (712)..(712): "n" may be a, t, c, g, other or unknown
  misc_feature (738)..(738): "n" may be a, t, c, g, other or unknown
  misc_feature (743)..(743): "n" may be a, t, c, g, other or unknown
  misc_feature (769)..(769): "n" may be a, t, c, g, other or unknown
ttatgctaacatgaagaaaagagaagggactcagctttcttcccaacagtctgtgatgtctaaacttgcatcatttttgggcttttcaaagcaatctccccaaaaaaagaatcatttggttttggaaaagaaaacagaatcagcaacttttcgggtgtgtggtgaaaatgtcacgtgtgtggaatatgctatctcctggctacaagacctgattgaaaaagaacagtgtccttacaccagtgaagatgagtgcatcaaagactttgatgaaaaggagtatcaggagttgaatgagctgcagaagaagttaaatattaacatttccctggaccataagagacctttgattaaggttttgggaattagcagagatgtgatgcaggctagagatgaaattgaggcgatgatcaagagagttcgattggccaaagaacaggaatcccgggcagattgtatcagtgagtttatagaatggcagtataatgacaataacacttctcattgttttaacaaaatgaccaatctgaaattagaggatgccaggagagaaaagaaaaaaacagttgatgtcaaaattaatcatcggcactacacagtgaacttgaacacatacactgccacagacacaaanggccacagtttatctgttcagcgcctcncgaaatcccaagttgacatccctgcccactgggagtgatatgaancaccaaanttctgtgttgtggaactgctgcctantgatnctgaattacacacggtggccagccanttt

SEQ ID NO: 2033 - DNA, 747 bp, Homo sapiens
  misc_feature (463)..(463): "n" may be a, t, c, g, other or unknown
  misc_feature (686)..(686): "n" may be a, t, c, g, other or unknown
  misc_feature (710)..(710): "n" may be a, t, c, g, other or unknown
  misc_feature (717)..(717): "n" may be a, t, c, g, other or unknown
  misc_feature (721)..(721): "n" may be a, t, c, g, other or unknown
  misc_feature (727)..(727): "n" may be a, t, c, g, other or unknown
aaaaaaaaaaacatcaactctgacctgccaatcatcatatcgattgagaaccactgttcattgcctcagcaacgaaaaatggcagaaattttcaagaccgtgtttggagaaaagctggtgactaaattcttatttgagactgatttctcagatgatccaatgcttccttcacctgaccaactcagaaagaaagttcttcttaaaaacaagaagctaaaagcccatcagacgccagtggatatcttaaagcaaaaggctcatcagttagcatctatgcaagtgcaggcttataatggtggggatgccaacccccgacctgccaataatgaggaagaggaagatgaggaggacgaatatgattatgactatgaatccctttctgatgacaacattctggaagacagacctgaaaataaatcatgtaatgacaagcttcagtttgaatataatgaagaaatccccnagaggataaagaaagcagataactctgcttgcaacaaaggaaaggtttatgatatggaactgggagaagaattttatcttgatcagaataaaaaggaaagcagacagattgcaccagaagctttctgaccttgttatctattgtcaagcagtaaaatttccaggactgtcaactctaaatgcatctggctctagccgaaggaaaagaaaggaaaagccggaantcctttttggcaaccatctgggcngaatgancccngggganacagcatcctttaacaaaac

SEQ ID NO: 2034 - DNA, 550 bp, Homo sapiens
  misc_feature (408)..(408): "n" may be a, t, c, g, other or unknown
  misc_feature (453)..(453): "n" may be a, t, c, g, other or unknown
  misc_feature (503)..(503): "n" may be a, t, c, g, other or unknown
  misc_feature (510)..(510): "n" may be a, t, c, g, other or unknown
  misc_feature (525)..(525): "n" may be a, t, c, g, other or unknown
  misc_feature (530)..(530): "n" may be a, t, c, g, other or unknown
gacatttttggcgccggccccagcctgagcggggacggcggccgggagggcgcggcccgggttcccgttccccgcggagccatgcggtacaacgagaaggagctgcaggctctgtcccggcagccggccgagatggcggccgagctgggcatgaggggccccaagaagggcagcgtgctgaagcggcggctggtgaagctggtggtgaatttcctcttctactttcggacagacgaggccgagcccgtcggagccctgctgctggagcgctgcagagtcgtccgggaagagcccggcaccttctccatcagcttcattgaggaccctgagaggaagtatcactttgagtgcagcagcgaggagcagtgtcaggagtggatggaggctctgcgtcgggccagctacganttcatgcggagaagcctcatcttctacaggaacgaaatccggaangtgacgggcaaggaccccctggaacagttcggcatatccgaagaagccangttccanctgaatggcttgcangcgtnagcgcagggcacggtggtca

SEQ ID NO: 2035 - DNA, 736 bp, Homo sapiens
  misc_feature (490)..(490): "n" may be a, t, c, g, other or unknown
  misc_feature (621)..(621): "n" may be a, t, c, g, other or unknown
  misc_feature (634)..(634): "n" may be a, t, c, g, other or unknown
  misc_feature (658)..(658): "n" may be a, t, c, g, other or unknown
  misc_feature (725)..(725): "n" may be a, t, c, g, other or unknown
  misc_feature (733)..(733): "n" may be a, t, c, g, other or unknown
gtgtgcaatgatggctgggggaatcgtcatgactgccaatctcaacatcaattataaaagacctatccctctttgttctgttgttatgataaatagccaacttgataaagttgaaggaaggaaattttttgtttcctgtaatgttcagagtgttgatgagaagaccctatactcagaggcgacaagcttatttataaagctgaatcctgctaaaagtctgacataaagagctgctggtgaactccatctcattctcgcccctccagaagaagcagttgtcccccaaatactctgctccctcactgctgaatccctgtagggagaagcctgccaacagtgaccttccgaaacagccttctgaatacaaagaggattcagtttccatcttctcaacttgttaacacagaaacacttcctgcgagcatatcgacaactctcgggccaggcgctgtggctcacacctgtaatcccagcactttaggaggccgangcaggcgggattgcctgagctcaggagttcaagatcagtctgggcaacacgatgaaaactccgtctctactaaaatacaaaaaattatccaggcatggtggcgtacgcctgtagtcccagctactcaggangctgaagcagganaattgcttgaacccaggaaggaanaggtgcagtgaagccaagaacatgccacatcactccaacctgggcaacagaacaagaaaccatctcnaacaaacnaac

SEQ ID NO: 2036 - DNA, 721 bp, Homo sapiens
  misc_feature (534)..(534): "n" may be a, t, c, g, other or unknown
  misc_feature (557)..(557): "n" may be a, t, c, g, other or unknown
  misc_feature (569)..(569): "n" may be a, t, c, g, other or unknown
  misc_feature (634)..(634): "n" may be a, t, c, g, other or unknown
  misc_feature (637)..(637): "n" may be a, t, c, g, other or unknown
  misc_feature (695)..(695): "n" may be a, t, c, g, other or unknown
  misc_feature (710)..(710): "n" may be a, t, c, g, other or unknown
  misc_feature (717)..(717): "n" may be a, t, c, g, other or unknown
ggagcgtcgtggaaagcattggacacatttccaccatgctaatggcattttaaatatatttggcaattttcccaattttttactgaagaaaactgtaagtttatacttgaggactgaagtgtgactctgccgattatcaggctttcaagatgaatctggaaaaactcagcaagcctgaactcctgacactatttagtattcttgaaggagagcttgaagcaagggaccttgttatagaagccttaaaggcccaacacagagttactttcattgaagaacgctatggaaaatataacatcagtgatcctttaatggctctacagagagattttgaaacactgaaggagaaaaatgatggcgaaaagcagccagtctgcacaaatccactctctattcttaaggttgtgatgaagcagtgcaagaacatgcaggagcgcatgctgtcccagctggctgctgctgagagcaggcaccgaaaggtgatcctagaccttgaggaagaaaggcagcggcatgcacaggatacggctgaangagatgatgtccctacatgctanagaaggaaaganagaagctgactcaacagttggaatttgaaaaatcccaagtgaaaaagtttgaaaaagaacagaanaanctctctattccgctggaaaaagaacgctcccgccacaagcagctctcatccatgctantgcttgaattgcaanaaagccncaac

SEQ ID NO: 2037 - DNA, 781 bp, Homo sapiens
  misc_feature (459)..(459): "n" may be a, t, c, g, other or unknown
  misc_feature (501)..(501): "n" may be a, t, c, g, other or unknown
  misc_feature (545)..(545): "n" may be a, t, c, g, other or unknown
  misc_feature (572)..(572): "n" may be a, t, c, g, other or unknown
  misc_feature (586)..(586): "n" may be a, t, c, g, other or unknown
  misc_feature (588)..(588): "n" may be a, t, c, g, other or unknown
  misc_feature (718)..(718): "n" may be a, t, c, g, other or unknown
  misc_feature (735)..(735): "n" may be a, t, c, g, other or unknown
  misc_feature (738)..(738): "n" may be a, t, c, g, other or unknown
  misc_feature (770)..(770): "n" may be a, t, c, g, other or unknown
  misc_feature (772)..(772): "n" may be a, t, c, g, other or unknown
atttatgaatgtaatcaagttcaaaagttcatcagccacagttcttcagtttcgccacttcaaagaatttactctggggtcaaaacccacatatttaataaacataggaatgattttgttgattttccattgctgtcacaagaacagaaagcacacattaggagaaaaccttacgaatgtaatgagcagggcaaagtcttcagagtgtcttcaagccttcctaatcatcaagtaatccacactgcagataaacctaacagatgtcatgaatgtggtaaaaccgtcagggacaagtcaggcctcgcagaacattggagaattcgtacagggagagaaaccttacaaatgtaaagagtgtggcaagctcttcaatcgaattgcataccttgcacgacacgagaaagtgcatactggagagagtccttacaaatgtaatgagtgtggcaaggtcttcagtcnaattacataccttgtacgacatcagaaaaattcatactaganaaaaaacctcataaatgtaacaaatgtggcaaggtttatagtancagttcatacctagcacaacattgganaattcatacaggananaaactttacaaatgttaataaatgtggcaaaaaatttagtgggcattcaagcctcaccacccatctgttaatccacactggaaaaaaaccttacaaatgttaagaatgtgacaaagcttttaggcacaanttctccctgacagttcntcnaaaaaatcttaatgggaaaaaaaccttataantntcctgaaat

SEQ ID NO: 2038 - DNA, 780 bp, Homo sapiens
  misc_feature (495)..(495): "n" may be a, t, c, g, other or unknown
  misc_feature (516)..(516): "n" may be a, t, c, g, other or unknown
  misc_feature (543)..(543): "n" may be a, t, c, g, other or unknown
  misc_feature (550)..(550): "n" may be a, t, c, g, other or unknown
  misc_feature (626)..(626): "n" may be a, t, c, g, other or unknown
  misc_feature (653)..(653): "n" may be a, t, c, g, other or unknown
  misc_feature (695)..(695): "n" may be a, t, c, g, other or unknown
  misc_feature (700)..(700): "n" may be a, t, c, g, other or unknown
  misc_feature (704)..(704): "n" may be a, t, c, g, other or unknown
  misc_feature (754)..(754): "n" may be a, t, c, g, other or unknown
  misc_feature (772)..(772): "n" may be a, t, c, g, other or unknown
ttgcccagcaagtgtgtggctatcgactgtgagatggtgggcacgggaccccgagggcgggtaagcgagctggcccgctgttccattgtgagctaccatggcgatgtcctctatgacaagtacatcaggcctgagatgcccatcgctgactaccgtacccgctggagtggcatcactcggcagcacatgcgcaaggctgtccccttccaggtggcccagaaagagatccttaagctcctgaagggcaaggtggtggtggggcacgcgctgcacaacgacttccaggcgctcaagtatgtccaccctcggagccagacccgggataccacctatgtcccaaacttcctcagcgagcccggcctccacacccgggcccgggtctctctaaaggacctggccctgcagctgctgcacaagaagatccaggtgggccagcacgggcactcatcagtagaagatgccacgacagccatggagctctaccggctggtggangtgcagtgggaacagcaggangcccgcagcctctggacctgccccgangacaganaacctgacagcagcacagacatggaacagtacatggaagaacagtactggcccgatgacctggcccacggcagcanaagaagaaccagggaagcacaggacanaaggaattgaaaaaggggcggggctccctggctgggcttccngtgtngccngtaagaaattggggggcaagaaaaacaacgggcactccttccctgggcanggttggggcaggattcanttaaaccc

SEQ ID NO: 2039 - DNA, 629 bp, Homo sapiens
  misc_feature (352)..(352): "n" may be a, t, c, g, other or unknown
  misc_feature (543)..(543): "n" may be a, t, c, g, other or unknown
  misc_feature (577)..(577): "n" may be a, t, c, g, other or unknown
  misc_feature (595)..(595): "n" may be a, t, c, g, other or unknown
  misc_feature (599)..(599): "n" may be a, t, c, g, other or unknown
  misc_feature (615)..(615): "n" may be a, t, c, g, other or unknown
agcggcgggcaggccgggcatggcgtccatggcggcggcgatcgcggcttcgcgctcggcggtcatgagcgggaaccggcctctggacgaccgggagcgaaagcgcttcacttacttctcgtcgctgagccccatggccaggaagatcatgcaggacaaggagaagatccgcgagaagtacgggcccgagtgggcgcggctgccgcccgcgcagcaggacgagatcatcgaccggtgcctggtggggccgcgcgccccggcgccccgagaccccggggactcggaggagctcacgcgcttccccggcttgcgcgggcccacgggccagaaggtggtgcgcttcggggacgangatctaacttggcaagatgagcactctgcccctttctcctgggaaacaaagagtcagatggagttcagtatctccgccctatccatccaggagccgagcaacggcaccgccgccagcgagcccagaccactgtccaaagcttcccagggctcccaggccctcaagtcctcccaaggcagcaggtcctccancctggacgccctgggccccaccaggaaggaagangaagcgtcattctggaanatcnatgctgaacggtcccnaaggggaagggcct

SEQ ID NO: 2040 - DNA, 524 bp, Homo sapiens
  misc_feature (104)..(104): "n" may be a, t, c, g, other or unknown
  misc_feature (121)..(121): "n" may be a, t, c, g, other or unknown
  misc_feature (146)..(146): "n" may be a, t, c, g, other or unknown
  misc_feature (161)..(161): "n" may be a, t, c, g, other or unknown
  misc_feature (178)..(178): "n" may be a, t, c, g, other or unknown
  misc_feature (238)..(238): "n" may be a, t, c, g, other or unknown
  misc_feature (306)..(306): "n" may be a, t, c, g, other or unknown
  misc_feature (345)..(345): "n" may be a, t, c, g, other or unknown
  misc_feature (428)..(428): "n" may be a, t, c, g, other or unknown
  misc_feature (460)..(460): "n" may be a, t, c, g, other or unknown
  misc_feature (476)..(476): "n" may be a, t, c, g, other or unknown
  misc_feature (495)..(495): "n" may be a, t, c, g, other or unknown
  misc_feature (505)..(505): "n" may be a, t, c, g, other or unknown
gtgctcggcgttgagctcctgcagccgccgccgctgcagtggtcgtccctgccctccccggccccggggtgcaccccgcaaggctcccgctggtgtccctggancatgggaggctgctgancgtgagtggcggtgtctggcagganctgcgtggcaggganggcgtccatggctgcanccaacaagggcaacaagcccagagtccggagtatccgctttgcggcaggccacgatgcanaaggatcccacagccacgtccactttgatgaaaaactgcatgactcggtggtcatggtcacccagganagtgacagcagctttctggtcaaggttggcttcctgaanatcctgcacaggtatgagattaccttcactctgcccccactgcacaggctgagcaaggatgtccgcgaggcacctgtccccancctgcacctcaagctcctcagcgtggtgcccntccctgaaagttatantgtcaagtgtgagtactcngcgcacaaanaaggcgtcctcaaagaaga

SEQ ID NO: 2041 - DNA, 855 bp, Homo sapiens
  misc_feature (472)..(472): "n" may be a, t, c, g, other or unknown
  misc_feature (546)..(546): "n" may be a, t, c, g, other or unknown
  misc_feature (574)..(574): "n" may be a, t, c, g, other or unknown
  misc_feature (621)..(621): "n" may be a, t, c, g, other or unknown
  misc_feature (667)..(667): "n" may be a, t, c, g, other or unknown
  misc_feature (669)..(669): "n" may be a, t, c, g, other or unknown
  misc_feature (683)..(683): "n" may be a, t, c, g, other or unknown
  misc_feature (710)..(710): "n" may be a, t, c, g, other or unknown
  misc_feature (725)..(725): "n" may be a, t, c, g, other or unknown
  misc_feature (821)..(822): "n" may be a, t, c, g, other or unknown
  misc_feature (829)..(829): "n" may be a, t, c, g, other or unknown
  misc_feature (835)..(835): "n" may be a, t, c, g, other or unknown
  misc_feature (855)..(855): "n" may be a, t, c, g, other or unknown
gcttgctaaccacaaaacccgccaggccggtgcgggagctgcggagcatccgctgcggtcctcgccgagacccccgcgcggattcgccggtccttcccgcgggcgcgacagagctgtcctcgcacctggatgacagcaggggcgccggggtcctctcgacgccagagagaaatctcatcatccgtgcagccttcttaaagcaaactaagaccagagggaggattatccttgacctttgaagaccaaaactaaactgaaatttaaaatgttcttcgggggagaagggagcttgacttacactttgggaatcagaggcaatgagcccgtatatacttcaactcaagaagactgcattaattcttgctgttcaacaaaaaacatatcaggggacaaagcatgtaacttgatgatcttcgacactcgaaaaacagctagacaacccaactgctacctatttttctgtcccaacgangaagcctgtccattgaaaccagcaaaaggacttatgagttacaggataattacagattttccatctttgaccanaaatttgccaagccaagaattaccccangaagatctctcttacatggccaattttcacaagcatcactcccctancccatcatcacacagattattccaagcccaccgatatctcatggananacacactttctcanaaatttggattctcaagatccttgganaaactatttaagatngatgaaacaattgccactccttgcttataaggaaaaaggccatcctccaaattcccaaattttcctctgatcaaaaaattactcctctgctgcctnnaaaaatnttaatnccctccccactacggtggcn

SEQ ID NO: 2042 - DNA, 577 bp, Homo sapiens
  misc_feature (506)..(506): "n" may be a, t, c, g, other or unknown
  misc_feature (511)..(511): "n" may be a, t, c, g, other or unknown
  misc_feature (515)..(515): "n" may be a, t, c, g, other or unknown
  misc_feature (526)..(526): "n" may be a, t, c, g, other or unknown
  misc_feature (547)..(547): "n" may be a, t, c, g, other or unknown
tggtagacccaatgaaatcgaacctccacccccagagatgccaccgtggcagaagaggcaagatggcccccagcagcaaacaggaggccgaggaggagggagaggtggctatgaacattcctcatacggaggacgaggaggtcatgaacaaggaggcgggagaggtggacgtggtggctatgaccatggtggccgagggggaggaagaggaaataagcatcaaggaggctggacagatggagggagtggtggaggaggtggctaccaagatggtggttatcgagattcaggtttccagccaggtggctatcatggtggccacagcagtggtggctatcaaggcggaggttatggtggcttccaaacatcttcttcatatacaggaagtggataccagggtggtggctaccagcaggacaatagataccaagatggcgggcaccatggtgatcgtggtggtggtcgtggtgggcgaagtggtcgtggaagccgaagtggtcgtgcangccanggangagctggggangaagaaggaccagaattatcnccaagggggtcaatttgaacagcatttcca

SEQ ID NO: 2043 - DNA, 836 bp, Homo sapiens
  misc_feature (678)..(678): "n" may be a, t, c, g, other or unknown
  misc_feature (712)..(712): "n" may be a, t, c, g, other or unknown
  misc_feature (802)..(802): "n" may be a, t, c, g, other or unknown
  misc_feature (809)..(809): "n" may be a, t, c, g, other or unknown
  misc_feature (824)..(824): "n" may be a, t, c, g, other or unknown
gagtctctgaggaaggaatgtgatttggcaagtcagggtactaagcatgggtgggaactcctgccttataaaaattgtttttgtgttcttaaagataatatgttgtttttctgttttttgttttttccattttatggggaatttaaaaaccattcttgtatcagaaggtgaattaggcgcatggtctttgttttattaataatttccactagagggtgttctcaggtcactttgcagtgaagtggacttagttcctccttgttctgtacaaaatgtctccagactttgtaaaggagctgcccagtttggcctcctgtcccgaaaagaccctaataactaggcagagtgttgtcctgctttcttcgtctcgtaggatgtgctatgattggtgccaggcctcactaacacaggggctacctgtctcttattctcagcacctgtgtcctgagatacgctgcctgagacagagagagtccctcattaacagcctgtgtggctgtcagctttttgcctaaattgtgattcagatgcttttgttctctctcctttcacttattgccacagttgaggaaaagtgtcagattaccctgcagcaagacaagccaaggactgggagaaaaaaaaaaccactctggaggcaactgagaaaatcactgcttttggataaggaatcagtanggtgggctgttttccctttggttgaatcctactnagaagtgacaagggaaagggactcccaagccccttttcaaggtaaacttatcaaaggagccccctgaaaaccgggtaagaagggcaactngccaatncccttggggggggantaactcaaaaag

SEQ ID NO: 2044 - DNA, 749 bp, Homo sapiens
  misc_feature (603)..(603): "n" may be a, t, c, g, other or unknown
  misc_feature (614)..(614): "n" may be a, t, c, g, other or unknown
  misc_feature (676)..(676): "n" may be a, t, c, g, other or unknown
  misc_feature (732)..(732): "n" may be a, t, c, g, other or unknown
  misc_feature (742)..(742): "n" may be a, t, c, g, other or unknown
cttgtatataaaaatgctaaatgtacgttgaaacgatacaccaatcagacttttgataaagtgatggggcccatgttggatgctgctacaaggaaacctatctggcgacatgaaatcttagatgcagatggtatttgttctccaggtgagaaagtagaaaacaaacaagtgcttgtaaataagtccatgcccacagtgactcagattcctttggaaggaagtaatgtaccacagcaaccacagtacaaagatgtacccataacctacaaaggagcaacagactcatatattgaaaaagtgatgatatcttcaaatgctgaagatgcttttctgatcaaaatgctgctgagacagacaaggcgtccagaaattggagacaaattcagcagtcgtcatgggcaaaaaggtgtttgtggcttgatcgtcccccaggaagacatgccattttgtgattctggcatctgtccggacatcatcatgaacccacacggcttcccatcacgaatgacggtggggaagctcattgagctgctggctggcaaggccggtgtgctggacggcagattccactacggcactgcgtttggaggcagtaaagtgaangatgtgtgtgnggacctcgtttgccatgggtataactacttggggaaagactatgttacatccggcatcacangtggagcccttataagcatacatctattttgggccccgtgtactatcagaagctgnaacacatggngctagat

SEQ ID NO: 2045 - DNA, 839 bp, Homo sapiens
  misc_feature (568)..(568): "n" may be a, t, c, g, other or unknown
  misc_feature (766)..(766): "n" may be a, t, c, g, other or unknown
  misc_feature (807)..(807): "n" may be a, t, c, g, other or unknown
  misc_feature (833)..(833): "n" may be a, t, c, g, other or unknown
gtttttactgtttgccggaacagcgcacggctcaagttgtcgtctgggatttgagagaagactcaaggctgcattactctgtgacgctgagcgatggcttctggacgttccggaccgccacgttttccaccgatggaatccttacctcagtaaaccaccgaagccctcttcaagcagtagaacctatctcaacgtccgtccacaaaaagcagagctttgtgctttcacccttttctactcaagaagaaatgtcaggtttgtccttccacatcgcttccttggatgagagtggggttctcaatgtatgggtggttgttgaattaccaaaggcagacatcgcaggttcaataagtgatttaggtctgatgcctggagggagggtcaagctggtacatagtgctctgatccagttgggtgacagtctttctcataaaggtaatgaattttggggcactacacaaacactgaatgttaaatttctgccttcagatcctaatcactttattattggcacagacatgggtctcataagccatggcacaagacaagatttgagagtggctcccanactattcaaacctcagcaacatggtataagaccagtgaaagttaatgtcattgatttttcaccatttggagaaccaatatttttgggccggctgttcggacggaagcatcaaggctgcaacaactgagctccgcgtttccgctcctgcagtgggacaacagcacggacagccatgcggtcaccggccctgcaattggncccccaaaccaaggcctggcccgttgtttccctggtgcaanggccaacacattccaaacaatcctanaatcct

SEQ ID NO: 2046 - DNA, 773 bp, Homo sapiens
  misc_feature (687)..(687): "n" may be a, t, c, g, other or unknown
  misc_feature (764)..(764): "n" may be a, t, c, g, other or unknown
  misc_feature (766)..(766): "n" may be a, t, c, g, other or unknown
ttttttgtagagatgagctctcactatgtcacccaggttcgtctcaaactcctgaaccctagtaattctcctatctcagcctcccaaagtgctagggttacagacatgagccactgtgcctgtctagacttgtactttcaactgtccatttctccctgtctgtcccatgggcactcatgaaaaaacagaatgctcccaactttattcatcttccaagcctgtagctcttggtatactcactgttgcaagtcagaagcttgatttcatcattgatgtttttctcacgtttcacatctcactcatcaccaagtcatgttggtgttaatttctgattaacccttgaatttaccgtcttctcatcctctgtacaaaagcctcaagtgagggtcaaattcaacattatcctgatctagacagcccccattctcaatccacccttttccaagttgattgcccaaggacttctaacaataaactctcttttgcaccacagacttctttgaaaatatacatgctgttgaccctctctgtagaaaaccgcacacataaaacttaccaacagatttcattggttcttgggttctcccgaagcctatccatggtttatagattaagaattgatgaggtagctgggcacagtggctcacacctacgatcacagcacttcgggaaggctgaagcaagcanatcacttgaggtcaaggagtttgagacaagcctgggccaacaatggggaaaccctgtcctcaactaaaaattcaaanangtaacca

SEQ ID NO: 2047 - DNA, 771 bp, Homo sapiens
  misc_feature (685)..(685): "n" may be a, t, c, g, other or unknown
  misc_feature (718)..(718): "n" may be a, t, c, g, other or unknown
  misc_feature (744)..(744): "n" may be a, t, c, g, other or unknown
tattagaagttggatttctggtgaaagggtttgagtgtttttgaggctttggcacagaatacccagctggtcccagaaaggtggttcccatttacctgcccgaaggtaattcacccttactgatactgagtactgttttctaaaagaacattaaaaattggataggttaaaaacaggtgaatacatttttttagttgcatttttttggttacccgtgagagtgaacatgttgccatgtgtttgctgacctcctaaatggtctatttgctcctacctttgtaccccaaaagtctgctctcaagatggtagccagaatgatcctttttgagacataagtcaaaatttcactcttctccttaaagctctgcaatggttctcaggttaaaggccaaagtcctgttcaaggcctccagggtcctcaccacttggtcccttgctctttctgttctagccaacttggccttctcctgcccctccgccgcaccatggcaatttcccctgctctgtgtggtcaactacctgaatctgttcaaagctttgctcaaatgtctccttcctgatgagacctccccagcccctgagctccccatgccccactcctgatcgccttacttaaaccttctttttcttttttgccaagtagtacttatcaccgtctaaaatacttcataatttacttgtttantggttgcccctctccaatagaatggtagctccntgggggcagggacctttggcctttgncctgttcaactgctggggtcccaaggt

SEQ ID NO: 2048 - DNA, 752 bp, Homo sapiens
  misc_feature (611)..(611): "n" may be a, t, c, g, other or unknown
  misc_feature (617)..(617): "n" may be a, t, c, g, other or unknown
  misc_feature (661)..(661): "n" may be a, t, c, g, other or unknown
  misc_feature (712)..(712): "n" may be a, t, c, g, other or unknown
  misc_feature (727)..(727): "n" may be a, t, c, g, other or unknown
aagatggccgccccggctcgggctgttttcagatgcttcaagtgttgtgaacagagacttgtttggattatgcatttctcagctagactaaataaatgctagcaatggatacgtgcaaacatgttgggcagctgcagcttgctcaagaccattccagcctcaaccctcagaaatggcactgtgtggactgcaacacgaccgagtccatttgggcttgccttagctgctcccatgttgcctgtggaagatatattgaagagcatgcactcaagcactttcaagaaagcagtcatcctgttgcattggaggtgaatgagatgtacgttttttgttacctttgtgatgattatgttctgaatgataacgcaactggagacctgaagttactacgacgtacattaagtgccatcaaaagtcaaaattatcactgcacaactcgtagtgggaggtttttacggtccctgggtacaggtgatgattcttatttcttacatgacggtgcccaatctctgcttcaaagtgaagatcaactgtatactgctctttggcacaggagaaggatactaatgggtaaaatctttcgaacatggtttgaacaatcacccattggnagaaanaagcaagaaagaaccatttcaaggaaaaaaatagtagtaaaaangagaagtaaagaaaaagacggcagggaattgggagtatcaagttaaagcanaattgggaaaagtangcctccaagaaagagtttacgttta

SEQ ID NO: 2049 - DNA, 666 bp, Homo sapiens
  misc_feature (600)..(600): "n" may be a, t, c, g, other or unknown
  misc_feature (608)..(608): "n" may be a, t, c, g, other or unknown
  misc_feature (637)..(637): "n" may be a, t, c, g, other or unknown
ctagtgttaaattggaaaatatcaataattaagagtattttacccaaggagtcctctcatggaagtttactgtgatgttccttttctcacacaagttttagcctttttcacaagggaactcatactgtctacacatcagaccatagttgcttaggaaacctttaaaaattccagttaagcaatgttgaaatcagtttgcatctcttcaaaagaaacctctcaggttagctttgaactgcctcttcctgagatgactaggacagtcggtacccagaggccacccagaagccctcagatgtacatacacagatgccagtcagctcctggggttgcgccaggcgcccccgctctagctcactgttgcctcgctgtctgccaggaggccctgccatccttgggccctggcagtggctgtgtcccagtgagctttactcacgtggcccttgcttcatccagcacagctctcaggtgggcactgcagggacactggtgtcttccatgtagcgtcccagctttgggctcctgtaacagacctctttttggttatggatggctcacaaaatagggcccccaatgctatttttttttttttaagtttgnttaattanttgttaaagattgtctaaagggcaaaggnaattgcgaaaatcaagtccgtcaagtaaa

SEQ ID NO: 2050 - DNA, 692 bp, Homo sapiens
  misc_feature (625)..(625): "n" may be a, t, c, g, other or unknown
  misc_feature (667)..(667): "n" may be a, t, c, g, other or unknown
  misc_feature (675)..(675): "n" may be a, t, c, g, other or unknown
ttttgatgagcgggatcttcaatattcatgttattttctcctttggtcttatatgattgttacctttatgaagctttagtgattacaaagcactttttttgtccatttttacctgagctttgtaaactctgatttgcaggatggctggctgtggtgaaattgatcattcaataaacatgcttcctacaaacaggaaagcgaacgagtcctgttctaatactgcaccttctttaaccgtccctgaatgtgccatttgtctgcaaacatgtgttcatccagtcagtctgccctgtaagcacgttttctgctatctatgtgtaaaaggagcttcatggcttggaaagcggtgtgctcttcgtcgacaagaaattcccgaggatttccttgacaagccaaccttgttgtcaccagaagaactcaaggcagcaagtagaggaaatggtgaatatgcatggtattatgaaggaagaaatgggtggtggcagtacgatgagcgcactagtagagagctggaagatgctttttccaaaggtaaaaagaacactgaaatgttaattgctgggtttctgtatgtcgctgatcttgaaaacatgggtcaatataggagaaatgaacatgggcgtcncaaggaagattaagccaagatataataggatattccaaaagnaaaggganttaactgggccttaagg

SEQ ID NO: 2051 - DNA, 302 bp, Homo sapiens
  misc_feature (220)..(220): "n" may be a, t, c, g, other or unknown
  misc_feature (282)..(282): "n" may be a, t, c, g, other or unknown
  misc_feature (302)..(302): "n" may be a, t, c, g, other or unknown
tagagggccaccttagcacccgccgcgtcgcagctccgggactggccccggccgcgacgccgccgcgatgggcaacgccgccgccgccaagaagggcagcgagcaggagagcgtgaaagagttcctagccaaagccaaggaagatttcctgaaaaaatgggagaccccttctcagaatacagcccagttggatcagtttgatagaatcaagacccttggnaccggctcctttgggcgagtgatgctggtgaagcacagggagagtgggaaccactacgccangaagatcttagacaggcagn

SEQ ID NO: 2052 - DNA, 653 bp, Homo sapiens
  misc_feature (633)..(633): "n" may be a, t, c, g, other or unknown
  misc_feature (643)..(644): "n" may be a, t, c, g, other or unknown
cctgctgaccaccgacgacgccatggtctccatcgaccccaccatgcccgcgaattcagaacgcactccgtacaaagtgagacctgtggccatcaagcaactctccgagagagaagaattaatccagagcgtgctggcgcaggttgcagagcagttctcaagagcattcaaaatcaatgaactgaaagctgaagttgcaaatcacttggctgtcctagagaaacgcgtggaattggaaggactaaaagtggtggagattgagaaatgcaagagtgacattaagaagatgagggaggagctggcggccagaagcagcaggaccaactgcccctgtaagtacagttttttggataaccacaagaagttgactcctcgacgcgatgttcccacttaccccaagtacctgctctctccagagaccatcgaggccctgcggaagccgacctttgacgtctggctttgggagcccaatgagatgctgagctgcctggagcacatgtaccacgacctcgggctggtcagggacttcagcatcaaccctgtcaccctcaagaggtggctgttctgtgtccacgacaactacaggaaacaacccttccacaacttccgggactgcttctgcgtggcccaagntgatgtacannatggtctgg

SEQ ID NO: 2053 - DNA, 558 bp, Homo sapiens
  misc_feature (354)..(354): "n" may be a, t, c, g, other or unknown
  misc_feature (388)..(388): "n" may be a, t, c, g, other or unknown
  misc_feature (409)..(409): "n" may be a, t, c, g, other or unknown
  misc_feature (495)..(495): "n" may be a, t, c, g, other or unknown
  misc_feature (503)..(503): "n" may be a, t, c, g, other or unknown
  misc_feature (554)..(554): "n" may be a, t, c, g, other or unknown
aaacaaagagatgccacccctgtgtgatggctttggtacccgaacactgatggttcagacattttcccgttgcatcttgtgttccaaggatgaagtggacttggatgagttattagctgctagattggtaacgtttctgatggacaattaccaggaaattctgaaagtccctttggccttgcagacctctatagaggagcgtgtggctcatctacgaagagtccagataaaatacccaggagctgatatggatatcactttatctgctccatcattttgccgtcaaattagtccagaggaatttgaatatcaaagatcatatggctctcaggaacctctggcagccttgttggnggaagtcataacagatgccagactctccaacatngagaaaaggaagagactgaancagtttcagaaatcctatcctgaagtctatcaagaacgatttcctacaccagaaagtgcagcacttctgtttcctgaaaaacccangccgaaancacagctgctaatgtgggcactaaagaagcctttcgaaccatttcaagagnacta

SEQ ID NO: 2054 - DNA, 738 bp, Homo sapiens
  misc_feature (551)..(551): "n" may be a, t, c, g, other or unknown
  misc_feature (565)..(565): "n" may be a, t, c, g, other or unknown
  misc_feature (721)..(721): "n" may be a, t, c, g, other or unknown
  misc_feature (724)..(724): "n" may be a, t, c, g, other or unknown
  misc_feature (730)..(730): "n" may be a, t, c, g, other or unknown
ctacatcaaaactcctcggaagatgttccggcacacggacagcctctttcccatcctactgcagacgttatcggatgaatcggatgaggtgatcctgaaggacctggaggtgctggcagaaatcgcttcctcccccgcaggccagacggatgacccaggccccctcgatggccctgacctccaggccagccactcagagctccaggtgcccacccctggcagagccggcctactgaacacctctggtaccaaaggcttagaatgttctccttcaactcccaccatgaattcttacttttataagttcatgatcaaccttctcaagagattcagcagcgaatggaagctcctggaggtcagaggccctttcatcatcaggcagctgtgcctcctgctgaatgcggagaacatcttccactcaatggcagacatcctgctgcgggaggaggacctcaagttcgcctcgaccatggtccacgccctcaacaccatcctgctgacctccacaagagctcttccagctaaggaaccagctgaaggacctgaaagancctggagaagccanaacctgttctgctgcctgtaccgctcctggtgccaaaacccagtcaacaaggtgtccctctggttcctcaaccaagaactaccgggaacgcctatgacctcatccaaaaatttggggacctggagggcaacgtggacttcctcccaaaaggtgganaanctgggngcaactga

SEQ ID NO: 2055 - DNA, 670 bp, Homo sapiens
  misc_feature (1)..(670): "n" may be a, t, c, g, other or unknown
nnnnnnnnnnnnnnnnnnnnnnnnnnnnnnnnnnnnnnnnnnnnnnnnnnnnnnnnnnnnnnnnnnnnnnnnnnnnnnnnnnnnnnnnnnnnnnnnnnnnnnnnnnnnnnnnnnnnnnnnnnnnnnnnnnnnnnnnnnnnnnnnnnnnnnnnnnnnnnnnnnnnnnnnnnnnnnnnnnnnnnnnnnnnnnnnnnnnnnnnnnnnnnnnnnnnnnnnnnnnnnnnnnnnnnnnnnnnnnnnnnnnnnnnnnnnnnnnnnnnnnnnnnnnnnnnnnnnnnnnnnnnnnnnnnnnnnnnnnnnnnnnnnnnnnnnnnnnnnnnnnnnnnnnnnnnnnnnnnnnnnnnnnnnnnnnnnnnnnnnnnnnnnnnnnnnnnnnnnnnnnnnnnnnnnnnnnnnnnnnnnnnnnnnnnnnnnnnnnnnnnnnnnnnnnnnnnnnnnnnnnnnnnnnnnnnnnnnnnnnnnnnnnnnnnnnnnnnnnnnnnnnnnnnnnnnnnnnnnnnnnnnnnnnnnnnnnnnnnnnnnnnnnnnnnnnnnnnnnnnnnnnnnnnnnnnnnnnnnnnnnnnnnnnnnnnnnnnnnnnnnnnnnnnnnnnnnnnnnnnnnnnnnnnnnnnnnnnnnnnnnnnnnnnnnnnnnnnnnnnnnnnnnnnnnnnnnnnnnnnnnnnnnnnnn

SEQ ID NO: 2056 - DNA, 615 bp, Homo sapiens
  misc_feature (490)..(490): "n" may be a, t, c, g, other or unknown
  misc_feature (506)..(506): "n" may be a, t, c, g, other or unknown
  misc_feature (537)..(537): "n" may be a, t, c, g, other or unknown
  misc_feature (597)..(597): "n" may be a, t, c, g, other or unknown
  misc_feature (613)..(613): "n" may be a, t, c, g, other or unknown
atgagcatcaccgaggagatggcggaaaagatgaccgtggccaaggactcctcggacctgcctgaggagtcgcggcgggagctgctggagcagatagcagactgctgcatgcgccagggcagctaccacctggccaccaagaagtacacgcaggccggcaacaagctgaaggccatgagggcgctgctcaaatccggagacacggagaaaatcacgttcttcgcgagcgtgtccaggcagaaggaaatctacatcatggctgctaactacctgcagtccctggactggcggaaggagccggagatcatgaagaacatcatcggcttctacaccaaggggcgggccctggacctcctggctggcttttatgacgcttgtgcccaggtggagattgatgaataccagaactacgacaaagcccacggggcgctgacttgaggcctacaagtgcctggccaaggccaaggccaagagccccctggaccatgangaccaggctggcgcanctgcagagcaagatggcactggtgaagaggntcatccaagccccgcaggacgttcacagaggaccccaaggagtccatcaagcagtgtganctgctcctggaggaanca

SEQ ID NO: 2057 - DNA, 724 bp, Homo sapiens
  misc_feature (642)..(642): "n" may be a, t, c, g, other or unknown
  misc_feature (680)..(680): "n" may be a, t, c, g, other or unknown
  misc_feature (696)..(696): "n" may be a, t, c, g, other or unknown
ctgggtctggcttcagggcacagacttcatgccggaccccagctccgagtggctgtaccgggtgacggtggccaccatcctctatttctcctggttcaacgtggctgagggccgcacccgaggccgggccatcatccacttcgccttcctcctgagtgacagcattctcctggtggccacctgggtgactcatagctcctggctgcccagcgggattccactgcagctgtggctgcctgtgggatgcggctgcttctttctgggcctggctctgcggcttgtgtactaccactggctgcaccctagctgctgctggaagcccgaccctgaccaggtagacggggcccggagtctgctttctccagaggggtatcagctgcctcagaacaggcgcatgacccatttagcacagaagtttttccccaaggctaaggatgaggctgcttcgccagtgaagggataggtgaacggcgtcctttgaagcaggatcagacccagccagcagagatggagagtgactctgttggcagaaggcaggcgaggataagctaacgatgctgctgtggcctctatgcactcagcaagagcgggacgcctgtgctgggccgggcaccaaggatggtgctgagtcgggcaaaaggnctcctttcaaggagttcaaaagtgaacaagatgagaanggctggggccctggangggtcaagaagccccaatttatgttcaa

SEQ ID NO: 2058 - DNA, 791 bp, Homo sapiens
  misc_feature (763)..(763): "n" may be a, t, c, g, other or unknown
  misc_feature (777)..(777): "n" may be a, t, c, g, other or unknown
  misc_feature (791)..(791): "n" may be a, t, c, g, other or unknown
taaaaaacccgctccagcacccccgaaaccgggcaacccacctcctggccaccccgggggccagagttcttcaggaacatctcagcatccacccagtctgtcaccaaagccacccacccgaagcccctctcctcccacccagcacacgggccagcctccaggccagccctccgccccctcccagctctcagcaccccggaggtactccagcagcttgtctccaatccaagctcccaatcacccaccgccgcagccccctacgcaggccacgccactgatgcacaccaaacccaatagccagggccctcccaaccccatggcattgcccagtgagcatggacttgagcagccatctcacacccctccccagactccaacgccccccagtactccgcccctaggaaaacagaaccccagtctgccagctcctcagaccctggcagggggtaaccctgaaactgcacagccacatgctggaaccttaccgagaccgagaccagtaccaaagccaaggaaccggcccagcgtgcccccacccccccaacctcctggtgtccactcagctggggacagcaagcctcaccaacacagcaccaacagcttccaagatagtaacagggtttcagaaccgcatcgcagcatctttcctgaaatgcactcagactcagccagcaaagacgttgcctgggccgcatcctgctggatatagacaattgataccggagaagcactgcccctgttgaaggaaaaggcccttttccangcccttccaacaantttccaaccctggn

SEQ ID NO: 2059 - DNA, 639 bp, Homo sapiens
  misc_feature (2)..(2): "n" may be a, t, c, g, other or unknown
  misc_feature (46)..(46): "n" may be a, t, c, g, other or unknown
  misc_feature (76)..(76): "n" may be a, t, c, g, other or unknown
  misc_feature (541)..(541): "n" may be a, t, c, g, other or unknown
  misc_feature (632)..(633): "n" may be a, t, c, g, other or unknown
angctcttaggctccacccggccctgaacagctggcttgtcttggngtctcttgtgccaccctccccaggaacagnggcttccttgtattggcgccagcgatgatgggccagctctgtgctaaacggagtcttgctctgttgcccaggctggagtgcaatggtgcgatctcggctcactgcagtctccgcctcttgggttcaggctcatccacctgcagacatggggcgcagaaagtcaaaacgaaagccgcctcccaagaagaagatgacaggcaccctcgagacccagttcacctgccccttctgcaaccacgagaaatcctgtgatgtgaaaatggaccgtgcccgcaacaccggagtcatctcttgtaccgtgtgcctagaggaattccagacgcccataacgtatctgtcagaacccgtggatgtgtacagtgattggatagacgcctgcgaggcggccaatcagtagcgacacagaggacccgccccctgagcagccccgcgtactgtggatccagctgttcggttctggtccanagacattccaggggtccagggtgtgggtcctgggctgtcacagccgtgtgtgtgtgtgtgtgtgtgtgtgtgtgtgtgtgtgtgtgtgtanngggtgt

SEQ ID NO: 2060 - DNA, 744 bp, Homo sapiens
  misc_feature (741)..(741): "n" may be a, t, c, g, other or unknown
cagctggcggccagtgctggcttcaggaggttgattacagtggcccttcaccgaggtcagcagtatgaaagcatggaccacatccaagctgagctgtcggctagagtcatggagctggccccagctgggatgcccacccagcagcaggtcccctttctgtctgtgggtggggacattggggtccggaccgttcagcaccaagactgcagccccttgagcggtgactatgtcattgaggatgtgcaaggggatgacaagcgatacttccgtcgactgatcttcctcagcaacaggaatgtggtgcagtccgaagccaggttgctgaaggatgtgtctcacaaagcccagaagaagcggaaaaaggacaggaagaagcagcggcctgctgatgcggaggacctccctgcagccccggggcagtccattgataagagttacctgtgttgtgaacaccacaaagccatgatcgctggccttgccctgctgagaaacccagagctactcctagagatcccactggcattgttggtggtaggcctgggcgggggcagcctccccctctttgtccacgatcaatttccaaagtcctgcattgatgctgtggagatcgatccctccatgttggaagtggccacccagtggtttggcttctcccagagtgaccgaatgaaggtccacattgcagatggcctggactatatcgccagcttggcaggaggaggagaacacggccttgcttcnaaa

SEQ ID NO: 2061 - DNA, 805 bp, Homo sapiens
  misc_feature (2)..(3): "n" may be a, t, c, g, other or unknown
  misc_feature (786)..(786): "n" may be a, t, c, g, other or unknown
annaaatatgccccagatggcaaactttgtatacaacatgtacatgcatttgatacagactacacatcattatcatcagactttattacaactaccacctgctatggtagaagagggtgaggaagttcaaaatcaagaaacagaattggaaacagaagaagaggccatgactgttcaagctgacatcatacccagtccaacagacaccagctgccgtcaagaaactccagcctttcaaactgacaccacccccagtgagacaggagccacttccactccagaagccatccttgctttatctgagaccacccctactgtggtaggagctgtatctgcaccggcagaagctaacacacctcaggatgccacatctgccccagaagagaccaagtagccaaactgtagtccttctaaaggaggacatggcagtcaaaaagtctgagtaaagctgttttttgtattttatatttgcttctgccattttactgtcactaattaatgtttagttcttatatttgttaactgatttcggtgtcttgaatatatttttttaaattatgtgtatgaacaattctagtttcatttgttcaatcagaagagcaaataaccattcctttcatgttttgatcactgagtgtgtctgtaatcatacctacattaaaatcattttctatgaatatataatatatacttcacatttttagtgaacttctctaaagaagaggacagaatatactggacttaaccacgaatacccttgagtgtccaaattgggaaggaacttgnttcttctggtatactatca

SEQ ID NO: 2062 - DNA, 805 bp, Homo sapiens
  misc_feature (22)..(22): "n" may be a, t, c, g, other or unknown
  misc_feature (34)..(34): "n" may be a, t, c, g, other or unknown
  misc_feature (104)..(104): "n" may be a, t, c, g, other or unknown
actgggctgtgcggagaaatcnacttactaaatnagagattaagaaagaatactatgcgttaactaaatttaatgttcacaaaaccagatttggcttaactgangcaggagatctgtctgctgaagacatgaagaaaatccgccatctctctctgattgaattgactgccttttttgatgcctttggaattcaactgaaaaggaacaaaacagagaaagtaaaaggacgagacaatgggatttttggagttccacttacagtcctcctggacggtgaccgaaagaaagaccctggagtgaaagttcccctggtattacaaaaattttttgagaaagttgaggaatcaggtctggaatctgaaggaatttttcgactttcaggatgtactgctaaagtcaagcaataccgtgaagaacttgatgccaagtttaatgctgataaatttaaatgggacaaaatgtgccatagagaagctgcagtaatgttgaaagcgtttttcagagaactacccacctctctcttccctgtggaatatatacctgccttcatcagtctaatggaaagagggcctcacgtcaaagtacagtttcaagccttacacctcatggtcatggcgctgcctgatgccaacagagatgcagctcaggccctcatgacattcttcaataaagtgattgccaatgaatcaaaaaaccgaatgagtctgtggaacatttctacagtgatggcaccgaaccttttcttcagtagaagcaaacactctgattatgaagaattactggtagcaaacactgggggccacat

SEQ ID NO: 2063 - DNA, 599 bp, Homo sapiens
  misc_feature (528)..(528): "n" may be a, t, c, g, other or unknown
  misc_feature (573)..(573): "n" may be a, t, c, g, other or unknown
  misc_feature (594)..(594): "n" may be a, t, c, g, other or unknown
cagatagtagcgatagtgagtatatcagtgatgatgagcagaagtctaagaacgagccagaagacacagaggacaaagaaggttgtcagatggacaaagagccatctgctgttaaaaaaaagcccaagcctacaaacccagtggagattaaagaggagctgaaaagcacgtcaccagccagcgagaaggcagaccctggagcagtcaaggacaaggccagccctgagcctgagaaggacttttccgaaaaggcaaaaccttcacctcaccccataaaggataaactgaagggaaaagatgagacggattccccaacagtccatttgggcctggactctgattcagagagcgaacttgtcatagatttaggagaagaccattctgggcgggagggtcgaaaaaataagaaggaacccaaagaaccatctcccaaacaggatggcattggctagttgtaggtaaaactccaccatccacgacggtgggcagccattctcccccggaaacaccggtgctcacccgctcttncgcccaaacttccgcggctggcgccacagccaccaccagcacgtnctccacggtcaccgtcacggncccgg

SEQ ID NO: 2064 - DNA, 791 bp, Homo sapiens
  misc_feature (566)..(566): "n" may be a, t, c, g, other or unknown
  misc_feature (663)..(663): "n" may be a, t, c, g, other or unknown
  misc_feature (700)..(700): "n" may be a, t, c, g, other or unknown
  misc_feature (741)..(741): "n" may be a, t, c, g, other or unknown
  misc_feature (783)..(783): "n" may be a, t, c, g, other or unknown
gcgtgccgggtgtcatggcggcctgcaggtactgctgctcgtgcctccggctccggcccctgagcgatggtcctttccttctgccacggcgggatcgggcactcacccagttgcaagtgcgagcactatggagtagcgcagggtctcgagctgtggccgtggacttaggcaacaggaaattagaaatatcttctggaaagctggccagatttgcagatggctctgctgtagtacagtcaggtgacactgcagtaatggtcacagcggtcagtaaaacaaaaccttccccttcccagtttatgcctttggtggttgactacagacaaaaagctgctgcagcaggtagaattcccacaaactatctgagaagagaggttggtacttctgataaagaaattctaacaagtcgaataatagatcgttcaattagaccgctctttccagctggctacttctatgatacacaggttctgtgtaatctgttagcagtagatggtgtaaatgagcctgatgtcctagcaattaatggcgcttccgtagccctctcattatcagatattccttgnaatggacctgttggggcagtacgaataggaataattgatggagaatatgttggtaacccaacaagaaaagaaatgtcttctagtactttaaatttantggttgctggagcacctaaaaagtcagattggcatgntggaagcctctgcagagaacattttacagcaggacttttgncatgctatcaaagggggagtgaaatatcccaacaaataattnagggcatt

SEQ ID NO: 2065 - DNA, 650 bp, Homo sapiens
  misc_feature (567)..(567): "n" may be a, t, c, g, other or unknown
  misc_feature (635)..(635): "n" may be a, t, c, g, other or unknown
  misc_feature (647)..(647): "n" may be a, t, c, g, other or unknown
tctgaaatatggcattgccctcctcatcttacaggtggaaaaactgaagcttgagataagcaacctaaacagtatcacacagctaatgaggagtcaaatgcaggcctgcctgtccccaaagtccagattcttcctttcctagaatgtcagggctagggaagtgctgagaccctctggtctacccccaccccctaattttatgaaagacaaggataaagtcccagggaaacaatgtgttcaaggctacccagtgacgcatgaccccatacaggctctataaggatgttacactcggtcatctctacatgcctggtacctagcacaggatcctggtacattggaggtgcttgagtaactgtgaatacaggaacatagtcatttaatagcaaagctagagccctgtcccccaaggccagcttactgcctcccctccccctcacgcctggcatcccacctggatgtatgcatggttggtcggatgaaactcctccccaacaggattaggacactcgccctcacagcgataggcgttgtactgcttggggtagatgatccaggagccccatncgatcaggttgaagtccacctggaacttgaccttccgacacagttgacttctgtctggcaagtgatgncgacggtgcctnttg

SEQ ID NO: 2066 - DNA, 563 bp, Homo sapiens
  misc_feature (467)..(467): "n" may be a, t, c, g, other or unknown
  misc_feature (528)..(528): "n" may be a, t, c, g, other or unknown
  misc_feature (531)..(531): "n" may be a, t, c, g, other or unknown
agcgcgcggctgatacccgggactgggctgcggcggttagtcctctcccggccgccgtcgcctccgacatattgcccgcaggagctgcggcggcgaagcggagagcaccggggggaggagatgggaggacgaagaggtcccaacaggacatcttactgtcgaaatccgctctgtgagccgggatcctcggggggctctagtggaagccacacttccagtgcaccggtgaccagtgttcgttcccgcaccaggagcagttctggaacaggcctctccagccctcctctggccacccaaactgttgtgcctctacagcactgcaagatccccgagctgccagtccaggccagcattctgtttgagttgcagctcttcttctgctagctcatagcactcttcgtccactacatcaacatctacaagacagtgtggtggtatccaccttcccacccaccctcccacacctncctgaacttccatctgatcgacttcaacttgctgatggtgaccaccatcgttctgggccgncgnttcattgggtccatcgtgaaggaggcctatca

SEQ ID NO: 2067 - DNA, 782 bp, Homo sapiens
  misc_feature (481)..(481): "n" may be a, t, c, g, other or unknown
  misc_feature (644)..(644): "n" may be a, t, c, g, other or unknown
  misc_feature (743)..(743): "n" may be a, t, c, g, other or unknown
  misc_feature (756)..(756): "n" may be a, t, c, g, other or unknown
  misc_feature (760)..(760): "n" may be a, t, c, g, other or unknown
tgagaacattaagaaaagattatgctcggtacagtaaagaggaagaaatggatgatatggatagagacctaggagatgaatatggatggaaacaggtgcatggagatgtatttagaccatcaagtcacccactgatattttcctctctgattggttctggatgtcagatatttgctgtgtctctcatcgttattattgttgcaatgatagaagatttatatactgagaggggatcaatgctcagtacagccatatttgtctatgctgctacgtctccagtgaatggttattttggaggaagtctgtatgctagacaaggaggaaggagatggataaagcagatgtttattggggcattccttatcccagctatggtgtgtggcactgccttcttcatcaatttcatagccatttattaccatgcttcaagagccattccttttggaacaatggtggccgtttgttgcatctgtttttttgntattcttcctctaaatcttgttggtacaatacttggccgaaatctgtcaggtcagcccaactttccttgtcgtgtcaatgctgtgcctcgtcctataccggagaaaaaatggttcatggagcctgcggttattggttgcctgggtggaattttaccttttggntcaatctttattgaaatgtatttcatcttcacgtctttctggccatataaagatctattatggctatgggcttcatgatgctggtgctgggtatcctgngcattgggactgnctgngtgactattgggtgcacatatt

SEQ ID NO: 2068 - DNA, 786 bp, Homo sapiens
  misc_feature (612)..(612): "n" may be a, t, c, g, other or unknown
  misc_feature (672)..(672): "n" may be a, t, c, g, other or unknown
  misc_feature (717)..(717): "n" may be a, t, c, g, other or unknown
  misc_feature (784)..(784): "n" may be a, t, c, g, other or unknown
aaaaaaaaaaaaacatatcagaatcacactgtggtttttctgggatcagagaagggaatcatcttgaagtttttggccagaataggaaatagtggttttctaaatgacagccttttcctggaggagatgagtgtttacaactctgaaaaatgcagctatgatggagtcgaagacaaaaggatcatgggcatgcagctggacagagcaagcagctctctgtatgttgcgttctctacctgtgtgataaaggttccccttggccggtgtgaacgacatgggaagtgtaaaaaaacctgtattgcctccagagacccatattgtggatggataaaggaaggtggtgcctgcagccatttatcacccaacagcagactgacttttgagcaggacatagagcgtggcaatacagatggtctgggggactgtcacaattcctttgtggcactgaatggagtgattcgggaaagttacctcaaaggccacgaccagctggttcccgtcaccctcttggccattgcagtcatcctggctttcgtcatgggggccgtcttctcgggcatcaccgtctactgcgtctgtgatcatcggcgcaaagacgtggctgtggtgcancgcaaggagaaggagctcacccactcgcgccggggctccatgagcagcgtcaccaagctnagcggcctctttggggacactcaatccaaagacccaaagccggangccatcctacgccacttcatgcacaacggcaaagctcgccactcccggcaacacggccaagatgctnat

SEQ ID NO: 2069 - DNA, 770 bp, Homo sapiens
  misc_feature (490)..(490): "n" may be a, t, c, g, other or unknown
  misc_feature (733)..(733): "n" may be a, t, c, g, other or unknown
  misc_feature (750)..(750): "n" may be a, t, c, g, other or unknown
  misc_feature (755)..(755): "n" may be a, t, c, g, other or unknown
cacattctggatctcagctgctcttgaaggacagtgacttgttaccaccgcaacagcagagcctgccatccccaacagatcaccagttgtccctgacatcgtgccctaccttgtctccctttgtggtctcctaaatgcccatctcgttggccttggttcggctagtggtatggaggggtgctgcctagcactgacctgagagtgtgtgtgacccactgacccaatggacatcaaaggccagttctggaatgatgacgactcggagggagataatgaatcagaggaatttctctatggcgttcaggggaactgtgcagccgacctgtatcgacacccacagcttgatgcagacattgaagccgtgaaggagatctacagtgagaactctgtatccatcagagaatatggaactatcgatgacgtggacattgacctccacatcaacatcagcttcctcgatgaggaagtctctacagcctggaaggtcctncggacagaacctattgtgttgaggctgcgattttctctctcccagtacctagatggaccagaaccatccattgaggttttccagccatcaaataaggaaggatttgggctgggtcttcagttgaaaaagatcctgggtatgtttacatcccaacaatggaaacatctgagcaatgatttcttgaagacccagcaggagaagaggcacagttggttcaaggcaagtggtaccatcaagaagttncgagctggctcagcatnttttnaccattcccaagtct

SEQ ID NO: 2070 - DNA, 784 bp, Homo sapiens
  misc_feature (701)..(701): "n" may be a, t, c, g, other or unknown
  misc_feature (717)..(717): "n" may be a, t, c, g, other or unknown
  misc_feature (773)..(773): "n" may be a, t, c, g, other or unknown
atttaaatggttcaattgatggcattcgccacatgtttacccctaagcttgaaataatgctggagcccaaggtctggagagaagctgctactcaagtgttctttgccttaggtctgggatttggtggtgtcattgccttttcaagctacaacaagagagacaacaactgccactttgatgctgtcctggtgtccttcatcaattttttcacttctgtcctggcaacattggtggtgtttgcagttctgggcttcaaagcaaatgtcataaatgagaaatgcattacacaaaattcagagacgatcatgaaatttttgaaaatggggaacattagtcaggatattattccccatcatatcaacctttcaactgttactgtagaagactatcatttagtttatgacatcattcaaaaagtgaaagaagaagagtttcctgctcttcatctcaattcctgtaaaattgaagaagagctaaataaagctgttcaggggaccggcttagcttttattgcctttacagaagcgatgacacattttcctgcatctcccttctggtcagtgatgtttttcctcatgctggtcaatctaggccttggcagtatgtttggaaccattgaagggattgtcacgcctattgtggacactttcaaagtgaggaaagaaattcttactggtatctggtggcttctggcattttgnattggcctgatattgngcaacgctctggaaattactttggtacaatggttgatgattattctgctacactgnctctgctaaat

SEQ ID NO: 2071 - DNA, 788 bp, Homo sapiens
tgcaagtatgacttttgctggatttgccttgaagagtggaaaaaacatagttcgtccactggaggttattacagatgtactcgctatgaagtcattcaacacgtggaggagcaatccaaggaaatgactgtggaggctgagaaaaaacacaaacgatttcaggaacttgacagatttatgcactattatacaagatttaaaaaccatgagcatagttatcagctagaacaacgccttcttaaaacagccaaagaaaagatggagcaattgagcagagctctcaaagaaactgaaggaggctgtccagataccactttcattgaagatgcagttcatgtgctcttaaaaactcggcgcattctcaagtgttcttatccatatggatttttcttggaacctaaaagcacaaagaaagaaatttttgaactaatgcaaacagacctagaaatggtcactgaagaccttgcccagaaagtcaataggccttaccttcgcacaccccgccacaagatcatcaaagcagcatgccttgtacagcagaagaggcaagaattcctggcatctgtggctcggggagtagctcctgcagactcaccagaagctccaaggcgcagctttgctggtggaacatgggattgggaatatttaggatttgcatcaccagaggaatatgctgaatttcagtatcggaggaggcacagacaacgtcgtcgaggagatgttcacaggtctactcagtaatccttcagaccctgttgagccaagtgaaagcactttagattattccc

SEQ ID NO: 2072 - DNA, 762 bp, Homo sapiens
  misc_feature (1)..(1): "n" may be a, t, c, g, other or unknown
  misc_feature (45)..(45): "n" may be a, t, c, g, other or unknown
  misc_feature (710)..(710): "n" may be a, t, c, g, other or unknown
  misc_feature (735)..(735): "n" may be a, t, c, g, other or unknown
  misc_feature (748)..(748): "n" may be a, t, c, g, other or unknown
nactttcttctgatgaagagatgaaaatggcggagatgcgaccancattaattgaaacctctattaaccagccaaaagtcgtagcacttagtaataacaaaaaagatgatacaaaggaaacagattctttatcagatgaagttacacacaatagcaatcagaataacagcaattgttcttctccatctcggatgtctgattcagtttctcttaatactgatagtagtcaagacacctcactctgctctccagtgaaacaaactcatattgatattaattccaaaatcaggcaagaagatgaaaattttaacagccttttacaaaatggagatattttaaacagttcaacagaggaaaagttcaaagctcatgataaaaaagattttaacttacctgaatatgatttgaatgttgaagagcgattagttctaattgagaaaagtgttgactcaacagccacagctgatgacactcacaaattagatcatatcaatatgaatcttaataaacttataactaatgatacatttcaaccagagatcatggaaagatcaaaaacacaggatattgtgcttggaacaagctttttaagcattaattctaaagaggaaactgggcacttggaaaatggaaacaagtatcctaatttggaatccgtaaataaggtaaatggacattctgaggaaacttcccagtctcctaatcggacnggaaccccatgacagcgattggtcnccttggacctcangtcctttcaaaagc

SEQ ID NO: 2073 - DNA, 695 bp, Homo sapiens
  misc_feature (653)..(653): "n" may be a, t, c, g, other or unknown
  misc_feature (655)..(655): "n" may be a, t, c, g, other or unknown
  misc_feature (663)..(663): "n" may be a, t, c, g, other or unknown
aaatgcgtcaaacctcgacaaggtgctaacagacatcaaagctgacaaagaccaagccaacgatggtctttcctctgcattgctgatcttgtacttggattcagcaaggaaccttccgtcagggaagaaaataagcagcaacccaaatcctgttgtccagatgtcagttgggcacaaggcccaggagagcaagattcgatacaaaaccaatgaacctgtgtgggaggaaaacttcactttcttcattcacaatcccaagcgccaggaccttgaagttgaggtcagagacgagcagcaccagtgttccctggggaacctgaaggtccccctcagccagctgctcaccagtgaggacatgactgtgagccagcgcttccagctcagtaactcgggtccaaacagcaccatcaagatgaagattgccctgcgggtgctccatctcgaaaagcgagaaaggcctccagaccaccaacactcagctcaagtcaaacgtccctctgtgtccaaagaggggaggaaaacatccatcaaatctcatatgtctgggtctccaggccctggtggcagcaacacagctccatccacaccagtcattgggggcagtgataagcctggtatggaagaaaaggcccagccccctgaggccggccctnancggctgcncgacctgggcagaagctccttcagccttctgg

SEQ ID NO: 2074 - DNA, 608 bp, Homo sapiens
  misc_feature (530)..(530): "n" may be a, t, c, g, other or unknown
  misc_feature (571)..(571): "n" may be a, t, c, g, other or unknown
  misc_feature (600)..(600): "n" may be a, t, c, g, other or unknown
tacgcgctgcgggaccggcaggggaacgccatcggggtcacagcctgcgacatcgacggggacggccgggaggagatctacttcctcaacaccaataatgccttctcgggggtggccacgtacaccgacaagttgttcaagttccgcaataaccggtgggaagacatcctgagcgatgaggtcaacgtggcccgtggtgtggccagcctctttgccggacgctctgtggcctgtgtggacagaaagggctctggacgctactctatctacattgccaattacgcctacggtaatgtgggccctgatgccctcattgaaatggaccctgaggccagtgacctctcccggggcattctggcgctcagagatgtggctgctgaggctggggtcagcaaatatacagggggccgaggcgtcagcgtgggccccatcctcagcagcagtgcctcggatatcttctgcgacaatgagaatgggcctaacttccttttccacaaccggggcgatggcacctttgtggacgctgcggncagtgctgtgtggacgacccccaccagcatggcgaggtgtngcctgctgacttaaccgtgatggcaaagnggacatcg

SEQ ID NO: 2075 - DNA, 819 bp, Homo sapiens
  misc_feature (572)..(572): "n" may be a, t, c, g, other or unknown
  misc_feature (626)..(626): "n" may be a, t, c, g, other or unknown
  misc_feature (688)..(688): "n" may be a, t, c, g, other or unknown
  misc_feature (759)..(759): "n" may be a, t, c, g, other or unknown
  misc_feature (776)..(776): "n" may be a, t, c, g, other or unknown
  misc_feature (798)..(798): "n" may be a, t, c, g, other or unknown
tatccctgttcagtactgcgcccagcccaccaatggcatggtgtatttccgggccttctccagcctgaacacactccccgaggagctgaggccctatgtgccccccttctgcagcatcctcaccaagctgggctgcggccttcttgactaccgggagcaggctcagcagatagaattgaagaccggagggatgagtgcttctccccacgtgctccccgacgactcacacatggacacctacgagcagggtgtgcttttctcctctctctgcctggatcgaaacctgccagacatgatgcagctatggagtgaaatatttaacaacccgtgctttgaagaagaggagcacttcaaggtgctggtgaagatgaccgcccaggagctcgccaatggaattcctgactctgggcacctgtacgcatccatcagggcaggccggaccctcacgcccgcaggggacctgcaggagaccttcagcgggatggatcaggtgcggctgatgaagaggattgcagaaatgacagatatcaaacccatcctgaggaagctcccgcgtatcaagaaacacttgntaaatggtgataatatgaggtgttcagtgaatgcgactcctcagcagatgcctnagacaggaaaaagcggtcgaagacttccttagaagcatcggtcggagtaaaaaggaacggangcctgtgcgcccacacacggtcgagaaacctgtgcccagcagctctggtggagatgcccacgtccccatgngttccaggtcattaggnaactggcatgggaacccacttnaagcctggcagatgaaaactc

SEQ ID NO: 2076 - DNA, 741 bp, Homo sapiens
  misc_feature (699)..(699): "n" may be a, t, c, g, other or unknown
  misc_feature (702)..(702): "n" may be a, t, c, g, other or unknown
  misc_feature (715)..(715): "n" may be a, t, c, g, other or unknown
gtgatccggggagacaggaacacgggcaagacagcgctgtggcaccgcctgcagggccggccgttcgtggaggagtacatccccacacaggagatccaggtcaccagcatccactggagctacaagaccacggatgacatcgtgaaggttgaagtctgggatgtagtagacaaaggaaaatgcaaaaagcgaggcgacggcttaaagatggagaacgacccccaggaggcggagtctgaaatggccctggatgctgagttcctggacgtgtacaagaactgcaacggggtggtcatgatgttcgacattaccaagcagtggaccttcaattacattctccgggagcttccaaaagtgcccacccacgtgccagtgtgcgtgctggggaactaccgggacatgggcgagcaccgagtcatcctgccggacgacgtgcgtgacttcatcgacaacctggacagacctccaggttcctcctacttccgctatgctgagtcttccatgaagaacagcttcggcctaaagtaccttcataagttcttcaatatcccatctttgcagcttcagagggagacgctgttgcggcagctggagacgaaccagctggacatggacgccacgctggaggagctgtcggtgcagcaggagacggaggaccagaactacggcatctttctcggaaatgatggaggctccaanccngggccattgcgtncccaattggccggcttaacgggcaga

SEQ ID NO: 2077 - DNA, 819 bp, Homo sapiens
  misc_feature (1)..(1): "n" may be a, t, c, g, other or unknown
  misc_feature (46)..(46): "n" may be a, t, c, g, other or unknown
  misc_feature (50)..(50): "n" may be a, t, c, g, other or unknown
  misc_feature (745)..(745): "n" may be a, t, c, g, other or unknown
  misc_feature (819)..(819): "n" may be a, t, c, g, other or unknown
ncttgaggcgtagggggtggccgctctccgttcggcggcgctcccntggngcacattaccattaaccagtacctgcagcaggtgtacgaagccatcgacagcagagatggagcatcttgtgcagagttggtgtcttttaaacatcctcatgttgcaaacccacgacttcaaatggcctctccagaggagaagtgtcaacaagtcttggaacccccttatgatgaaatgtttgcagctcatttaaggtgcacttatgcagtggggaatcatgacttcatagaggcatacaagtgccagaccgtgatagtccaatcattcttgcgagcattccaggcccacaaagaagaaaactgggctctgcctgtcatgtatgcagtagcgcttgaccttcgagtgtttgccaataatgcagatcaacagttggtaaagaaaggaaaaagcaaagttggggacatgttggaaaaagcagcagagttactgatgagctgtttccgggtctgtgccagcgacacccgtgctggtatagaggactctaagaagtggggcatgctgtttctggtgaaccagctgtttaaaatctacttcaagatcaacaaactccatttatgtaaacccctaattagagcaattgacagctcaaacctgaaagacgattacagcactgcacagagagtaacatacaaatactacgttggacgcaaggctatgtttgacagcgattttaagcaagctgaggagtacctgncatttgcctttgacatttcacccgtctagtcagaagaacaaaaggatgatctgactattgctttcagtaaaaan

SEQ ID NO: 2078 - DNA, 557 bp, Homo sapiens
  misc_feature (6)..(6): "n" may be a, t, c, g, other or unknown
  misc_feature (33)..(33): "n" may be a, t, c, g, other or unknown
  misc_feature (516)..(516): "n" may be a, t, c, g, other or unknown
  misc_feature (555)..(555): "n" may be a, t, c, g, other or unknown
  misc_feature (557)..(557): "n" may be a, t, c, g, other or unknown
ccaatnccatgtctgggctcggaggctgacagngaccgcaggacccatccgactctgggccttcgggggccaatcctggggagcccccacactcccctcttcctgccccatggcttggagcccgaggctgggggcaccttgccctctcgcctgcagcccattctcctcctggacccctcaggctctcatgccccgctgctgactgtgcccgggcttgggcccttgcccttccactttgcccagtccttaatgaccaccgagcggctctctgggtcaggcctccactggccactgagccggactcgctcggagcccctgccccccagtgccaccgctcccccaccgccgggccccatgcagccccgcctggagcagctcaaaactcacgtccaggtgatcaagaggtcaagccaagccgagtgagaagccccggctgcggcagataccctcggctgaagacctggagacagatggcgggggaccgggccaggtggtggacgatggcctggagcacangggagctgggccatgggcagcctgaaggcagaagccccngn

SEQ ID NO: 2079 - DNA, 759 bp, Homo sapiens
  misc_feature (325)..(325): "n" may be a, t, c, g, other or unknown
  misc_feature (575)..(575): "n" may be a, t, c, g, other or unknown
  misc_feature (685)..(685): "n" may be a, t, c, g, other or unknown
  misc_feature (737)..(737): "n" may be a, t, c, g, other or unknown
  misc_feature (739)..(739): "n" may be a, t, c, g, other or unknown
agtgttcggagccaggggcctgggggcaagattgttacctgtgcacaccgatatgaggcaaggcagcgagtggaccagatcctggagacgcgggatatgattggtcgctgctttgtgctcagccaggacctggccatccgggatgagttggatggtggggaatggaagttctgtgagggacgcccccaaggccatgaacaatttgggttctgccagcagggcacagctgccgccttctcccctgatagccactacctcctctttggggccccaggaacctataattggaaggggttgctttttgtgaccaacattgatagctcanaccccgaccagctggtgtataaaactttggaccctgctgaccggctcccaggaccagccggagacttggccctcaatagctacttaggcttctctattgactcggggaaaggtctggtgcgtgcagaagagctgagctttgtggctggagccccccgcgccaaccacaagggtgctgtggtcatcctgcgcaaggacagcgccagtcgcctggtgcccgaggttatgctgtctggggagcgcctgacctncggctttggctactcactggctgtggctgacctcaacagtgatggctgccagacctgatagtgggtgccccctacttctttgagcgccaagaaaaacttgggggtgctgngtatgtgacttgaccaagggggtcactggctggatctccctttcggttttgngntccctgctcatttcggatca

SEQ ID NO: 2080 - DNA, 791 bp, Homo sapiens
  misc_feature (1)..(1): "n" may be a, t, c, g, other or unknown
  misc_feature (42)..(42): "n" may be a, t, c, g, other or unknown
  misc_feature (44)..(44): "n" may be a, t, c, g, other or unknown
  misc_feature (330)..(330): "n" may be a, t, c, g, other or unknown
  misc_feature (348)..(348): "n" may be a, t, c, g, other or unknown
  misc_feature (465)..(465): "n" may be a, t, c, g, other or unknown
  misc_feature (512)..(512): "n" may be a, t, c, g, other or unknown
  misc_feature (696)..(696): "n" may be a, t, c, g, other or unknown
  misc_feature (726)..(726): "n" may be a, t, c, g, other or unknown
  misc_feature (743)..(743): "n" may be a, t, c, g, other or unknown
ncaagcccagcatcagcctctcagcccccgacatcctgcctntntctgcaccatccgccggcaaccgctcccggacagcggccaggccgcggggaggctggtcctggagcccatccccggggcgcacatctccgtcaacttctccgaggtggggcacaggaccgtggtgctgcaccacggggacctgctctccctggggctctactacctgctgctattcaaggaccccgcgcaggcccagcccctgcccgcccgggccttggcgcgcctccgggctgtgccgcagagctgccggctgtgcggggccgcgctcggggcccggggagccgnctcccctactcaggccgncctgccccggcgccagcagctgctcctggagtttgagccccacctggaggacacgctgctgcagaggatcatgacgttgatcgagccggggggcgacgaccacaagctgacccccgncttcctcctgtgcctctgcatccagcactcggccacccacttccagncgggcacattcgggcagctcctgctcaagatagccaggctgatccgcgagactgtctgggagaaaaccaaagaactagcagagaagcaggcgcaactccaggagcccatctcgctggccagctgcgccatggctgatctggttccagacttgcagcccattcttttctggatgtctaactcatnagctctgtactttatcagcagaatgccatntacatgcagacatggangacactggcatacaggtcgaagatcgtgttctgaccttacgcagcaga

SEQ ID NO: 2081 - DNA, 815 bp, Homo sapiens
  misc_feature (45)..(45): "n" may be a, t, c, g, other or unknown
  misc_feature (732)..(732): "n" may be a, t, c, g, other or unknown
  misc_feature (776)..(776): "n" may be a, t, c, g, other or unknown
tccaggctctgctcagtggacgccaggcaaaggggctgacctcanggcgctggttcctacgccagggctggctgttagtggtgcctccccatggggagcctcggccccgcatgttcttcctcttcactgatgtgctcctcatggccaagcctcggcctccactgcacctgctgcggagtggcacctttgcctgcaaggccctctaccccatggcccagtgtcatctcagcagggtctttggccactcaggaggcccttgtggtgggttgctcagtctgtccttccctcatgagaagctactgcttatgtccacagaccaggaggagctgtcacgctggtaccacagtctgacttgggctatcagcagccagaaaaactagaggaatcttatagattccagaactcaggatacctcagggagaggtcacagccaagagtacaaaggaatcttcagtactgaacaaaacagaacccttcatgatttgacaaaggtcactttctgtttgcctggaccaagctactccagatcatctgactaactcttaaaaatcacggccaggcacagtggctcatgcctgtaatcccagcactttgggaagcagaggtggcaggatcattccagcccaggagttcaagaccagcctgggcaacacagtgagtgagaccctgtctctatttaagaaaaaataattaagaaattttattaaaaaagaagaatcaggaaaccaagtncaacccaactaaacctaaatgaaccagcccctaacacagatgangggatttgggactgataactttggctgggtccatggccc

SEQ ID NO: 2082 - DNA, 817 bp, Homo sapiens
  misc_feature (750)..(750): "n" may be a, t, c, g, other or unknown
  misc_feature (759)..(759): "n" may be a, t, c, g, other or unknown
  misc_feature (810)..(810): "n" may be a, t, c, g, other or unknown
tgatgaatggctccaaaatacattttgtgcccggctgggattgttatgggttgcccattgaaataaaagtattatcagaacttggtagagaagctcagaatctttcagctatggaaattagaaagaaagctagatcatttgctaaagcagccattgagaaacagaaatcagcatttattcgttggggaataatggcagattggaataattgctactatacatttgatgggaagtatgaagccaaacagttgagaactttttaccaaatgtatgataagggcttggtttatcgatcttacaaacctgtgttttggtctccgtcatctaggactgcattggctgaagcagaacttgaatataatcctgagcatgtcagtcgttcaatatatgtaaaatttcctctcttaaagccttctccaaaattggcatctcttatagatggttcatctcctgttagtattttggtctggaccacacaaccttggacgattccagccaatgaagctgtttgctatatgcctgaatcaaagtatgctgttgtgaaatgttctaagtctggagacctctacgtactggcggcagataaagtagcatctgttgcttctactttggaaacaacatttgagactatttcaacactttcaggtgtagatttggaaaatggtcttgcagtcatccattaattcctgataaagcctctcctcttttacctgcaaatcatgtgaccatggcaaaaggaacgggattggntcacacagncccagctcatggtatggaagactaccggtggaaccgcttaccacaacctgnccatggc

SEQ ID NO: 2083 - DNA, 821 bp, Homo sapiens
  misc_feature (44)..(44): "n" may be a, t, c, g, other or unknown
  misc_feature (733)..(733): "n" may be a, t, c, g, other or unknown
  misc_feature (815)..(815): "n" may be a, t, c, g, other or unknown
tgacaaacagctggagctcttggctcaagactataagctgctanttaagcagattacggaggaagtggagaggcaggtgtcgactgcaatggccgaggagatcaggcgcctctctgtactggtggacgattaccagatggacttccacccttctccagtagtcctcaaggtttataagaatgagctgcaccgccacatagaggaaggactgggtcgaaacatgtctgaccgctgctccacggccatcaccaactccctgcagaccatgcagcaggacatgatagatggcttgaaacccctccttcctgtgtctgtgcggagtcagatagacatgctggtcccacgccagtgcttctccctcaactatgacctaaactgtgacaagctgtgtgctgacttccaggaagacattgagttccatttctctctcggatggaccatgctggtgaataggttcctgggccccaagaacagccgtcgggccttgatgggccacaatgaccaggtccagcgccccatccctctgacgccagccaaccccagcatgcccccactgccacagggctcgctcacccaggaggagttcatggtttccatggttaccggcctggcctccttgacatccaggacctccatgggcattcttgttgttggaggagtggtgtggaaggcagtgggctggcggctcattgccctctcctttgggctctatggcctcctctacgtctatganccgtctgacctggaccaccaaggccaaggagagggccttcaagcgccagttttgtggaacatgcccaccgagaacttgcagnttgtcc

SEQ ID NO: 2084 - DNA, 687 bp, Homo sapiens
  misc_feature (553)..(553): "n" may be a, t, c, g, other or unknown
  misc_feature (639)..(639): "n" may be a, t, c, g, other or unknown
  misc_feature (644)..(644): "n" may be a, t, c, g, other or unknown
  misc_feature (673)..(673): "n" may be a, t, c, g, other or unknown
ccaatcccattctgggctcggaggctgacagtgaccgcaggacccatccgactctgggccttcgggggccaatcctggggagcccccacactcccctcttcctgccccatggcttggagcccgaggctgggggcaccttgccctctcgcctgcagcccattctcctcctggacccctcaggctctcatgccccgctgctgactgtgcccgggcttgggcccttgcccttccactttgcccagtccttaatgaccaccgagcggctctctgggtcaggcctccactggccactgagccggactcgctcggagcccctgccccccagtgccaccgctcccccaccgccgggccccatgcagccccgcctggagcagctcaaaactcacgtccaggtgatcaagaggtcagccaagccgagtgagaagccccggctgcggcagataccctcggctgaagacctggagacagatggcgggggaccgggccaggtggtggacgatggcctggagcacagggagctgggccatgggcagcctgaggccagaggccccgntcctctccagcagcaccctcaggtgttgctctgggaacagcagcgactggctgggcggttccccggggcagcaccggggacactgngctgnttctctggcccaaggtgggcaccggcctntgtccccgggctaa

SEQ ID NO: 2085 - DNA, 762 bp, Homo sapiens
  misc_feature (1)..(1): "n" may be a, t, c, g, other or unknown
  misc_feature (372)..(372): "n" may be a, t, c, g, other or unknown
  misc_feature (390)..(390): "n" may be a, t, c, g, other or unknown
  misc_feature (680)..(680): "n" may be a, t, c, g, other or unknown
  misc_feature (729)..(729): "n" may be a, t, c, g, other or unknown
  misc_feature (739)..(739): "n" may be a, t, c, g, other or unknown
nccgaggtctctgcagacaaactggtggcactggggctgttcagccagcactttaatttggccaccttcaataagctcgtctcctatcgaaaagccatgtaccatgctctggagaaagctagggtgcgagctggcaagaccttccccagcagccctggagactcattggaggaccagctcaagcccatgttggagtgggcccacgggggcttcaagcccactgggatcgagggcctcaaacccaacaacacgcaaccagtggttaataagtcgaaggtgcgtcgtgcaggcagtaggaaattagaatcaaggaaatacgagaacaagactcgaagacgcacagctgacgactcagccacctctgactactgncccgcacccaagcgcctnaagacaaattgctataacaacggcaaagaccgaggggatgaagatcagagccgagaacaaatggcttcagatgttgccaacaacaagagcagcctggaagatggctgtttgtcttgtggcaggaaaaaccccgtgtccttccaccctctctttgagggggggctctgtcagacatgccgggatcgcttcttgagctgttttacatgtatgatgaccatggctatcagtcttactgcactgtgtgctgcgagggccgagagctgctgctttgcagcaacacgagctgctgncggtgtttctgtgtggagtgcctggaggtgctggtgggcacaggcacangggcccaggncaagcttaaggagccctggactg

SEQ ID NO: 2086 - DNA, 710 bp, Homo sapiens
  misc_feature (499)..(499): "n" may be a, t, c, g, other or unknown
  misc_feature (640)..(640): "n" may be a, t, c, g, other or unknown
  misc_feature (694)..(694): "n" may be a, t, c, g, other or unknown
  misc_feature (701)..(701): "n" may be a, t, c, g, other or unknown
ctgccaaatggacccatctcactgagtttgaactgaagggcctgaaagctctggtggagaaactggaatccctcccggagaacaagaagtgcgtccccgagggcatcgaggacccccaggcactcctggagggtgtgaagaacgtcctgaaggagcacgcagatgatgaccctagtctggccatcactggggtccctgtggtgacttggccaaagaagactccaaagaaccgggctgtgggtcggcccaaggggaagctgggcccggcctccgcggtgaagttggccgccaaccggacaacggcaggagctcggcggcgccggacgcgatgccgcaagtgcgaggcctgcctgcggaccgagtgcggagagtgccacttctgcaaggacatgaagaagttcgggggccccgggcgcatgaagcagagctgcatcatgcggcagtgcatcgcgccagtgctgccccacaccgccgtgtgccttgtgtgtggcgaggcggngaaggaagacacggtggaagaggaggaaggcaagtttaacctcatgctcatggagtgctccatctgcaatgaaatcatccaccctggatgccttaagattaaggagtcagagggtgtggtcaacgacgagcttcaaactgntgggagtgtccgaagtgtaaccacgccggcaagacccggaaacaaaagcgtggnccttggntttaagtac

SEQ ID NO: 2087 - DNA, 698 bp, Homo sapiens
  misc_feature (5)..(5): "n" may be a, t, c, g, other or unknown
  misc_feature (49)..(49): "n" may be a, t, c, g, other or unknown
  misc_feature (570)..(570): "n" may be a, t, c, g, other or unknown
  misc_feature (660)..(660): "n" may be a, t, c, g, other or unknown
  misc_feature (678)..(678): "n" may be a, t, c, g, other or unknown
  misc_feature (685)..(685): "n" may be a, t, c, g, other or unknown
ctgcngagataaatggttcagccctatgtagctacaacctaaagccttntgaatacactacatctccaaaatcttctgttctctgccccaaactaccagtcccagcgagtgcacctattccattcttccatcgctgtgctcctgtgaacatttcctgctatgccaagtttgcagaggccctgatcacctttgtcagtgacaatagtgtcttacacaggctgattagtggagtaatgaccagcaaagaaattatattgggactttgcttgttatcactagttctatccatgattttgatggtgataatcaggtatatatcaagagtacttgtgtggatcttaacgattctggtcatactcggttcacttggaggcacaggtgtactatggtggctgtatgcaaagcaaagaaggtctcccaaagaaactgttactcctgagcagcttcagatagctgaagacaatcttcgggccctcctcatttatgccatttcagctacagtgttcacagtgatcttattcctgataatgttggttatgcgcaaacgtgttgctcttaccatcgccttgntccacgtagctggcaaggtcttcattcacttgccactgctagtcttccaacccttctggactttctttgctcttggcttggtttgggtgnactggatcatgacacttntttttcntggcactacccgg

SEQ ID NO: 2088 - DNA, 718 bp, Homo sapiens
  misc_feature (1)..(1): "n" may be a, t, c, g, other or unknown
  misc_feature (644)..(644): "n" may be a, t, c, g, other or unknown
  misc_feature (677)..(677): "n" may be a, t, c, g, other or unknown
  misc_feature (686)..(686): "n" may be a, t, c, g, other or unknown
ntgaccgcctcctcggacaaggcttttgaagactggctgaatgatgacctcggctcctatcaaggggcccaggggaatcgctacgtggggtttgggaacacgccaccgcctcagaagaaagaagatgacttcctcaacaacgccatgtcctccctgtactcgggctggagcagcttcaccactggagccagccggtttgcctcggcagccaaggagggcgctacaaagtttggatcccaagcgagtcagaaggcgtccgagctgggccacagcctgaacgagaacgtcctcaagcctgcgcaggagaaggtgaaggagggaaagatttttgatgatgtctccagtggggtctctcagttggcgtccaaggtccagggagtcggtagtaagggatggcgggacgtcaccacctttttttcggggaaagcagagggccccttggacagcccctcggagggccacagttatcagaacagcggtctggaccacttccaaaacagcaacatagaccagagcttctgggagacctttggaagtgctgagcccaccaagacccgcaagtccccgagcagcgacagctggacgtgcgcggacaccttcaccgagaggaggagctcggacagctgggaggtgtggggctcggnctcaccaacaggaacagcaacagcgacggcggngaggccggngagggcaccaagaaggcagtgcccgccggccg

SEQ ID NO: 2089 - DNA, 725 bp, Homo sapiens
  misc_feature (697)..(697): "n" may be a, t, c, g, other or unknown
  misc_feature (710)..(710): "n" may be a, t, c, g, other or unknown
  misc_feature (713)..(713): "n" may be a, t, c, g, other or unknown
cacttctggaagaacccgaaagatgtggctgcgcccacgcccatggcctctcaggggccccaggcctgggacgtgaccaccactaactgctcagccaatatcaacttgacccaccagccctggttccaggtcctggagccgcagttccggcagtttctcttctaccgccactgccgctacttccccatgctgctgaaccacccggagaagtgcaggggcgatgtctacctgctggtggttgtcaagtcggtcatcacgcagcacgaccgccgcgaggccatccgccagacctggggccgcgagcggcagtccgcgggtgggggccgaggcgccgtgcgcaccctcttcctgctgggcacggcctccaagcaggaggagcgcacgcactaccagcagctgctggcctacgaagaccgcctctacggcgacatcctgcagtggggctttctcgacaccttcttcaacctgaccctcaaggagatccacttcctcaagtggctggacatctactgcccccacatccccttcattttcaaaggcgacgatgacgtcttcgtcaaccccaccaacctgctagaatttctggctgaccggcagccacaggaaaacctgttcgtgggcgatgtctgcagcacgctcggccattcgcaggaaagacaacaaatactacatcccgggggcccctgtacgggaaggncagctattccggncgnatgcaagggcgg

SEQ ID NO: 2090 - DNA, 672 bp, Homo sapiens
  misc_feature (45)..(45): "n" may be a, t, c, g, other or unknown
  misc_feature (655)..(656): "n" may be a, t, c, g, other or unknown
  misc_feature (666)..(666): "n" may be a, t, c, g, other or unknown
ccgttgtcccgaagagcgagatcgagcttggccccctcccccccntccttccctccctccttccttccgccgcaacatggctaacaacagccccgcgctgacaggcaactcgcagccgcagcaccaggcggctgcagctgcggctcagcaacagcagcagtgcggcggcggcggcgctaccaagccggcggtctccggcaagcagggcaatgtgctcccgctctggggcagcgagaagaccatgaacctcaaccccatgatcctgaccaacatcctgtcgtcgccttacttcaaagtacagctctacgagctcaagacctaccacgaggtggtggacgagatctactttaaggtcacgcacgttgaaccatgggagaaaggaagcaggaaaacagcgggccagacagggatgtgcggaggggttcgaggtgttggaacaggaggaattgtttctacagcattttgcctgttatacaaattatttaccctgaagttaactcgaaagcaagtgatgggtcttataacacacacagactctccatatattagagcgcttggatttatgtatataagatatacacagccccctacagatctgtgggactggtttgaatccttccttgatgatgaagaggacctagatgtgaaggctggnnggaggcttgngtaatg

SEQ ID NO: 2091 - DNA, 678 bp, Homo sapiens
  misc_feature (1)..(1): "n" may be a, t, c, g, other or unknown
  misc_feature (47)..(47): "n" may be a, t, c, g, other or unknown
  misc_feature (432)..(432): "n" may be a, t, c, g, other or unknown
  misc_feature (500)..(500): "n" may be a, t, c, g, other or unknown
  misc_feature (571)..(571): "n" may be a, t, c, g, other or unknown
  misc_feature (615)..(615): "n" may be a, t, c, g, other or unknown
  misc_feature (669)..(669): "n" may be a, t, c, g, other or unknown
  misc_feature (672)..(672): "n" may be a, t, c, g, other or unknown
naaaaaaaaaaaaaacaatggtacatttttacatgggaacaaaaggncctgaaaatcctcaagttgaagtgttatcagaggaagaaggggaagaagaagaggaggaagaagatatcctctctctggcagaagaaaaatacaggccagctgcccttgaaaagatgatagctttagttgctcttttggttgaacagtctcgatcagaaaggcatttgacattatcacagactgacatggcagcattaacaggaggaaagggatttcccttcttgtttcaacatattcgtgatggcatcaatataagacaaacttgtaatctgattttcagcctgtgtcgatacaataatcgacttgcagaacatattgtatctatgcttttcacatcaatagcaaagttgactcctgaggcagccaatcctttctttaagttgntgactatgctaatggagtttgctggtggacctccaggaatgcctccctttgcatcttatattctgcanaggatatgggaggtgattgaatacaatccttctcagtgtctagattggttggcagtgcagacaccccgaantaaactggcacacagctgggtcttacagaatatggaaaactggntcgagcggtttcttttggctcacaattatcctaaagtgaggacttctgcagctnatnttctgg

SEQ ID NO: 2092 - DNA, 665 bp, Homo sapiens
  misc_feature (593)..(593): "n" may be a, t, c, g, other or unknown
  misc_feature (637)..(637): "n" may be a, t, c, g, other or unknown
  misc_feature (655)..(655): "n" may be a, t, c, g, other or unknown
ctcagtcaccctgtggcagagcccagctcgagccaggctggcagcatgagcagtgcaggcccaagaccactacccagtggcccagcatcccccaaacgcaagctggaagcagccgaggaaccacctggtgaagaactcagcaaacgggcccgggtggcagagttgccaaccccagagctgccgagcaaggatgcctgagactgcagagcccttgctccgtgagcaaagcctgggtgcccaagcagccaccgcagcagcagagtacaacctgcagagaagctgatcaccgggcagagatagagcgagcatgtgtgtgtgtgtgcgcgtgtgcagaggagggagtggtgtgcctgtttgtgtgtgcatgcatctgttgacactcatgattctgaatgttgcctgggctgggggagtacctgtagcacgccagtgctgtttcccggcctccagacacaaggctcgaggttatggcagtgactttcagctgagacctgttcctgcaagccagctgccttgtctgaacagaacgtagtggtaggaccctagctgggattctggcatctgcctccctagacctccttccctcccttctnacgtcaggcttgtggaagcaggagcacaagcagttcttggctgnttgtccaaagcattgggnatttttggga

SEQ ID NO: 2093 - DNA, 701 bp, Homo sapiens
  misc_feature (41)..(41): "n" may be a, t, c, g, other or unknown
  misc_feature (615)..(615): "n" may be a, t, c, g, other or unknown
  misc_feature (694)..(694): "n" may be a, t, c, g, other or unknown
  misc_feature (696)..(696): "n" may be a, t, c, g, other or unknown
ctctcttggaactcaatgactctcctgtcttcaaaaccgtnttggaaagaatgcagcgtttcttctctaccctctatgaaaactgttttcatatcctagggaaggcaggcccttccatgcagcaagacttctatactgtggaggaccttgctacccagcttctcagctcagcctttgtcaacttgaacaatattcctgactaccgactcagacccatgcttcgggtctttgtaaagcctctggtgctcttctgtcccccagagcactatgaagccctggtatcccccatcctcggacctctttcacctacctccatatgaggctttctcagaaatggcaagttatcaaccaaaggagcctgctgtgtggagaagatgaggctgcagatgaaaacccagagtctcaagagatgctggaggagcaactggtgaggatgttaacccgagaagtcatggacctaatcacggtttgctgtgtttcaaagaagggtgctgaccacagtagtgctcccccagcagatggagacgatgaagaaatgatggccacagaggtcaccccctcagctatggcagagcttacagacctgggcaaatgtctgatgaagcatgaggatgnttgtacagcgctattaattacaggcttcaattccctggcctggaaagatactctgcctgccagaggacaaccttacagntnttgtg

SEQ ID NO: 2094 - DNA, 796 bp, Homo sapiens
  misc_feature (1)..(1): "n" may be a, t, c, g, other or unknown
  misc_feature (767)..(767): "n" may be a, t, c, g, other or unknown
  misc_feature (774)..(774): "n" may be a, t, c, g, other or unknown
  misc_feature (796)..(796): "n" may be a, t, c, g, other or unknown
ngatgcggtttaaacagaggctgaaagtgatccagtccttggaggacacggccaagaggagtgtggtccgagctatacctgtggacattggtttctccattgaagagctggaggacctttacatggtgtttaaggccaagcacctggctagccagtactgggggtgcagccgcacaatggccggccgtcgggaccccagcctgccctacctggagcagtaccggattgatgccagccagttccgggaactctttgccagcctgacaccctgggcctgtggctcccacacacctctgctggcagggcgcatgttcaggctcctggacgaaaacaaggactcgctgatcaacttcaaggagttcgtgacagggatgagcgggatgtaccacggggacctgacagagaagctcaaggtgctctacaagctacaccttcccccagctctgagcccagaggaagccgagtcagccctggaggcggcccattatttcacagaggacagctcctcagaagaagcactaccacaggaagagcaagaaggaagtggaagtgaggagagaggagaggagaaggggaccagctctccggactatcggcactaccttcgaatgtgggccaaggagaaagaggctcagaaggagacgattaaggatcttccaagatgaaccaggagcagttcattgagctgtgcaagacgctttacaacatgttcagtgaagaccccatggagcaggacctgtaccacgcccatcggcaccgtggccagncttctgnttccgcatcggaaaaggttggn

SEQ ID NO: 2095 - DNA, 751 bp, Homo sapiens
  misc_feature (2)..(2): "n" may be a, t, c, g, other or unknown
  misc_feature (751)..(751): "n" may be a, t, c, g, other or unknown
anagcttttctgtgtttctccggacttcgagccatggcggtgacggaagcgagcctgttgcgccagtgccccctgcttctgccccagaaccggtcgaaaaccgtgtatgagggattcatctcggctcagggaagagacttccaccttaggatagtgttgcctgaagatttacaactgaagaatgcaagattattatgtagttggcagctgagaacaatacttagtggataccatcgaatagtacaacagagaatgcagcaccctcctgatctaatgagctttatgatggagttgaagatgcttttggaagttgccttaaagaatagacaagagctgtatgcactacctcctcctccccagttctactcaagccttattgaagagataggaactcttggttgggataaacttgtgtatgcggatacctgcttcagtaccatcaagttaaaagcagaagatgcttctggtagagagcatttaatcactctcaagttgaaggcaaagtatcctgcagaatcaccagattattttgtggattttcctgttccattttgtgcctcctggacacctcagagctccttaataagcatttatagtcagtttttggcagcaatagaatcactaaaggcattctgggatgttatggatgaaatcgatgagaagacctgggtacttgagccagaaaaaccttcacggagtgcaacagcacgcagaattgcattaggtaataatggttccataaatatagggn

SEQ ID NO: 2096 - DNA, 749 bp, Homo sapiens
  misc_feature (75)..(75): "n" may be a, t, c, g, other or unknown
  misc_feature (651)..(651): "n" may be a, t, c, g, other or unknown
  misc_feature (700)..(700): "n" may be a, t, c, g, other or unknown
  misc_feature (738)..(738): "n" may be a, t, c, g, other or unknown
atttaacgtaccaggactctacattgcagttcaggcagtgctggccttggcggcatcttggacatctcgacaagngggtgaacgtacgttaacggggatagtcattgacagcggagatggagtcacccatgttatcccagtggcagaaggttatgtaattggaagctgcatcaaacacatcccgattgcaggtagagatattacgtatttcattcaacagctgctaagggagagggaggtgggaatccctcctgagcagtcactggagaccgcaaaagccattaaggagaaatactgttacatttgccccgatatagtcaaggaatttgccaagtatgatgtggatccccggaagtggatcaaacagtacacgggtatcaatgcgatcaaccagaagaagtttgttatagacgttggttacgaaagattcctgggacctgaaatattctttcacccggagtttgccaacccagactttatggagtccatctcagatgttgttgatgaagtaatacagaactgccccatcgatgtgcggcgcccgctgtataagaatgtcgtactctcaggaggctccaccatgttcagggatttcggacgccgactgcagagggatttgaagagagtggtggatgctaggctgaggctcancgaggagctcagcggcgggaggatcaagccgaagcctgtggaggtccangtggtcacgcatcacatgcaccgctacgcccgtgtggntcggaggcttc

SEQ ID NO: 2097 - DNA, 751 bp, Homo sapiens
  misc_feature (542)..(542): "n" may be a, t, c, g, other or unknown
  misc_feature (631)..(631): "n" may be a, t, c, g, other or unknown
  misc_feature (727)..(727): "n" may be a, t, c, g, other or unknown
  misc_feature (751)..(751): "n" may be a, t, c, g, other or unknown
atcgacgggctgcgggagctcaaacgcctcaaggtgctgcggctcaagagcaacctaagcaagctgccacaggtggtcacagatgtgggcgtgcacctgcagaagctgtccatcaacaatgagggcaccaagctcatcgtcctcaacagcctcaagaagatggcgaacctgactgagctggagctgatccgctgtgacctggagcgcatcccccactccatcttcagcctccacaacctgcaggagattgacctcaaggacgacaacctcaagaccatcgaggagatcatcagcttccagcacctgcaccgcctcacctgccttaagctgtggtacaaccacatcgcctacatccccatccagatcggcaacctcaccaacctggagcgcctctacctgaaccgcaacaagatcgagaagatccccacccagctcttctactgccgcaagctgcgctacctggacctcagccacaacaacctgaccttcctccctgccgacatcggcctcctgcagaacctccagaacctagccatcacggncaaccggatcgagacgctccctccggagctcttccagtgccggaagctgcgggccctgcacctgggcaacaacgtgctgcagtcactgncctccaaggtgggcgagctgaccaacctgacgcagatcgagctgcggggcaaccggctggagtgcctgcctgtggagctgggcgagtgcccactgntcaaagcgcaacggcttggtgggn

SEQ ID NO: 2098 - DNA, 615 bp, Homo sapiens
  misc_feature (528)..(528): "n" may be a, t, c, g, other or unknown
  misc_feature (543)..(543): "n" may be a, t, c, g, other or unknown
  misc_feature (614)..(614): "n" may be a, t, c, g, other or unknown
actgtatcacctatagggtgtaattcctccgatcccgctgacttcgaaccaatcccatctttttctgggtttccgttagattctcccaaaaccttggtgcttgactttgagacagagggtgaacgaaactcacctaatcccaggagtgttaggatcccttctcctaacattttgaaaactggacttacagaaaatgttgaccgtggcttggggggcctagagggaacacaccaggcccttgacctgttagcaggaggaatgatgcctgaggaagtaaaagaatcttcccaattagacaaacaagagtcactcggattggaattaaaaattaattctgcaggccttgggccatctccttgccttccagaccttgttgactttgtcacacggacctctggagttcaaaaagataaactgtgttctccactctctgagccaggtgacccttctaaatgtagttccctggagttggggccattacagctagaaatatcgaatgcatccaccacagaggtggcaattctgcangtagatgatgacagnggcgaccctctgaatttggttaaagctccagtgtcaaggtccccttcaagggagcaggtaattgaagacant

SEQ ID NO: 2099 - DNA, 827 bp, Homo sapiens
  misc_feature (775)..(775): "n" may be a, t, c, g, other or unknown
  misc_feature (802)..(802): "n" may be a, t, c, g, other or unknown
  misc_feature (811)..(811): "n" may be a, t, c, g, other or unknown
tcatactggagagaagccctacgtttgtgaagaatgtggcaaagcctttaagtactcccgtatccttactacacataagagaattcatactgaagagaaaccatacaagtgtaataaatgtggcaaagcctttattgcatcctcaacccttagtagacatgagttcattcatatgggaaagaaacattacaaatgtgaagaatgtggcaaagccttcatttggtcctcagtcctaactagacataagagagttcatactggagagaagccctacaaatgtgaagaatgtggcaaagcctttaagtactcctctacccttagttcacataagagaagtcatactggagagaaaccctacaaatgtgaagaatgtggcaaagcctttgttgcatcctcaacccttagtaaacatgagatcattcatactggaaagaaaccctacaagtgtgaagaatgtggcaaagcttttaaccagtcctcatcccttactaaacataagaaaattcatactggagagaaaccctacaaatgtgaagaatgtggcaaagcttttaaccagtcctcttcccttactaaacataagaaaatccattctggagagaaaccatacgagtgtgataaatgtggcaaagcctttatttcaccctcaagccttagtagacatgagataattcatactggggagaaaccctagaagtgtgaagaatgtggcaaagccttcaagtggtcctacaccttactatacactgagagtctgaacttactctgtaccatnccaacttcttccaggcacagtctgcanaagtcctgncattcggagacctgga

SEQ ID NO: 2100 - DNA, 862 bp, Homo sapiens
  misc_feature (5)..(5): "n" may be a, t, c, g, other or unknown
  misc_feature (598)..(598): "n" may be a, t, c, g, other or unknown
  misc_feature (658)..(658): "n" may be a, t, c, g, other or unknown
  misc_feature (679)..(679): "n" may be a, t, c, g, other or unknown
  misc_feature (755)..(755): "n" may be a, t, c, g, other or unknown
  misc_feature (791)..(791): "n" may be a, t, c, g, other or unknown
  misc_feature (809)..(809): "n" may be a, t, c, g, other or unknown
ttccngatgctacttcgtaaatgttgtaatcatccatatttgattgaatatcctatagaccctgttacacaagaatttaagatcgatgaagaattggtaacaaattctgggaagttcttgattttggatcgaatgctgccagaactaaaaaaaagaggtcacaaggtgctgcttttttcacaaatgacaagcatgttggacattttgatggattactgccatctcagagatttcaacttcagcaggcttgatgggtccatgtcttactcagagagagaaaaaaacatgcacagcttcaacacggatccagaggtgtttatcttcttagtgagtacacgagctggtggcctgggcattaatctgactgcagcagatacagttatcatttatgatagtgattggaacccccagtcggatcttcaggcccaggatagatgtcatagaattggtcagacaaagccagttgttgtttatcgccttgttacagcaaatactatcgatcagaaaattgtggaaagagcagctgctaaaaggaaactggaaaagttgatcatccataaaaatcatttcaaaggtggtcagtctggattaaatctgnctaagaatttcttagatcctaaggaattaatggaattattaaaatctagagattatgaangggaaataaaaggatcaaganagaaggtcattagtgataaagatctagagttggttggtagatcgaagtgatcttattgatcaaatgaatgcttcangaccaattaaaggagaagatggggatattcaagatntagaaaatctgaagattncagtcctgaattggagaccggggttcaccatcttggcctgactggcccgactg

SEQ ID NO: 2101 - DNA, 718 bp, Homo sapiens
gagacaaaacaaaatgtggccacctattaataaagcaaacagtcttggtgttcagacactgctgccgtttagttcagaacagattattgtcattattataattttgtttattaaaaagaaaactcttggcagccgagcgcggtggctcacgcctgtgatcccagcactttgggaggccaaggctggtggctcacgaggtcaggagatcgagaccatcctggctaacacggtgaaaccccgtctgtactaaaaataaaaaaaattagccggccttggtggtgggtgcctgtggtcccagctacttgggaggctgaggcaggagaatggcatgaacccgggaggcagagcttgcagtgagcagagatcgagccattgcactccagcctcggtgacagaatgagactccatctcaaaaaaaacaagaaaaagaaaagaaaactctttagctgggcacggtggctcatgcctgtaatcctaacactttgggaggccaaggcagatggatcacctgaagtcaggagttggagaccagcctggccaacatggcaaaacttcatctctactaaaaatacaaaaatgagctgggcatcgatgtacatgcctgtagtcccagctactcaggaggctgaggcaggagaatcgcttgaactcgtgaggcagttgcagtgagatcgcaccactgcactccaacctgggtgacagagcaagattctgtctc

SEQ ID NO: 2102 - DNA, 880 bp, Homo sapiens
  misc_feature (840)..(840): "n" may be a, t, c, g, other or unknown
  misc_feature (854)..(854): "n" may be a, t, c, g, other or unknown
  misc_feature (862)..(862): "n" may be a, t, c, g, other or unknown
ctataacttattacagtcatccagccctgctgtaaaatatgaagctgctgggacattagtgacactctctagtgcaccaactgcaatcaaggctgctgctcagtgttacattgatttaattattaaggagagcgacaacaatgtaaaactcatagttttggatcgcttgatagaattaaaagagcatcctgctcatgaacgagtactacaggatctggttatggatatcctaagagtattgagcacaccagacttagaagtacgaaagaaaactctgcagttagcactggatcttgtctcttctagaaatgttgaaaagctggttattgtcctgaagaaggaagtgataaaaacaaataatgtgtctgagcatgaagatactgacaaatacagacaactcctagtgcgaacattgcattcctgttctgtccgatttccagatatggctgcaaatgttattcctgtgttaatggaatttctcagtgacaacaacgaagcagcagctgctgatgtcttggagtttgttcgtgaagccattcagcgctttgataacctgagaatgcttattgttgagaagatgcttgaagtctttcatgctattaaatctgtcaagatttaccgaggagcattatggatcctgggagaatactgtagtaccaaggaagacattcagagtgtgatgactgagatccgcaggtcccttggagagatcccaattgtagagtcagaaataaagaaagaagctggtgaattaaaacctgagaagaaatacctgtagggccagttcagaaattggtactggaatgggtacctatgccacctcaaaagtgcccttacagntctagaccccccanggaaggangaagaccgaccttccttt

SEQ ID NO: 2103 - DNA, 740 bp, Homo sapiens
  misc_feature (658)..(658): "n" may be a, t, c, g, other or unknown
  misc_feature (691)..(691): "n" may be a, t, c, g, other or unknown
  misc_feature (718)..(718): "n" may be a, t, c, g, other or unknown
tattgacgccatattggggccggcggcgggtgggagagttctacgagggaggggaagcggttggacgtgttcgcttgggttcctgctgcggcagctacctcgcaatctctctgcatcgatcgccgctcgcaagctactgaccgtactcgggcgtattaggagccgcgttccagcctcacaccccacggtgctgttttcgacttcagaaaggatctagtctcagcacaggagcgcctcaggcgcggcgcaaagctcgagcggacggcgggggcggccggagcctctctcgggggagccgcgcctgaggaggcggaagaacccccctgacgcgactggcgtgtgcttctgcccgccaccgcccctcccgctctcacccgggccgtccctggccactgcccctgccgcggaggcagcggcggcagcggctctcctttccacagccggcgctccgcgacccgcttggctcctgagcccgtcgggtaggctctcctcgagttcccgctcttcaccccttccctcaccctcttctttcgtcacccgtccccgaccccacccgagcccggcgcctcagctgcccccggccatggcgtgcggagccactctgaaaaggactctggatttcgacccgcttgttgagcccggcgttcccgaagcgcangcgatgtgcgccattgtcggcgcccaccttggncgctgccttcccgttgtcggcggccgngggcaacggcgcttcttctccg

SEQ ID NO: 2104 - DNA, 848 bp, Homo sapiens
  misc_feature (1)..(1): "n" may be a, t, c, g, other or unknown
  misc_feature (777)..(777): "n" may be a, t, c, g, other or unknown
  misc_feature (827)..(827): "n" may be a, t, c, g, other or unknown
  misc_feature (832)..(832): "n" may be a, t, c, g, other or unknown
ntactcccctattgactacagtgatggttctggaatgaatttgttgcagatacaggataaagtctggtcccaggcttgccttggtgcctgtgcacctcatttagaggagaagcttagcccaccagtaccatcatgctcagttgtgggagccatttcttcctactacgtccagcgctacggatttcctccaggatgcaaagtggtggccttcactggggacaacccagcgtcgctggcaggcatgagactggaggaaggtgacattgcggtcagcctgggcaccagtgacaccctgtttctctggctccaagagcccatgcctgccctggaaggccacatcttctgcaacccggttgactcccagcactacatggcactcctgtgctttaaaaatggctccctcatgagagagaagatccgcaacgagtctgtatcccgttcctggagcgatttctctaaggcactgcagtccacagagatgggcaacggtggaaacctgggtttttattttgatgtaatggagatcacccctgaaattattggacgtcataggtttaacacagaaaaccacaaggttgcagcattccctggggatgtggaggttcgagcactaattgaaggacaattcatggccaagaggattcacgcagaaggcctgggctatcgagtcatgtccaagacaaagattttggccacaggaggagcatctcacaatagagaaatcttacaggtgcttgcagatgtgtttgatgccccggtgtatggtatagacactgncaactcggcctgtgtgggttctgcataccgagcttttcatggtcttgcangtggnacagatgtgccctttt

SEQ ID NO: 2105 - DNA, 905 bp, Homo sapiens
  misc_feature (786)..(786): "n" may be a, t, c, g, other or unknown
  misc_feature (809)..(809): "n" may be a, t, c, g, other or unknown
  misc_feature (828)..(828): "n" may be a, t, c, g, other or unknown
ctcttaaaacctctcctgccaaggcccggtctcccatcaacagaagaggctctgtctcctccgtctctcccaagccaccttcatctttcaagatgtcgattagaaactgggtgacccgaacaccttcctcatcaccacccatcactccacctgcttcggagaccaagatcatgtcaccgagaaaagcccttactcctgtgagccagaagtcatcccaagcagaggcttgctctgagtctagaaatagagtaaagaggaggctagactcaagctgtctggagagtgtgaaacaaaagtgtgtgaagagttgtaactgtgtgactgagcttgatggccaagttgaaaatcttcatttggatctgtgctgccttgctggtaaccaggaagaccttagtaaggactctctaggtcctaccaaatcaagcaaaattgaaggagctggtaccagtatctcagagcctccgtctcctatcagtccgtatgcttcagaaagctgtggaacgctacctcttcctttgagaccttgtggagaagggtctgaaatggtaggcaaagagaatagttccccagagaataaaaactggttgttggccatggcagccaaacggaaggctgagaatccatctccacgaagtccgtcatcccagacacccaattccaggagacagagcggaaagacattgccaagcccggtcaccatcacgcccagcttcatgaggaaaatctgcacatacttccatagaaagtcccaggaggacttctggggtcctgaacactcaacagaantatagattctaatctgagtgagntactgagctttggtccctnaaacaagctgagctttgggccactaaaacaggtgaaaattccaggaatggactctataactctgggctttaagaaac

SEQ ID NO: 2106 - DNA, 832 bp, Homo sapiens
  misc_feature (4)..(4): "n" may be a, t, c, g, other or unknown
  misc_feature (803)..(803): "n" may be a, t, c, g, other or unknown
  misc_feature (816)..(817): "n" may be a, t, c, g, other or unknown
gacntccactgggaagaacccagcagccggaaggagtctcgagggggcccttcccgccggggtgtggccctgcttcgcccagagcccctgcaccgggggacagcagacaccctcctcaaccgggttaagaagctgccttgtcagatcaccagctacctggtggcgcacaccctagggcgccggatgctgtatccaggctctgtgtacctgctgcagaaggccctcatgcctgtgctgctgcagggccaggcccgactggtggaagagtgtaatgggcgccgggcaaagctgctggcctgtgatggcaatgagattgacaccatgtttgtggaccggcgggggacagctgagccccagggacagaagctggtgatctgctgtgaggggaatgctgggttttatgaggtgggctgcgtctccacgcccctggaagctggatattcagtcctgggctggaatcatccaggctttgctggaagcacgggggtgccattcccgcagaatgaggctaatgccatggatgtggtggtccagtttgccatccaccgcctgggcttccagccccaggacatcatcatctacgcctggtccatcggcggcttcactgccacgtgggcagccatgtcctacccagatgttagtgccatgatcctggatgcctcctttgatgacctggtgcccttggccttgaaggtcatgccagacagctggaaggggcctggtgaccaaggaccggtgaggcagcatcttcaatctaaacaacgcggaagcacttgggcaagataccaagggtcctggactgnttgaatcccggannaaccaaagggattga

SEQ ID NO: 2107 - DNA, 844 bp, Homo sapiens
  misc_feature (809)..(809): "n" may be a, t, c, g, other or unknown
  misc_feature (813)..(813): "n" may be a, t, c, g, other or unknown
  misc_feature (843)..(843): "n" may be a, t, c, g, other or unknown
gtgcgaaactcattccccagagcaacagtgtagagaggtggaacctgatgggagccccgccctcacagacaaactcctggagctgtcaagacagcttgggcatggattcctctctgccttctgccatgtggacacgtggccttcctcccctctctcctccggggaatgcagtgtttgggcgccatcttggaagcagagatcaggcctcaccagacaccaagcctgctggcaccatgaccctggactcccaacctccacagctgggaaagaactctgctccctagaaattacccaggctcgctcaggcacccactgactccagcctcatggaaccaccattcaccaggcttgaggggaggatgtcacggcgcgctgctcccttcggtgccagccaggatggggccgggtgggtgcagctggtgaaaagaaatgcagccccccagcccctgcagaccaagccgaacagcccagctcgcgggtggatcacagggcacccagcagccgccttccctccggaagagccaagaaggcttccaagaccagaaatgcccccagtgtggctgtgcctgtccccggtgccccgcagctggggggcagcatacccaaacagatgcaccctgcccatgatggcaccccagggacccccatcctcaggacccttcagtcgttcaagctggaattggcaggtttctgcctggataggcatcggcttcagaagtcttaagtgctgcttggcaaggaaaatgcagggcaaggaagggctgggccttaggttcgaggcttccaaggtgcaagccccccaatttcanttgnaggggcccaagggggggcccaagaacaagnc

SEQ ID NO: 2108 - DNA, 873 bp, Homo sapiens
  misc_feature (707)..(707): "n" may be a, t, c, g, other or unknown
  misc_feature (794)..(794): "n" may be a, t, c, g, other or unknown
  misc_feature (831)..(831): "n" may be a, t, c, g, other or unknown
  misc_feature (856)..(856): "n" may be a, t, c, g, other or unknown
gccgctcctgctcgcctttcccttcgctgggcgagaggtgtctatggggcacccgctgccgccgccgctaccgccaccgccaccgccaccgccgccgagtgctgtctctatggcgaggaggaggaggaggagcgcgagctcagcgatacaagtacataaataaaggataaaatattttatgaaacaaatcttcaatcaagtataacattttgatgcttggcatctagactcccttgtgccctcactatgccagcggcaactgtagatcatagccaaagaatttgtgaagtttgggcttgcaacttggatgaagagatgaagaaaattcgtcaagttatccgaaaatataattacgttgctatggacaccgagtttccaggtgtggttgcaagacccattggagaattcaggagcaatgctgactatcaataccaactattgcggtgtaatgtagacttgttaaagataattcagctaggactgacatttatgaatgagcaaggagaataccctccaggaacttcaacttggcagtttaattttaaatttaatttgacggaggacatgtatgcccaggactctatagagctactaacaacatctggtatccagtttaaaaaacatgaggaggaaggaattgaaacccagtactttgcagaacttcttatgacttctggagtggtcctctgtgaagggggtcaaatggntgcatttcatagcgggtacgactttggctacttaatcaaaaatcctaaccaactctacttggctgaagaaaacttgcttcttgaganccttcgatgtttttctgcattatgatgtgaagacctnatgaagagctgaaaaatctaaaggnggataccggaggtggca

SEQ ID NO: 2109 - DNA, 691 bp, Homo sapiens
  misc_feature (662)..(662): "n" may be a, t, c, g, other or unknown
  misc_feature (685)..(685): "n" may be a, t, c, g, other or unknown
  misc_feature (688)..(688): "n" may be a, t, c, g, other or unknown
tcctgaattcgagcggctctcataaagatctggctggcaagtatcgtcagatcctggaaaaagccattcagttatctggagcagaacaactagaagctttgaaagcttttgtggaagcaatggtaaatgagaatgtcagtctcgtgatctcgcggcagttgctgactgatttttgcacacatcttcctaacttgcctgatagcacagccaaagaaatctatcacttcaccttggaaaagatccagcctagagtcgtttcatttgaggagcaggttgcttccataagacagcatcttgcatctatatatgagaaagaagaagattggagaaatgcagcccaagtgttggtgggaattcctttggaaacaggacaaaaacagtacaatgtagattataaactggagacttacttgaagattgctaggctatatctggaggatgatgatccagtccaggcagaggcttacataaatcgagcatcgttgcttcagaatgaatcaaccaatgaacaattacagatacattataaggtatgctatgcacgtgttcttgattatagaagaaaattcattgaagctgcacaaaggtacaatgagctctcttacaagacaatagtccacgaaagtgaaagactagaggccccaaaacatgctttgcactgnacgatcttagcatcagcaggcancanccg

SEQ ID NO: 2110 - DNA, 720 bp, Homo sapiens
  misc_feature (3)..(4): "n" may be a, t, c, g, other or unknown
  misc_feature (326)..(326): "n" may be a, t, c, g, other or unknown
  misc_feature (624)..(624): "n" may be a, t, c, g, other or unknown
  misc_feature (692)..(692): "n" may be a, t, c, g, other or unknown
  misc_feature (703)..(703): "n" may be a, t, c, g, other or unknown
tcnnaagtcgagttagtctagttagtatcggtctgttatctccttttgcgcgacacggtctcagctgttccgcctgaggcgagtgacgctggccgccaacgaggtatacgtactgggaccctcgccctcagtctcgtctccggcgcggctacctgccccgttttccctgtgagttgacctgctccgggccgcgggccgccaatggcaggggccgctccgaccacggccttcgggcaggcggtgaccggcccgccgggctcagggaagaccacgtactgcctgggcatgagtgagttcctgcgcgcgctgggccggcgcgtggcggnggtgaacctggacccggccaacgaggggctgccgtacgagtgtgccgtggacgtgggcgagctggtggggctgggcgacgtgatggacgcgctgcgcctggggcccaacggcggcctgctctactgcatggagtacctggaagccaacctggactggctgcgtgccaagctcgaccccctccgcggccactacttcctcttcgactgcccaggccaggtggagctctgcacgcatcacggcgccttgcgcagcatcttctcccaaatggcgcagtgggacctcaggctgactgccgtncacctcgtggattctcactactgcacagaccctgcaagttcatttcaatacttgtgtacctccctggncaccatgctgnacgtggaactgccacat

SEQ ID NO: 2111 - DNA, 460 bp, Homo sapiens
  misc_feature (436)..(436): "n" may be a, t, c, g, other or unknown
  misc_feature (451)..(451): "n" may be a, t, c, g, other or unknown
  misc_feature (454)..(454): "n" may be a, t, c, g, other or unknown
gctcccagggttgctagagctccttgtagaatatttccgacgatgcctgattgagatctttggcattttaaaggagtatgaggtgggtgacccaggacagagaacgctactggatcctgggaggttcagcaaggtgtctagtccagctcccatggagggtggggaagaagaagaagaacttctaggtcctaaactagaagaggaagaagaagaggaagtagttgaaaatgatgaggagatagccttttcaggcaaggacaagccagcttcagagaatagtgaggagaagctgatcagtaagtttgacaagcttccagtaaagatcgtacagaagaatgatccatttgtggtggactgctcagataagcttgggcgtgtgcaggagtttgacagtggcctgctgcactggcggattggtgggggggacaccactgancatatccagacccanttnagagca

SEQ ID NO: 2112 - DNA, 800 bp, Homo sapiens
  misc_feature (613)..(613): "n" may be a, t, c, g, other or unknown
  misc_feature (662)..(662): "n" may be a, t, c, g, other or unknown
  misc_feature (687)..(687): "n" may be a, t, c, g, other or unknown
  misc_feature (713)..(713): "n" may be a, t, c, g, other or unknown
  misc_feature (763)..(763): "n" may be a, t, c, g, other or unknown
  misc_feature (788)..(788): "n" may be a, t, c, g, other or unknown
actctgcctccaaagccaccgtccccccgaggcaccactgcatcccccaaggggcgggttcggaggaaggaggaggcaaaggagagccccagcgccgcagggcccgaggacaagagccagagcaagcgcagggccagtaacgagaaggagtcagcagccccagcctcaccggcaccttcgccggcgccctcgcccaccccagccccgccccagaaggagcagccccccgcggagacccctacagacgctgctgtcttgacctcacccccagcccctgctcccccggtgacccctagcaaaccaatggccggcaccacagaccgagaagaagccactcggctcttggctgagaagcggcgccaggcccgggagcagcgggagcgcgaggagcaggagcggaggctgcaggcagaaagggacaagcgaatgcgagaggagcagctggcacgggaggccgaggcccgggcggagcgggaggcggaggcccggaggcgggaggagcaggaggcacgagagaaggcgcaggccgagcaggaggagcaggagcggctgcagaagcagaaagaggaggccgaagctcggtcgcgggaagaggcggagcggcagcgtctgnagcgggaaaagcactttcagcagcaggagcaagagcggcaagagcgcanaaagcgtctggaggagatcatgaanaggactcggaagtcagaagtttctgnaaccaagaagcaggacaagcaaggaggccaacgccaacggtttcaagccnaaaacctgttaaagctgttggaggntcgttcccaagg

SEQ ID NO: 2113 - DNA, 516 bp, Homo sapiens
  misc_feature (443)..(443): "n" may be a, t, c, g, other or unknown
  misc_feature (500)..(500): "n" may be a, t, c, g, other or unknown
  misc_feature (516)..(516): "n" may be a, t, c, g, other or unknown
ctaaactgggttaaggaagtaaccagagacccttccatcttgactatccccatgcatttctgggcacttttttaccgaaagagagcaatggaccaggctcgagaactggtcaacatgttggagaagatagccggccccattggcatgcgtatgagcccaccggcctgggttgaactaaaggatgaccgaatagagacttatgtcagaaccattcaatccacgttaggagctgaggggaagatacagatggttgtttgcatcatcatgggcccacgagatgatctctatggggccatcaataagctgtgctgtgtgcagtccccagtgccctcccaggttgtcaatgttcgaaccattggtcagcccaccaggcttaggagtgtggcccagaagattttacttcagattaactgtaaattgggtggtgagctctggggagtggntattcctctgaaacagttaatggtgatcgggatggatgcttaccatgaccccagtanaggcatgcgctccgcn

SEQ ID NO: 2114 - DNA, 800 bp, Homo sapiens
  misc_feature (723)..(723): "n" may be a, t, c, g, other or unknown
  misc_feature (755)..(755): "n" may be a, t, c, g, other or unknown
  misc_feature (792)..(792): "n" may be a, t, c, g, other or unknown
acaagaaaatgttactttaatatataatccatcagacagaggaatcaataataaaactgcaacagaactatcaactgtatacttatttggtggagatgaaatttcaagacagcagtatcgcagggccctgttacataaaccagagatgataaaacagatacttccagaacatagtgtgcttcaaaacattaattttgttgaagcatttcaagatgagctattagtaactgaagtatatgatcttccccaacgacctaatgatgttcagctcttttatggaagcatgtgtaaaattatactttcagtaattggagaattcagagattgcatttctagcagagaattccttcagccttcttccaaagctagcttggaatctacaagcgacttgggagcttctgggaaacatggtggcaacgtctctttggatgttttaccagtcaaaggtcctcagggttctcctcttctctcacgggcggctcgcccgcctccggatcagctggcctccgaagagccgtggactgtcctacccgagcacttgattctggtagctccttctccttgtgacatggcaaaaactggacgtttccagattgtgaataactctgtgaggttactgagatttgagctgtgctggccagcgcattgcctcacagtcacgccgcagcatggatgtgtcgcgccagagagtaaactacaaattcttgtgagtcctaattcctncttatccacaaaacagtcaatggttcccgggnagtgggtttggactatatacactggggacgatggacngaagaaaa

SEQ ID NO: 2115 - DNA, 813 bp, Homo sapiens
  misc_feature (738)..(738): "n" may be a, t, c, g, other or unknown
  misc_feature (747)..(747): "n" may be a, t, c, g, other or unknown
  misc_feature (798)..(798): "n" may be a, t, c, g, other or unknown
agtagcctttgtcccctgtccctgttccccccaccccttccctaaatctggaccttggcacctgctaggaagagccttggacccttccagttgcgtaaagcaaacctaccccggatctctggcttcagccgccagggggcagtggcagccctggggccctttcccttctggaggaagcacaagcctcagggaaggggaagcaggatgcggagggccaaagcccgggacctctacttgaacagttctactggggaggctggagaactaaggaaacacctgtacatagtgtccgctaccctgactcccgcttagcacacccttaggcaggcgccccttccacctttccccgagaccgtcgtcgctggagggggcagggtccagcccgcctggatcggtggtgtgcacctgatgggatttgggaaatgggctatccgtaaagctttatcttgcttggcttagctgtgagaagtggttctcttcctctggtcccttctggggactctgtttccccatttcttgctgctgtgtccctcaccagttccttgcaggattccctcctttttaaatgcccttgaatctagctttgccttggagaccccagtgggtgctgctcctgccgttttcttcctgccaaggcctgaatcaaatggttcatctccaaccctttgccaagtttggcccctcaaaagctttggtggcttcaaggactggtagccctggcagaagccagggggttgnaaggggagnaagctttttggaacaaggcaaggatgcccaaccggttgctttcaagcttgncttccttggcccaag

SEQ ID NO: 2116 - DNA, 730 bp, Homo sapiens
  misc_feature (415)..(415): "n" may be a, t, c, g, other or unknown
  misc_feature (645)..(645): "n" may be a, t, c, g, other or unknown
  misc_feature (681)..(681): "n" may be a, t, c, g, other or unknown
  misc_feature (705)..(705): "n" may be a, t, c, g, other or unknown
tttacgcccccaggatctggggcgtgcaaatttatcggctcacttcattcgtacagtttctcctctaagcacacccgagaaaggccatctgtcccccgagagcccattgaccgcaagaggccgaagaaagatgtggaaccaagctgcagtgggagcagcctgggacccgacaagggcctggcccagagccctcccagctcatcacttaccgcgacaccgcagaagccttcccagagcccctctgcccctcctgccgacgtcaccccaaagccagccacggaagccgtgcagagcgagcacagcgacgccagccccatgtccatcaacgaggtcatcctgtcggcgtcaggggcctgcaagctcatcgactcactgcactcctactgcttctcctcccggcagaacaagagccagntgtgctgcctgcgggagcaggtggagaagaagaacggcgagctgaagagcctgcggcagagggtcaagccgctccgacagccaggtgcggaagctacaggagaagctggatgagctgaggagagtgagcgtcccctatccaagtagcctgctgtcgcccagcccgcgagccccccaagatgaacccagtggtggagccactggtcctggatgctgggcacctggctgtcnggacccacctggagccgggacctaccccacacttgnagccctttcagtacctggaagganggttcacattttcccacgtgggcca

SEQ ID NO: 2117 - DNA, 703 bp, Homo sapiens
  misc_feature (642)..(642): "n" may be a, t, c, g, other or unknown
  misc_feature (693)..(694): "n" may be a, t, c, g, other or unknown
ttcatgattatagtgcagcagctgccccgagccccgtgcttggcaacattccccccaacgatgggatgccgggaggccccatcccgccaggtttctttcagggtcctccggggtcacagccctcgccgcacgcacagcctccacctcacaatcctagcagcatgatgggaccccacagtcagccttttatgtcaccgcgatacgcaggcggccccaggcccccgatcagaatgggaaaccagcctccgggaggagttcctgggacacagccattgctgcccaattctatggatcccacacgacaacaaggccaccccaacatgggaggatcaatgcagagaatgaaccctccccgaggcatggggcccatgggtcccggcccacagaattacggcagcggcatgagaccaccacccaactccctcggccccgccatgcccgggattaacatgggcccgggagctggcagaccctggcccaatcctaacagtgctaactcaattccatactcctcctcatcacctggtacctatgtgggaccccctggtggtggcggtcctccaggaacacccattatgcccagtcccgcagattcaacaaattccagtgacaacatctacacaatgattaatccagtgccgnctgggaggcaagcggtccaacttcccgatgggtcccggctcggacggtccnnatgggcggg

SEQ ID NO: 2118 - DNA, 748 bp, Homo sapiens
  misc_feature (677)..(677): "n" may be a, t, c, g, other or unknown
  misc_feature (717)..(717): "n" may be a, t, c, g, other or unknown
  misc_feature (722)..(722): "n" may be a, t, c, g, other or unknown
gtgtctatgtcaatgtgtctgtccttcactcctccattgtctgccgccactgctgctgctgctgctgctgccgctgctgctgcacgaatcgccgcagcccccagccttgcgcgtcgtcgctacctcctcggacagaaattttatgaataagcatcagaagccagtgctaacaggccagcggttcaaaactcggaaaagggatgaaaaagagaaattcgaacccacagtcttcagggatacacttgtccaggggcttaatgaggctggtgatgaccttgaagctgtagccaaatttctggactctacaggctcaagattagattatcgtcgctatgcagacacactcttcgatatcctggtggctggcagtatgcttgcccctggaggaacgcgcatagatgatggtgacaagaccaagatgaccaaccactgtgtgttttcagcaaatgaagatcatgaaaccatccgaaactatgctcaggtcttcaataaactcatcaggagatataagtatttggagaaggcatttgaagatgaaatgaaaaagcttctcctcttccttaaagccttttccgaaacagagcagacaaagttggcgatgctgtcggggattctgctgggcaaatggcaccctgcccgccaccatcctcaccaggtctctttcaccgacagcttangtcaaaagaaggcatttggcgggcctcaatttgcttggcnaagcntttttcaaaaggcattgggattggcc

SEQ ID NO: 2119 - DNA, 802 bp, Homo sapiens
  misc_feature (643)..(643): "n" may be a, t, c, g, other or unknown
  misc_feature (662)..(662): "n" may be a, t, c, g, other or unknown
  misc_feature (729)..(729): "n" may be a, t, c, g, other or unknown
  misc_feature (776)..(776): "n" may be a, t, c, g, other or unknown
  misc_feature (782)..(782): "n" may be a, t, c, g, other or unknown
tacgtgaagcaccgacacaaactggagaatggtctggctgcgctcagtcccttaagcaagggctccatggaggctggcccttacctgccccgagccctgcagcagcctctggaacagctgactcggtatgggcggctcctggaggagctcctgagggaagctgggcctgagctcagttctgagtgccgggcccttggggctgctgtacagctgctccgggaacaagaggcccgtggcagagacctgctggccgtggaggcggtgcgtggctgtgagatagatctgaaggagcagggacagctcttgcatcgagaccccttcactgtcatctgtggccgaaagaagtgccttcgccatgtctttctcttcgagcatctcctcctgttcagcaagctcaagggccctgaaggggggtcagagatgtttgtttacaagcaggcctttaagactgctgatatggggctgacagaaaacatcggggacagcggactctgctttgagttgtggtttcggcggcggcgtgcacgagaggcatacactctgcaggcaacctcaccagagatcaaactcaagtggacaagttctattgcccagctgctgtggagacaggcagcccacaacaaggagcttcgagtgccagcanatggtgtccatgggcattngggaataaacccttcctgggacatcaaagccctttggggaagccggacccttgaatgcccctggttnaacttggaaagaagccccaagaaacactttggacttctttctggganaatggnggtcccccagggacccaaag

SEQ ID NO: 2120 - DNA, 759 bp, Homo sapiens
  misc_feature (1)..(1): "n" may be a, t, c, g, other or unknown
  misc_feature (3)..(3): "n" may be a, t, c, g, other or unknown
  misc_feature (684)..(684): "n" may be a, t, c, g, other or unknown
  misc_feature (751)..(751): "n" may be a, t, c, g, other or unknown
  misc_feature (757)..(757): "n" may be a, t, c, g, other or unknown
ntnactttatgtcttttacctcacacattgatgagttatatgaaagtgctaaaaagcagtctggaggaaaggttgcagattatattcctcaactggccaaattcagtcccgatttgtggggtgtgtctgtttgtacagtagatggacagagacattctactggagataccaaagttcccttctgtcttcagtcctgtgtaaaacctttgaaatatgccattgctgttaatgatcttggaactgaatatgtgcatcgatatgttggaaaagagccgagtggactaagattcaacaaactatttttgaatgaagatgataaaccacataatcctatggtaaatgctggagcaattgttgtgacttcactaataaagcaaggagtaaataatgctgaaaaatttgactatgtcatgcagtttttgaataagatggctggtaatgaatatgttggattcagtaatgcaacgtttcagtctgaaagagaaagtggagatcgaaattttgcaataggatattacttaaaagaaaagaagtgttttccagaaggcacagacatggttggtatattagacttctacttccagctgtgctccattgaagtgacttgtgaatcagccagtgtgatggctgcgacactggctaatgggtggtttctgcccaattactggtgaaagagtacctganccctggaagcaagtttcggaaataccattggagtttggatgccattcctgtggccatggtatggacnttcttnaa

SEQ ID NO: 2121 - DNA, 804 bp, Homo sapiens
  misc_feature (646)..(646): "n" may be a, t, c, g, other or unknown
  misc_feature (782)..(782): "n" may be a, t, c, g, other or unknown
ccctatctggaaggcattctctcccaggtgattcatctggagaaaatcactagtgaaatgggttctgcgtcacaggctaatatccgtctcacatctcttaaaaagacactggctaccacacttgcaccccgagtcctgttgcccgccatcaaaaaaacttacaagcagattgagaagaactggaagaatcacatgggtccgtttatgagcatcttgcaagagcatattggggtgatgaagaaggaagagctcacctcccatcagtctcagctaaccgcctttttcctggaggccctggacttccgagcccagcactctgagaacgatctggaggaagttggaaaaacggaaaattgtatcattgactgtctagtagccatggttgtcaaactttccgaggtcacattcaggcccctgttcttcaagctgtttgattgggctaaaacagaagatgccccaaaggacaggttgttgacattttacaacttggcagattgcattgctgaaaagctgaaagggctttttactctgtttgccggccacttagtgaagccttttgctgacaccttgaaccaggtgaacatctccaaaacagatgaagcattttttgactctgaaaatgaccctgaaaagtgctgcttgctgntgcagtttattttgaactgtttataccaaaatcttcctttttgatacccagcattttataagtaaaaggagagagcagaagccttggatgaatgcccttggtgggatcagcttggaaaaacaggcttgggggggangaagaggaaatttccagggcct

SEQ ID NO: 2122 - DNA, 802 bp, Homo sapiens
  misc_feature (659)..(659): "n" may be a, t, c, g, other or unknown
  misc_feature (695)..(695): "n" may be a, t, c, g, other or unknown
  misc_feature (709)..(709): "n" may be a, t, c, g, other or unknown
  misc_feature (780)..(780): "n" may be a, t, c, g, other or unknown
gaattacactattgtactggagcttatcggatttcacctgtagatgtaaatagtagaccttcctcctgccttactaattttcttctaaatggtcgttctgttttattggaacaaccacgaaagtcaggttctaaagtcattagtcatatgcttagtagccatggaggagagattttttttgcacgtccttagcagttctcgatccattctagaagatccaccttcaattagtgaaggatgtggaggaagagttacagactaccggattacagtagttccattagccagtgttattgtgaaagaatctctgacagaagaagatgtgttaaactgtcaaaaaacaatatacaacttagttgatatggaaagaaaaaatgatcctctacctatttccacagttggtacaagaggaaagggccctaaaagagatgaacaataccgtatcatgtggaatgaattagaaacccttgtcagagcccatatcaacaactcagagaaacatcaaagagtcttggaatgtctgatggcatgcaggagcaaacccccagaagaggaagaacgaaagaaacgaggaagaaagagggaagacaaagaggacaagtcagagaaagcagtgaaagattatgaacaggaaaagtcttggcaagactcagagagantaaaagggaatcttaagagcgtggaaaaggaagaantggctgaagctganattataaaaagattcgcctggatccccagaaccttccaaacaaaaaacccccttggttggaaatgggatgnaaccttccccaagtgggaaaaa

SEQ ID NO: 2123 - DNA, 783 bp, Homo sapiens
  misc_feature (688)..(688): "n" may be a, t, c, g, other or unknown
  misc_feature (709)..(709): "n" may be a, t, c, g, other or unknown
  misc_feature (771)..(771): "n" may be a, t, c, g, other or unknown
agattgctccaattgtgtcagcgaactatggctcttcctgtaggacgaggaatgtttaccttgttttcgtaccatcctgttccaacagagccattgcctattcctaaattgaatctgactgggcgtgcccctcctcggaacacaacagtagaccttaatagtggaaacatcgatgtgcctcccaatatgacaagctgggccagctttcataatggtgtggctgctggcctgaagatagctcctgcctcccagatcgactcagcttggattgtttacaataagcccaagcatgctgagttggccaatgagtatgctggctttctcatggctctgggtttgaatgggcaccttaccaagctggcgactctcaatatccatgactacttgaccaagggccatgaaatgacaagcattggactgctacttggtgtttctgctgcaaaactaggcaccatggatatgtctattactcggcttcttagcattcgcattcctgctctcttacccccaacgtccacagagctggatgttcctcacaatgtccaagtggctgcagtggttggcattggccttgtatatcaagggacagctcacagacatactgcagaagtcctgttggcttgagataggacggccttctggtcctgaaatgggaatactgcactgacagagagtcatacttccttanctgctgggcttggccctgggncatggtctgctttgggggcatggcaagcaaatttggatagggtatggctggatcttcaatgngccctgaacaag

SEQ ID NO: 2124 - DNA, 722 bp, Homo sapiens
  misc_feature (569)..(569): "n" may be a, t, c, g, other or unknown
  misc_feature (696)..(696): "n" may be a, t, c, g, other or unknown
  misc_feature (700)..(700): "n" may be a, t, c, g, other or unknown
  misc_feature (702)..(702): "n" may be a, t, c, g, other or unknown
ccctactgaagtggaggaggtggtccccgcactggaacccacagaaacgctgctgagtgagaaggagataaacgcaagggaagagagccttgtggaagagctgtcccctgccagcgagaagaagcccgtgccgccgtctgagggcaagtctagactgtcccccgccggtgagatgaagcccatgccgctgtctgagggcaagtctatactgctgtttggaggggctgctgctgttgccatcctggcagtggccatcggggtagccctggctctgagaaagaaataggaggcttttcagaagagaaagacagaaggatgtaaggttggagttgtattggctggaatttgaacctccagcagctgtctggacatttgtggaacactctgggataattggggacttctgctcaacatggcagtggcatgttaggcatgttagggcttgaggtggggcattcacattcatctgactgtaaatcccaagggcctccgctcatgctaaattgagaatcttaggggtaaagcaccccctccaggaccggtttgctcagccttggcactagtgctgntctgaccattctctgtgttggggctgtcctgtgtatggtgggctccacccactagatgccagtggcaccccctcccagagatgacaaacgaaaaatgtctctagacattgccaaatgtccccttgtnaacntnccctaattgagaccccactg

SEQ ID NO: 2125 - DNA, 820 bp, Homo sapiens
  misc_feature (718)..(718): "n" may be a, t, c, g, other or unknown
  misc_feature (794)..(794): "n" may be a, t, c, g, other or unknown
  misc_feature (796)..(796): "n" may be a, t, c, g, other or unknown
ccaaacttatatatatactccaaaaagtcttcaacaagcagacgacagcaccctcttaataagcatctctttaagccttccactttcatgacttcacatgaaccgccagtgtatatggatgaagatgatgaccgatcttgttttcatagccacatgaacactgctgttgaagatgcatcagatgacgaaagtattcctatcatgtataggaatttacctgaatataaagaactattacagtttaaaaagttaaagaagcagaaacttcagcaaatgcaagctgaaagtggatttgtgcaacatgtgggctttaagtgtgataactgtggcatagaacccatccagggtgttcggtggcattgccaggattgtcctccagaaatgtctttggatttctgtgattcttgttcagactgtctacatgaaacagatattcacaaggaagatcaccaattagaacctatttataggtcagagacattcttagacagagactactgtgtgtctcagggcaccagttacaattaccttgacccaaactactttccagcaaacagatgacatggaagagaacatcatttactagtcctcttcaacacgtagcaatggtatcattggtaattatgtgcacagtttggaaagattctctgctttcccagaaatgacactcacagcatgagagcttcctgagtgttctcgcaagtcagctctgcaccgntgtggctctagatcactgttcagcagctgaacattcctggtgagcaaaggtttccctgggggaattttcaccatgngntttaaggtggtgacttaaatgggc

SEQ ID NO: 2126 - DNA, 623 bp, Homo sapiens
  misc_feature (1)..(1): "n" may be a, t, c, g, other or unknown
  misc_feature (579)..(579): "n" may be a, t, c, g, other or unknown
  misc_feature (599)..(599): "n" may be a, t, c, g, other or unknown
  misc_feature (614)..(614): "n" may be a, t, c, g, other or unknown
nggctcagatgtcacagggtttctattgcctgggctggagtgtagtggcatgatcatggctcactatagccttgacttcctgggctcaagcgatccttccgcctcagcctcctgagtagctgggactacagagacggggtttcgctcttgtgaccaggctggaatgcaatggcgtgatctcggctcaccgcaacctccgacctctgggttcaagtgattctcctgcctccgcccatttcatcttattgtctcctttactgtgcaggagcttggatgtagtcccatttatttattttgagcttttgatatgatatccaaaaaaatcattgccaaggccagtgtccaggagcttttcccctgggctgtaagagttttatagtttctatttttatatttaggtcttttatccattttgagttgattttttgtgtgtaatagaagatatgggtccagtttcattcttttgcatgtggaaatctagtttattagcaccatttattgaagggattatcttttctccattgtgtcttcttggtaccctcatcaaaaattagttgacccatatgtgtttggatttgnttctggggtctctattctgnttcactggtctatgngtctgtttg

SEQ ID NO: 2127 - DNA, 804 bp, Homo sapiens
  misc_feature (645)..(645): "n" may be a, t, c, g, other or unknown
  misc_feature (680)..(680): "n" may be a, t, c, g, other or unknown
  misc_feature (753)..(753): "n" may be a, t, c, g, other or unknown
  misc_feature (780)..(780): "n" may be a, t, c, g, other or unknown
  misc_feature (798)..(798): "n" may be a, t, c, g, other or unknown
cacgaaatacgagaggcaatccagcatccagcagatgagaagttgcaagagaaggcatggggtgcagttgttccactagtaggcaaattaaagaaattttacgaattttctcagaggttagaagcagcattaagaggtcttctgggagccttaacaagtaccccatattctcccacccagcatctagagcgagagcaggctcttgctaaacagtttgcagaaattcttcatttcacactccggtttgatgaactcaagatgacaaatcctgccatacagaatgatttcagctattatagaagaacattgagtcgtatgaggattaacaatgtaccggcagaaggagaaaatgaagtaaataatgaattggcaaatcgaatgtctttgttttatgctgaggcaactccaatgctgaaaaccttgagtgatgccacaacaaaatttgtatcagagaataaaaatttaccaatagaaaataccacagattgtttaagcacaatggctagtgtatgcagagtcatgctggaaacaccggaatacagaagcagatttacaaatgaagagacagtgtcattctgcttgagggtaatggtgggtgtcataatactctatgaccacgtacatccagtgggagcatttgctaanacttccaaaattgatatgaaaggttggatcaaagntcttaaggaccaacctcctaatagtgcggaaggtcttctaaaatgctctcaggtcacaacaaaaaccatttgnatgatgaagactaccttccaagcaaantaaatccatgcttgcaantaacca

SEQ ID NO: 2128 - DNA, 555 bp, Homo sapiens
  misc_feature (392)..(392): "n" may be a, t, c, g, other or unknown
  misc_feature (395)..(395): "n" may be a, t, c, g, other or unknown
  misc_feature (495)..(495): "n" may be a, t, c, g, other or unknown
  misc_feature (497)..(497): "n" may be a, t, c, g, other or unknown
  misc_feature (554)..(554): "n" may be a, t, c, g, other or unknown
aaaaaaatctgatcccagccacaccaggagctgaagccatggcctcaaagcctgagaagagggtggcatcgtctgtctttatcaccctggcacccccgcgccgcgatgtggccgtggcggaggaagtgaggcaggcagtttgtgaggcccggcgtggccgcccctgggaggctcctgcccccatgaagacacccgaggctggcttggcggggaggcccagcccctggacaacccctggcagagctgcagccacagtgccggctgcacctatgcagctcttcaatggagacatctgtgccttctgccacaagaccgtgttcccccgagagctggctgtggaggccatgaagaggcagtaccatgcccagtgcttcacgtgccgcacctgccgncgncagctggctgggcagagcttctaccagaaggatgggcgacccctctgcgaaccctgctaccaggacacactggagaggtgcggcaagtgtggcgaggtgntncgggaccacatcatcagggccctgggccaaggccttccacccctcctgcttcacgtng

SEQ ID NO: 2129 - DNA, 599 bp, Homo sapiens
  misc_feature (474)..(474): "n" may be a, t, c, g, other or unknown
  misc_feature (538)..(538): "n" may be a, t, c, g, other or unknown
  misc_feature (551)..(551): "n" may be a, t, c, g, other or unknown
  misc_feature (577)..(577): "n" may be a, t, c, g, other or unknown
gtatgctatggatgcctttgtaggacctatttggagcatggctgccagccccagtggctctcaacttttggttggttgtgaagatggatctgtgaaactatttcaaattaccccagacaaaatccagtttgaaagaaattttgatcggcagaaaagtcgcatcctgagtctcagctggcatccctctggtacccacattgcagctggttccatagactacattagtgtgtttgatgtcaaatcaggcagcgctgttcataagatgattgtggacaggcagtatatgggcgtgtctaagcggaagtgcatcgtgtggggtgtcgccttcttgtccgatggcactatcataagtgtggactctgctgggaaggtgcagttctgggactcagccactgggacgcttgtgaagagccatctcatcgctaatgctgacgtgcagtccattgctgtagctgaccaagaagacagtttcgnggtgggcacagccgagggaacagtcttccattttcagctggtccctgtgacatctaacagcagngagaagcactggngtgccggacaaaaccgttccagcatnacactcatgacgtgccgcactg

SEQ ID NO: 2130 - DNA, 781 bp, Homo sapiens
  misc_feature (611)..(611): "n" may be a, t, c, g, other or unknown
  misc_feature (712)..(712): "n" may be a, t, c, g, other or unknown
  misc_feature (739)..(739): "n" may be a, t, c, g, other or unknown
  misc_feature (763)..(763): "n" may be a, t, c, g, other or unknown
ataaaaaaaaaaaaaaaaaaaaaaactataactccaccagaaaagttttttctttcccagctgatgctggcacccccacgggaactcttcaaaaagacgcctcgccagattgcactgatggacgttggaaacatgggccagtctgtggacattagtgggcttcagttagccttggccgaacgccaatctgaattgccaacgcaaagcaaagcgagcttccccagtattctcagtgacccagacccggattcttctaattctggatttgacagctcagttgcctctcagatcacagaagctttagtcagcggaccaaagccacctattgaaagccattttcgaccagagtttattcgtccaccgcctccactccacatttgtgaggatgaacttgcttggctaaaccccacggagcctgaccacgcgatccagtgggataaatcgatgtgtgttaagaatagcactggtgtggagatcaaacgaataatggccaaagccttcaaaagccccttatcctctccccaacaaacacagctacttggtgagttggaaaaagaccccaaacttggctaccatattggcctcaccccagccaaacttcctgaccttgnggaaaacaaccctttagtcgctatagaaatgttgctgaaattaatgcagtcaagccagatcactgagtatttctctggcctggtcaatatgggacatgtcnttacattcaatggaaagtggaaatcgnctaactacagctgttgactacctnctgaatttattcccttta

SEQ ID NO: 2131 - DNA, 800 bp, Homo sapiens
  misc_feature (783)..(783): "n" may be a, t, c, g, other or unknown
  misc_feature (800)..(800): "n" may be a, t, c, g, other or unknown
gtccatggggaagctgccattttcttgaaaaagccagaattgcacagaaaggaggtgctgaagcaatgttagttgtcaataacagtgtcctatttcctccctcaggtgacagatctgaatttcctgatgtgaaaatactgattgcatttataagctacaaagactttagagatatgaaccagactctaggagataacattactgtgaaaatgtattctccatcgtggcctaactttgattatactatggtggttatttttgtaattgcggtgttcactgtggcattaggtggatactggagtggactagttgaattggaaaacttgaaagcagtgacaactgaagatagagaaatgaggaaaaagaaggaagaatatttaacttttagtcctcttacagttgtaatatttgtggtcatctgctgtgttatgatggtcttactttatttcttctacaaatggttggtttatgttatgatagcaattttctgcatagcatcagcaatgagtctgtacaactgtcttgctgcactaattcataagataccatatggacaatgcacgattgcatgtcgtggcaaaaacatggaagtgagacttatttttctctccggactgtgcatagcagtagctggtgtttgggctgtgtttcgaaatgaagacaggtggcttggattttacaggatatcttggggattgctttctggctgaatttaattaaaacactgaagttgcccaacttcaagtcatgtgtgatcttctaggccttctcctcctctatganggattttttggtttcan

SEQ ID NO: 2132 - DNA, 717 bp, Homo sapiens
  misc_feature (639)..(639): "n" may be a, t, c, g, other or unknown
  misc_feature (672)..(672): "n" may be a, t, c, g, other or unknown
  misc_feature (682)..(682): "n" may be a, t, c, g, other or unknown
cgcacagacctggtcagccccaagcacgcgctcatggtgttccgagtggccaaagtctttgcccagcccaacctggctgagatgattcagaaaggtgagcagctattcctggagccagagctggtcatcccccaccgccagcaccgactcttcacggcccccacattcactgggagcttcctgtcaccctggccaccagcggtcactgatgcctccttcaaggtgaagagccacgtctacagcctggagggccaggaccgcaagtacaccccgatgtttgggcccgaggcccgcaccctggtcctgcgcctcgctcagctcatcacacaggccaaacacacagccaagtccatctccgaccagtgtgcggagagcccggctggccactccttcctctcatggctgggctttagctccatggacaccaatggctcctacacagccaacgacctggacgagatggggcaagacagtgtccggaagacagatgaatacctggagaaggccctggagtacctgcgccagatattccggctcagcgaagcgcagctcaggcagttcacactcgccttgggcaccacccaggatgagaatggaaaaaagcaactccccgactgcatcgtgggtgaggacggactnatccttacgcccctggggcggtaccagatcatnaatgggctgngaaggtttgaaattgagtaccaagggggacccgga

SEQ ID NO: 2133 - DNA, 790 bp, Homo sapiens
  misc_feature (712)..(712): "n" may be a, t, c, g, other or unknown
  misc_feature (767)..(767): "n" may be a, t, c, g, other or unknown
tccttatgtggcaagctttggccattgtgtcttgaaattctccctcaggaaatgtgataggggatattatcccatgggattttagtaaaaatcagcttgcctaatttcatattcgtgttcataatgaagaaatgcgaagtggtggtagtcctcaggattaagtgtaaaggaaaatatgcaaggaaaaagtagcagtgtcagcccttttggactgcttatgatttctgccttagagctacaagacttggaacaagaaataacaatacctcaagaaaatgtctggagagatagcaccactgtccctcaaagacttcagccactgcacattaccaattcagctgtgaagcatttacaactgtattatctgtgattgtctgcatttcctgtttacatgcatgtgctggggatatgctttagtgtgtatggactagagtttaaatcctgtctttaactgggctgcaaggatggctatcaatcccaaattctgttttcaactcactggaataattaatctggtgttcctgatataaaacaggtgggttctattcacatgatggctgctctttaccatatatttcacctgaccctcattttgccatgggcctcaacctttatgtgtgctttttatggctctgaaaggactggctcccgtgtgtggaatatacaaggtataaacaccacccctcacatacccctgtaacttaaatgcttncatttaactcacttagattactttccccttagtggtaaacgggttgggggatggntggtagtgcaaagaaggaagttg

SEQ ID NO: 2134 - DNA, 454 bp, Homo sapiens
  misc_feature (447)..(447): "n" may be a, t, c, g, other or unknown
  misc_feature (450)..(451): "n" may be a, t, c, g, other or unknown
cggcagcggaactatgctggccgctgggatgtcctgatccagcaggccacccagtgcctcaaccgcctcatccagattgctgcccgcaagaaacgcaactatatcctagatcagacaaatgtttatgggtcagcccagagacgaaaaatgagaccatttgaaggcttccagcgcaaagctattgtaatttgtcccactgacgaggacctaaaagaccgaacaataaagcgaaccgacgaggaagggaaggatgtcccagatcatgcggtcttagaaatgaaagccaacttcacgttgccagatgttggggacttcctggatgaggttctgttcattgagctgcagcgggaggaagcggacaagctagtgaggcagtacaacgaggaaggccgcaaggctgggccaccccctgaaaagcgctttgacaaccgaggtggtggtggcttncgnnccg

SEQ ID NO: 2135 - DNA, 604 bp, Homo sapiens
  misc_feature (3)..(3): "n" may be a, t, c, g, other or unknown
  misc_feature (526)..(526): "n" may be a, t, c, g, other or unknown
  misc_feature (544)..(544): "n" may be a, t, c, g, other or unknown
  misc_feature (601)..(601): "n" may be a, t, c, g, other or unknown
tcngggcctcgtgttgctgctcactggattgttggctctcggggctagtgagtcggccctggttaccaaagtgttcacaggcgtgaaccttttggttcttgggttcgtcatgatctctggcttcgttaagggggacgtgcacaactggaagctcacagaagaggactacgaattggccatggctgaactcaatgacacctatagcttgggtcctctgggctctggaggatttgtgcctttcggcttcgagggaattctccgtggagcagcgacctgtttctatgcatttgttggtttcgactgtattgctaccactggagaagaagcccagaatccccagcgttccatcccgatgggcattgtgatctcactgtctgtctgctttttggcgtattttgctgtctcttctgcactcaccctgatgatgccttactaccagcttcagcctgagagccctttgcctgaggcatttctctacattggatgggctcctgcccgctatgttgtggctgctggctccctctgngctctttctaccagcctnctgggctccatgttccccatgcctcgggtgatctacgcgatggcagaggatggcctnctg

SEQ ID NO: 2136 - DNA, 749 bp, Homo sapiens
  misc_feature (696)..(696): "n" may be a, t, c, g, other or unknown
  misc_feature (716)..(716): "n" may be a, t, c, g, other or unknown
  misc_feature (724)..(724): "n" may be a, t, c, g, other or unknown
agtctgagcccctgagccttatcgcaaatgtggtagctggctcatcctgccggggccctccactgcccagagacctgcagggctccaggcacagggctgaagtcgcctctgccctgcgctccttctccccgctgcaacccgggcaggcgcccacaggccgggctcacagcaccatgacaggctctggggtggatgccaggacagccagctccgggagcagcgtgtgggaaggacagctgcagagcctggtgctgtcagaatatgcatccacagagatgagcctgcatgccctctatatgcaccagctccacaagcagcaggcccaggctgaacctgagcggcatgtatggcaccgccgggagagtgatgagagtggagaaagcgcccctgatgaagggggagagggcgcccgggccccccagtctatccctcgctctgctagctatccctgtgcagcaccccggcctggagctcctgagaccaccgccctgcatgggggcttccagaggcgctacggtggcatcacagatcctggcacagtgcccagggttccctctcatttctctcggctgcctcttggagggtgggcagaagatgggcagtcggcatcaaggcaccctgagcccgtgcccgaagagggctcggaggatgagctaccccctcagtgcacaaggtatagacaaggctgagcagggntcctgtggcccaggatggangccaccgnttgccttgccattccgtctggcttg

SEQ ID NO: 2137 - DNA, 809 bp, Homo sapiens
  misc_feature (612)..(612): "n" may be a, t, c, g, other or unknown
  misc_feature (735)..(735): "n" may be a, t, c, g, other or unknown
  misc_feature (800)..(800): "n" may be a, t, c, g, other or unknown
gtatgaacgcagcggcggacctgtgaggggatccgacttgccggcagaacttacgctgcgggaccccgggcactgttgctgctgcgggagtccagagaggcaggaggatggagctcggaaggatttcagctccaggctggctgctggaccgacttttcaacattttttaaaaagtgcctcagctcctcaggagaagctgtcttcagaagtggaagacccacctccctatctcatgatggatgaacttcttggaaggcagagaaaagtctacctcgagacctatggctgccagatgaatgtgaatgacacagagatagcctggtccatcttacagaagagtggctacctgcggaccagtaacctccaagaggcagatgtgattctccttgtcacgtgctctatcagggagaaggctgagcagaccatctggaaccgtttacatcagcttaaagccttgaagacaaggcggccccgctcccgggttcctctgaggattggaattctaggctgcatggctgagaggttgaaggaggagattctcaacagagagaaaatggtagatattttggctggtcctgatgcctaccgggaccttccccggctgctggctgntgctgagtcgggccagcaagctgccaacgtgctgctctctctggacgagacctatgctgatgtcatgccagtccagacaagcgccagtgccacgtctgcctttgggcaatcatgcgaggctgngacaacatgtggagctactgcattgttctctcacccgggggcagggagaggagtcggcctattgncttcactct

SEQ ID NO: 2138 - DNA, 576 bp, Homo sapiens
  misc_feature (2)..(2): "n" may be a, t, c, g, other or unknown
  misc_feature (4)..(4): "n" may be a, t, c, g, other or unknown
  misc_feature (173)..(173): "n" may be a, t, c, g, other or unknown
  misc_feature (241)..(241): "n" may be a, t, c, g, other or unknown
  misc_feature (422)..(422): "n" may be a, t, c, g, other or unknown
  misc_feature (438)..(438): "n" may be a, t, c, g, other or unknown
  misc_feature (498)..(498): "n" may be a, t, c, g, other or unknown
  misc_feature (550)..(550): "n" may be a, t, c, g, other or unknown
  misc_feature (570)..(570): "n" may be a, t, c, g, other or unknown
tncngagatttttctacagaatcaatgtctttggttccagcaacaaattatatatatacacccctgaatcaacttaagggtggtacaattgtcaatgtctatggtgttgtgaagttctttaagcccccatatctaagcaaaggaactgattattgctcagttgtaactattgnggaccagacaaatgtaaaactaacttgcctgctctttagtggaaactatgaagcccttccaataattnataaaaatggagatattgttcgctttcacaggctgaagattcaagtatataaaaaggagactcagggtatcaccagctctggctttgcatctttgacgtttgagggaactttgggagcccctatcatacctcgcacttcaagcaagtattttaacttcactactgaggaccacaaaatggnagaagccttacgtgtntgggcatctactcatatgtcaccgtcttggacattactaaaattgtgtgatgttcagccnatgcagtattttgacctgacttgtcagctcttgggcaaagcagaagtggacngagcatcatttcttctaaangtatgg

SEQ ID NO: 2139 - DNA, 807 bp, Homo sapiens
  misc_feature (790)..(790): "n" may be a, t, c, g, other or unknown
  misc_feature (807)..(807): "n" may be a, t, c, g, other or unknown
aaaataaagatgactatatcagagacttgaaaaggatcattctctgttttctgatagtgtatatggccattttagtgggcacagatcaggatttttacagtttacttggagtgtccaaaactgcaagcagtagagaaataagacaagctttcaagaaattggcattgaagttacatcctgataaaaacccgaataacccaaatgcacatggcgattttttaaaaataaatagagcatatgaagtactcaaagatgaagatctacggaaaaagtatgacaaatatggagaaaagggacttgaggataatcaaggtggccagtatgaaagctggaactattatcgttatgattttggtatttatgatgatgatcctgaaatcataacattggaaagaagagaatttgatgctgctgttaattctggagaactgtggtttgtaaatttttactccccaggctgttcacactgccatgatttagctcccacatggagagactttgctaaagaagtggatgggttacttcgaattggagctgttaactgtggtgatgatagaatgctttgccgaatgaaaggagtcaacagctatcccagcctcttcatttttcggtctggaatggccccagtgaaatatcatggagacagatcaaaggagagtttagtgagttttgcaatgcacatgttagaagtacagtgacagaactttggacaggaaattttgtcaacttcatacaaactgctttgctgctggtattgctggctgatcacttttttggtcaaaaggagganattgtttgacttcacan

SEQ ID NO: 2140 - DNA, 643 bp, Homo sapiens
  misc_feature (548)..(548): "n" may be a, t, c, g, other or unknown
  misc_feature (595)..(595): "n" may be a, t, c, g, other or unknown
  misc_feature (612)..(612): "n" may be a, t, c, g, other or unknown
gaactgccacctggaagatacaggtggaaacccgaaaacagagtattgtatgggagtttgaaaaataccagcgattactagagaaaaagcagccaccacatcggcagctgggggcagaggtagcagcagctctggccagcctacagcgggaggcagcggagaccatgcagaaactggagttgaaccatagcgagctcatccagcagagccaggtcctgtggaggatgattgcagagttgaaagagaggtcgcagaggcctgtccgctggatgttgcaggatattcaggaagtgttaaacaggagcaaatcttggagcttgcagcagccagaaccaatctccctggagttgaagacagattgccgtgtgctggggctaagagagatcctgaagacttatgcagctgatgtgcgcttggatccagatactgcttactcccgtctcatcgtgtctgaggacagaaaacgtgtgcactatggagacaccaaccagaaactgccagacaatcctgagagattttaccgctataatatcgtcctgggaagccantgcatctcctcaggcaggcactactgggaggtggaagtgggagacangtctgagtggggcctgngagtatgtaagcaaaatgtagaccggaagga

SEQ ID NO: 2141 - DNA, 586 bp, Homo sapiens
  misc_feature (1)..(1): "n" may be a, t, c, g, other or unknown
  misc_feature (108)..(108): "n" may be a, t, c, g, other or unknown
  misc_feature (321)..(321): "n" may be a, t, c, g, other or unknown
  misc_feature (422)..(422): "n" may be a, t, c, g, other or unknown
  misc_feature (505)..(505): "n" may be a, t, c, g, other or unknown
  misc_feature (544)..(544): "n" may be a, t, c, g, other or unknown
  misc_feature (581)..(581): "n" may be a, t, c, g, other or unknown
naaaaaacaaataccgaatttccaacattccatcactaatattcctcgacgccaccactgggaaggttgtgtgcaggaacgggctgctggtgatccgagatgacccanaaggtctggagttcccctggggaccgaaacccttcagggaagtcattgcagggcccttgcttagaaacaatgggcagtctctggagagcagcagcctggaggggtctcacgtgggcgtctatttctccgcacattggtgtccgccctgccgaagcctcacccgggtcctggtggaatcctaccggaagatcaaggaggcaggccagaacttcnagatcatcttcgttagtgcagacaggtcggaggagtccttcaaacagtacttcagtgagatgccctggctcgccgtcccctacacggatgaggcccggctngtcgcgcctcaaccggctgtacggaatccaaggcatccccacgctcatgatgctggacccgcagggcgaggtgatcacgcggnaggggcgggtggaggtgctgaacgacgaggactgtcggnagttcccctggcaccccaagcccgtgctggagctctncgact

SEQ ID NO: 2142 - DNA, 732 bp, Homo sapiens
  misc_feature (690)..(690): "n" may be a, t, c, g, other or unknown
  misc_feature (725)..(725): "n" may be a, t, c, g, other or unknown
  misc_feature (731)..(731): "n" may be a, t, c, g, other or unknown
tttccgacacaatccgtacacggccttccctcccgcagtgcccgggctgcctccgggcctcccgccggccgtctcctttggctccctgcagggggccttccagcccaagagcacgaaccctgagctgccaccacgactggggccggtgccgagcgggctctcccagaaggggacacagatccccgaccatttccggccacctttgaggaaaccagggaagtggtgtgccatgcacgtgcgtgtggcttacatgatcctgagacaccaggagaaaatgaagggtgactcccacaagcttgactttcggaatgacctcctgccctgccttccggggccctatggggccctgccccctgggcaggagctctcccacccggcctccctcttcactgcgactggtgccgtccacgctgcagccaaccctttcacggcagctcccggggcccacggacccttcctgagccccagcacccacattgatccctttgggcgtcccacaagcttcgcctctttggctgccctctccaacggggcctttggaggcctgggcagccccacattcaactccggcgccgtctttgcccagaaagaaagcccaggggccccaccagccttcgcctccccaccggacccatggggccgctgcaccgcagtcctctgacctttcctgcctgggtccggccccctgangccgtccggacttcaagctcagacaaggaaccggnctgtgna

SEQ ID NO: 2143 - DNA, 737 bp, Homo sapiens
  misc_feature (697)..(697): "n" may be a, t, c, g, other or unknown
  misc_feature (700)..(700): "n" may be a, t, c, g, other or unknown
  misc_feature (719)..(719): "n" may be a, t, c, g, other or unknown
gacaaagaacaagctgcctggcctcatcacatccatggagaccatcggtgccaaagcgctggaggacttcgcagacaacatcaagaatgacccggacaaggagtacaacatgccgaaggacggcaccgtacacgagctcaccagcaatgccatcctcttcctgcagcagcttttggacttccaggagacggcaggcgccatgctggcctcccaagagaccagctcttcggccaccagctacagctctgagttcagcaagcggctgctaagcacctatatctgtaaagtgctgggcaacctgcagttgaacttgctgagcaagtccaaggtgtacgaggacccagctctgagcgccatcttcctgcacaacaactacaattacatcctcaagtccctggagaagtctgaactgatccagctggtggcagtgacacagaagactgctgagcgctcctaccgggagcacattgagcagcagatccagacctaccagcgcagctggttaaaggtgactgattacatcgcagagaagaatctacctgtgttccagccgggagtcaagctccgggacaaggagcggcagattatcaaggagcgttttaagggcttcaatgatggcctcgaagaactgtgcaaaatccagaaggcctgggctattccagacacagagcacagggacaggattcgccaggcccanaanaccattgtcaaggagaccntacggggccttttttaca

SEQ ID NO: 2144 - DNA, 751 bp, Homo sapiens
  misc_feature (1)..(2): "n" may be a, t, c, g, other or unknown
  misc_feature (690)..(690): "n" may be a, t, c, g, other or unknown
  misc_feature (728)..(728): "n" may be a, t, c, g, other or unknown
  misc_feature (745)..(745): "n" may be a, t, c, g, other or unknown
nngccagtccatatggtccccacagagcttgttgagaaagaattttggagactagtaagcactattgaggaggatgtcacagtggaatatggagctgacattgcctcaaaggaatttggcagtggctttcctgtccgagatgggaaaatcaaactctcacctgaggaagaggagtatcttgatagtggctggaatttgaacaacatgccagtgatggagcagtctgtccttgcacatattactgctgatatatgtggcatgaaacttccttggttgtatgtgggaatgtgcttttcttcattctgttggcacattgaagaccactggagctattcaattaactacttgcactggggtgagccaaaaacctggtatggagtcccagggtatgctgctgagcagctagaaaatgtaatgaagaaactagctccagaactctttgtgtcccagccggatctcctccatcagcttgtgaccatcatgaaccccaataccctgatgactcatgaagtgcctgtttaccgaactaatcagtgtgctggggagtttgtgattacatttccaagagcctaccacagtggttttaaccagggttttaattttgctgaggctgttaacttctgcactgttgattggctgccattaggccgacagtgtgtggagcattatcgcttacttcatcgatattgngtgttttcccatgatgagatgatctgcaagatggcttncaaggctgatgtattanatgttg

SEQ ID NO: 2145 - DNA, 812 bp, Homo sapiens
  misc_feature (685)..(685): "n" may be a, t, c, g, other or unknown
  misc_feature (787)..(787): "n" may be a, t, c, g, other or unknown
  misc_feature (795)..(795): "n" may be a, t, c, g, other or unknown
tctatacgtccaacatccccatcatcctgcagtctgccctggtgtccaacctttatgtcatctcccaaatgctctcagctcgcttcagtggcaacttgctggtcagcctgctgggcacctggtcggacacgtcttctgggggcccagcacgtgcttatccagttggtggcctttgctattacctgtcccctccagaatcttttggctccgtgttagaagacccggtccatgcagttgtatacatagtgttcatgctgggctcctgtgcattcttctccaaaacgtggattgaggtctcaggttcctctgccaaagatgttgcaaagcagctgaaggagcagcagatggtgatgagaggccaccgagagacctccatggtccatgaactcaaccggtacatccccacagccgcggcctttggtgggctgtgcatcggggccctctcggtcctggctgacttcctaggcgccattgggtctggaaccgggatcctgctcgcagtcacaatcatctaccagtactttgagatcttcgttaaggagcaaagcgaggttggcagcatgggggccctgctcttctgagcccgtctcccggacaggttgaggaagctgctccagaagcgcctcggaaaggggagctctcatcatggcgcgtgctgctgcggcatatggacttttaataatgnttttgaatttcgtattctttcattccactgtgtaaaagtgctagacattttccaatttaaaaattttgctttttatcctggcactggcaaaaaagaactggngaaagtgnaaattttattcaagccc

SEQ ID NO: 2146 - DNA, 817 bp, Homo sapiens
  misc_feature (476)..(476): "n" may be a, t, c, g, other or unknown
  misc_feature (494)..(494): "n" may be a, t, c, g, other or unknown
  misc_feature (547)..(547): "n" may be a, t, c, g, other or unknown
  misc_feature (780)..(780): "n" may be a, t, c, g, other or unknown
  misc_feature (784)..(784): "n" may be a, t, c, g, other or unknown
  misc_feature (787)..(787): "n" may be a, t, c, g, other or unknown
cggcccctacccctgagtccccggggtcccggccgccaggccggagcgcgaatgtcgtgctcaccctgcctccttcccgccgccccctgggctttttgatgacaagcttcaaaactgcaaagaagatgaacagagaaagaaaattgaaactctcaaagagacaacaaatagcatggtagaatcaattaaacactgcattgtgttgctgcagattgccaaaagtactattaatcccgtagatgcaatatatcaacctagtcctttggaacctgtgatcagcacaatgccttcccagactgtgttacctccagaacctgttcagttgtgtaagtcagagcagcgtccatcttccctaccagttggacctgtgttggctaccttgggacatcatcagactcctacaccaaatagtacaggcagtggccattcaccaccgagtagcagtctcacttctccaagccacgtgaacttgtctncaaatacagtcccagagntctcttactccagcagtgaagatgaattttatgatgctgatgaattccatcanagtggctcatccccaaagcgcttaatagattcttctggatctggctcagtcctgacacacagcagctcgggaaatagtctaaaacgcccagataccacagtaatcacttaattcttccttgtccaatgggaacaagtgatgctgacctgtttgattcacatgatgacagaggatgatgatgccggaggcagggtctgttggaggagccccaagaagccgttatcatgcatctnttgncgnaaggttagacttggaatggatcttacttaa

SEQ ID NO: 2147 - DNA, 758 bp, Homo sapiens
  misc_feature (700)..(700): "n" may be a, t, c, g, other or unknown
  misc_feature (720)..(720): "n" may be a, t, c, g, other or unknown
  misc_feature (728)..(728): "n" may be a, t, c, g, other or unknown
tgacaccaaggcacctccaacccttcaggcagagacggctaccaaaccccaagccacatctgccccgtcccccgcccccaagcaaagcttcctgtttggaacacagaacacctcaccttccagccctgccgcccctgctgcatcttcggcacctcccatgttcaagcccattttcacggctccacccaagagtgagaaggaaggccccacaccgcctggcccttcagtcacagccacagcgccctccagctcctccctccccacgaccaccagcaccacagccccgaccttccagcctgtctttagcagcatggggccacctgcatctgtgcccttgcctgctcccttcttcaagcagacaactactcccgccactgctcccaccacaactgccccgctcttcactggcctggccagcgccacctctgctgtggctcccatcacctctgccagtccatccacagactctgcttcgaagcctgcgtttggctttggcataaacagtgtgagcagcagcagtgtgagtaccacgaccagcaccgccactgccgcctcacagcctttcctcttcggggcgccccaggcctctgctgcagcttcaccccggccatgggctccatattccagtttggcaaacctcctgccttgcccacaaccaccacagtcaccaccttcagccagtcccttcccaactggccgnggccaacggccaccaagcancaagcggntgcccgaacttttaagggggttttttgggg

SEQ ID NO: 2148 - DNA, 708 bp, Homo sapiens
  misc_feature (435)..(435): "n" may be a, t, c, g, other or unknown
  misc_feature (461)..(461): "n" may be a, t, c, g, other or unknown
  misc_feature (504)..(504): "n" may be a, t, c, g, other or unknown
  misc_feature (639)..(639): "n" may be a, t, c, g, other or unknown
  misc_feature (689)..(689): "n" may be a, t, c, g, other or unknown
  misc_feature (695)..(695): "n" may be a, t, c, g, other or unknown
cgcggcttctggcgcggaggcgccgatgcagccgggcttccccgagaacctgagcaagctgaagagcctcctgacccagctccgcgccgaggacttgaacatcgccccgcgcaaggccacactgcagccgctgccgcccaacctgccgccagtcacctacatgcacatctacgagacggacggcttcagcctgggcgtgttcctgctcaagagcggcacgtccatcccgctgcacgaccacccgggcatgcacggcatgctcaaggtgctgtacggcaccgtgcgcatcagctgcatggacaagctagacgcgggcggcgggcaacggccgcgggccttgccgcccgagcagcagttcgagccgccgctgcagccccgggagcgagaagccgtgcggccgggcgtgctgcgttcgcgggccgagtacaccgaggncagcggcccctgcatcctcacaccgnaccgggacaacctgcaccagatcgacgccgtggaagggcctgncgccttcctggacatcctggccccgccctacgacccggacgatggccgggactgccactattaccgggtgctggagccggtcaggcccaaggaggcctcagctcggcctgtgacctgcctcgagaggtgtggctnctggagaccccacaggccgatgacttctggtgcgaagggagaaccctatncaggtnccaaagggtcttt

SEQ ID NO: 2149 - DNA, 803 bp, Homo sapiens
  misc_feature (683)..(683): "n" may be a, t, c, g, other or unknown
  misc_feature (802)..(802): "n" may be a, t, c, g, other or unknown
atcctaccactgcaagctcagcaggaactgacctggttggcaaagatgagggacatcctggtcctgtcactggggtccttggtgatgtggcgaatgagctgcaacatgggtgtgatgcctggaacacagtgagcgagcagccagctttctccctgtctctgaagcccacagtccctgacctgcagcaagcttcataccttcccccagcccaagttatccttttctcacttctgtccccaaaactcaaagcaggaaacagcccttcattttggttttcctttctaatgcaacagtaagtcaggtagtctttctcattttcatatggcaagatggaaagaacactctaagttcttcagtgtcctcattcatcaaacaatgacgggtaaatgtgatcgttttaagaatgcctattacagtgcctggcacattgtatgtctccttcaaagactgctctctttcttcaggcagtcattttcaagggatggggagagtcaggcttgaactggatctaggagcccctgggacagcatgggtgggcctgcccagcttgcccccaagcctgacctgaaaggtccccataaggctcctgagcagccaccatattggttaggggaagcagggtacacagggtcaagtttcaagacctgtcactggttcatcggtcccaccttctacagctggangcgaaatctctcatgttgtcccttcgaggatcaaatgactcccaaagtcagaatgggtctcggggctcactctctggatggagcccctaaaacctctaccttgtgccccacaatcattnc

SEQ ID NO: 2150 - DNA, 805 bp, Homo sapiens
  misc_feature (713)..(713): "n" may be a, t, c, g, other or unknown
  misc_feature (732)..(732): "n" may be a, t, c, g, other or unknown
  misc_feature (775)..(775): "n" may be a, t, c, g, other or unknown
acctgtcccctccagaatcttttggctccgtgttagaagacccggtccatgcagttgtatacatagtgttcatgctgggctcctgtgcattcttctccaaaacgtggattgaggtctcaggttcctctgccaaagatgttgcaaagcagctgaaggagcagcagatggtgatgagaggccaccgagagacctccatggtccatgaactcaaccggtacatccccacagccgcggcctttggtgggctgtgcatcggggccctctcggtcctggctgacttcctaggcgccattgggtctggaaccgggatcctgctcgcagtcacaatcatctaccagtactttgagatcttcgttaaggagcaaagcgaggttggcagcatgggggccctgctcttctgagcccgtctcccggacaggttgaggaagctgctccagaagcgcctcggaaggggagctctcatcatggcgcgtgctgctgcggcatatggacttttaataatgtttttgaatttcgtattctttcattccactgtgtaaagtgctagacattctccaatttaaaattttgctttttatcctggcactggcaaaaagaactgtgaaagtgaaattttattcaagccgactgccagagaagtgggaatggtataggattgtccccaagtgtccatgtaacttttggtttaacctttgcacctttctcagtgctgnatgcggctgcaagccgctnacctgtttcccacaaagggaatttcttactctggttggaagcncaaacacttgaatggctacgtttattttgg

SEQ ID NO: 2151 - DNA, 807 bp, Homo sapiens
  misc_feature (662)..(662): "n" may be a, t, c, g, other or unknown
  misc_feature (740)..(740): "n" may be a, t, c, g, other or unknown
  misc_feature (780)..(780): "n" may be a, t, c, g, other or unknown
  misc_feature (804)..(804): "n" may be a, t, c, g, other or unknown
aaatatcatattacaacatgggaagaataagattacagtggtctcgaatttgggaagttattggagatcattttaataaggttgggtgtaatcctaatgaagatgtagctatttttgcagtagactccttgaggcagttgtcaatgaagttcttagagaaaggggagcttgctaacttcagattccagaaggatttcttaagaccttttgaacatataatgaaacggaacaggtctccaacaattcgagatatggttgtacggtgtatagcacagatggttaattctcaagctgctaacattcgatctggatggaagaacattttctctgtatttcatctagctgcatctgatcaagatgaaagcatagtggaacttgcattccaaacaaccgggcacattgtcacccttgtatttgaaaaacactttccagcgaccattgattctttccaggatgcagtgaagtgtttgtctgaatttgcgtgcaatgcagctttcccagacacaagtatggaagcaattcgacttattcgccattgtgcaaaatatgtgtctgatagacctcaggctttcaaggaatacacaagcgatgatatgaacgtagcacctgaagacagggtgtgggtgagaggatggttcccaattctcttgagttatcctggnatcatcaatagatgcaaattagaatgtaagaacccaggggtttaacagtaatggtttgaaataatgaaaacttatggncacctttatgagaaacactggtggcaggatttaatttaanaattggtttcagaatctttggacnata

SEQ ID NO: 2152 - DNA, 808 bp, Homo sapiens
  misc_feature (638)..(638): "n" may be a, t, c, g, other or unknown
  misc_feature (742)..(742): "n" may be a, t, c, g, other or unknown
  misc_feature (745)..(745): "n" may be a, t, c, g, other or unknown
  misc_feature (775)..(775): "n" may be a, t, c, g, other or unknown
ttttggcctcactctttgtggaccactaaggactttgctgctatttgagcacagtgatattgttgtcatttcactactcagtgttttgttcaccagttctggaggaggaccagcaaagacaaggggagctgcttttttcattattgctgtgatctgtttattgctttttgacaatgatgatctcatggctaaaatggctgaacaccctgaaggacatcatgacagtgctctaactcatatgctttacacagccattgccttcttaggtgtggcagatcacaagggtggagtattattgctagtactggctttgtgttgtaaagttggttttcatacagcttccagaaagctctctgtcgacgttggtggagctaaacgtcttcaagctttatctcatcttgtttctgtgcttctcttgtgcccatgggtcattgttctttctgtgacaactgagagtaaagtggagtcttggttttctctcattatgccttttgcaacggttatcttttttgtcatgatcctggatttctacgtggattccatttgttcagtcaaaatggaagtttccaaatgtgctcgttatggatcctttcccatttttattagtgctctcctttttggaaatttttggacacatncaataacagaccagcttcgggctatgaacaaagcagcacaccaggagagcactgaacaccgtcctgtctggaggagtggtagtgaagtgctatattcttcattntgnctgccaatatcttatcatctccctcttaanagaggaccaaaaaggaccccttaattggatatt

SEQ ID NO: 2153 - DNA, 803 bp, Homo sapiens
  misc_feature (45)..(45): "n" may be a, t, c, g, other or unknown
  misc_feature (711)..(711): "n" may be a, t, c, g, other or unknown
  misc_feature (716)..(716): "n" may be a, t, c, g, other or unknown
  misc_feature (801)..(801): "n" may be a, t, c, g, other or unknown
ctaaaacattacaggccggcctgagcagcaatcatgtgtcccatngggaagttctgcggaaagtggagaggggttcacggattgtcactgttgtgccccaggacacaaagcttgtattacagatgccaaggggaaacttagaagttgttcatcatcgagccctggttttagctcagattcggaagtggttggacaaacttatgtttaaagaggcatttgaatgcatgagaaagctgagaatcaatctcaatctgatttatgatcataaccctaaggtgtttcttggaaatgtggaaaccttcattaaacagatagattctgtgaatcatattaacttgttttttacagagttgaaagaagaagatgtcacgaagaccatgtaccctgcaccagttaccagcagtgtctacctgtccagggatcctgacgggaataaaatagaccttgtctgcgatgctatgagagcagtcatggagaacataaatcctcataaatactgcctatccatacttacatctcatgtaaagaagacaaccccagaactggaaattgtactgcaaaaagtacacgagcttcaaggaaatgctccctctgatcctgatgctgtgagtgctgaagaggccttgaaatatttgctgcatctggtagatgttaatgaattatatgatcattctcttggcacctatgactttgatttggtcctcatggtanctganaagtacagaaggatcccaaaagaatatcttccatttcttaatacacttaagaaaatggaaactaattatcagcggtttactatanac

SEQ ID NO: 2154 - DNA, 792 bp, Homo sapiens
  misc_feature (2)..(2): "n" may be a, t, c, g, other or unknown
  misc_feature (445)..(445): "n" may be a, t, c, g, other or unknown
  misc_feature (457)..(458): "n" may be a, t, c, g, other or unknown
  misc_feature (548)..(548): "n" may be a, t, c, g, other or unknown
  misc_feature (587)..(587): "n" may be a, t, c, g, other or unknown
  misc_feature (605)..(605): "n" may be a, t, c, g, other or unknown
  misc_feature (663)..(663): "n" may be a, t, c, g, other or unknown
  misc_feature (698)..(698): "n" may be a, t, c, g, other or unknown
  misc_feature (775)..(775): "n" may be a, t, c, g, other or unknown
  misc_feature (791)..(791): "n" may be a, t, c, g, other or unknown
tncgcccggggatttcatgcggcctagctcggttccgcctcctcctcgcgcggccccagcggctgcccgcaccccagccccactccgggcctccgtgtctctcctgtgatcgcactgacacggccggggggttagaatggaacaaactgaaggcccgatgagagaaagggaaagttaaggatgctggagcagaacaatggatttctctttctctttcatgcaagggatcatgggaaacacaattcagcaaccacctcaactcattgactccgccaacatccgtcaggaggatgcctttgataacaacagtgacattgctgaagatggtggccagacaccatatgaagctactttgcagcaaggctttcagtacccagctacaacagaagatcttcctccactcacaaatgggtatccatcatcaatcagtgtgtatgaaactcanaccaaataccanncatataatcagtatcctaatgggtcagccaatggctttggtgcagttagaaactttagccccactgactattatcattcagaaattccanacacaagaccacatgaaattctggaaaaaccttcccctncacagccaccacctcctncttcggtaccacaaactgtgatttcaaagaagactggctcacctgaaattaaactaanaataaccaaaactatccagaatggcagggaattgnttgagtcttccctttgtggagaccttttaaatgaagtacaggccaagtgagcacacgaaatcaaagcatgaaagcanaatagaaaagaggaana

SEQ ID NO: 2155 - DNA, 839 bp, Homo sapiens
  misc_feature (46)..(46): "n" may be a, t, c, g, other or unknown
  misc_feature (740)..(740): "n" may be a, t, c, g, other or unknown
  misc_feature (793)..(793): "n" may be a, t, c, g, other or unknown
  misc_feature (836)..(836): "n" may be a, t, c, g, other or unknown
cagcccagaggaccccaggcgaccagagtccaggctgaggcccgangtggctcaccagctgttcagatgcttccagtatcaggaggacatggggccacgggcgtccctgagccggctccgggagctctgcggccactggctgcggccggctctgcacaccaagaaacagatcctggagctgctggtgctggagcagttcctgagtgtgctgcctccgcacctcctgggccgcctgcaggggcagccgctcagggatggggaggaggtggtgctgctgctcgagggcatccaccgggagcccagccacgcggggccgctggattttagttgtaatgctggcaagagttgtccccgtgcagacgtcaccttggaggaaaaggggtgtgcttcccaggtccccagccacagccccaagaaggaattgcctgcggaagagccttcagtgctgggcccatcggatgagcctccccgaccccagccaagggctgcccagcctgctgagccgggacagtggaggcttcccccaagttcaaagcagccgctgagcccggggccccagaagacattccaggccctgcaagaaagcagtccccagggcccctcaccatggccagaggagagttcccgagatcaggagctggcggctgtgctggagtgcctgacctttgaggatgtgccagagaataaggcgtggcctgcacaccccctgggattcggaagcagaaccccagaccaaggangaatttaaacaagaagacccaaaggggcttgcctggccactcccatcttacanaatcccaggcagatagtcctggggtgcccggaaaaaccttgcnccc

SEQ ID NO: 2156 - DNA, 805 bp, Homo sapiens
  misc_feature (3)..(3): "n" may be a, t, c, g, other or unknown
  misc_feature (741)..(741): "n" may be a, t, c, g, other or unknown
  misc_feature (784)..(784): "n" may be a, t, c, g, other or unknown
  misc_feature (796)..(796): "n" may be a, t, c, g, other or unknown
cangtactagagatgaattgcttagtgcccgagatgaaattttgctccttcatcaagcagcagcaaaggttgcctctgagcgggacactgacattgcttctttacaagaagagcttaagaaggtgagagctgagcttgagcggtggcggaaagcagcgtctgaatatgagaaagaaatcacaagtctgcaaaacagttttcagcttagatgtcaacagtgtgaggaccagcagagagaagaagcaacaaggttgcaaggtgaactagagaagttgagaaaggaatggaatgcattggaaaccgaatgccattctctaaaaagggaaaatgttttgctatcatcagaactgcaacggcaagaaaaagaattgcacaattctcagaagcagagtttagagcttaccagtgatctcagcatccttcaaatgtctaggaaagaacttgagaatcaagtgggatccttgaaagaacagcatcttcgggattcagctgatttaaaaactcttctcagtaaggcagaaaaccaagcaaaggatgtgcagaaagagtatgaaaagacacagactgtactctcagaactgaagttgaagtttgaaatgactgagcaggaaaagcagtcaatcacagatgagctcaaacagtgtaaaaacaacctgaagctgctccgagagaaaggaaataatccttccatattacaacccgtcccagccgtattcatcggcctattcctggctttcctgntttggtgtttcggtccattggtggtagagaaagaaaccctggncctggatgcccntgttggctg

SEQ ID NO: 2157 - DNA, 840 bp, Homo sapiens
  misc_feature (745)..(745): "n" may be a, t, c, g, other or unknown
  misc_feature (818)..(818): "n" may be a, t, c, g, other or unknown
  misc_feature (822)..(822): "n" may be a, t, c, g, other or unknown
aaaaaaaagaaacagatattaacaaactaaaaccccagcaagaaccgggacgaacaatagaagatctaaaaatgtatgaacaccttttccctgagcttgttgatgattttcaggactatgatttaatctccaaagaaccaaagccttttgtatttgagggaaaagtacgtggtcctattgttgttcctacggcaggcgaggaaacatctgggaattctggcaatttaagaaaagttgtaatgaaggagaacatatcttctaaaggagatgaaggtgaaaagaagtctacctttatggatctagcaaaagaagatattaaagataatgatagaacattacaacagcagccaggtgatcaaaatagaactatttcatcagtccatggtttaaacaatgatattgtaaaggccttggaccgaattacattgcagaatattccttctcaaacagccccaggttttactgcagaaatgaagaaggactgcagtcttcctcttactgtccttacctgtgctaaagcatgtccacacgtggctacttgtggaaatgttctgtttgagggaagaacagttcagctagggaagctttgctgcactggagttgaaactgaagatgatgaagatactgagtcaaattcatcggtagaacaagcatcggttgaagtacctgatggaccaacactccatgacccagacctctatattgagattgtgaaaaatcgaagtctgtcccagaatattcagangtggcttatcccgattatttggtcacattccgcctcattcaaagagcctattttagaaaggccttatggtgtncaanggccaaaattgctcaaga

SEQ ID NO: 2158 - DNA, 784 bp, Homo sapiens
  misc_feature (694)..(694): "n" may be a, t, c, g, other or unknown
  misc_feature (710)..(710): "n" may be a, t, c, g, other or unknown
  misc_feature (751)..(751): "n" may be a, t, c, g, other or unknown
tgtactaagcaaaatgttactgaatttcctatcataaagatgtacaagaaaggcgagaacccagtatcttatgctggaatgttaggaaccgaagatctcctaaaatttatccagctcaacaggatttcatatccagtgaatataacatcgatccaagaagcagaagaatatttaagtggggaattatataaagacctcatcttgtattctagtgtgtcagtattgggactatttagtccaaccatgaaaacagcaaaagaagattttagtgaagcaggaaactacctaaaaggatatgttatcactggaatttattctgaagaagatgttttgctactgtcaaccaaatatgctgcaagtcttccagccctgctgcttgccagacacacagaaggcaaaatagagagcatcccactagctagcacacatgcacaagacatagttcaaataataacagatgcactactggaaatgtttccggaaatcactgtggaaaatcttcccagttatttcagacttcagaaaccattattgattttgttcagtgatggcactgtaaatcctcagtataaaaaagcaatattgacactggtaaagcagaaatacttggattcatttactccatgctggttaaatctaaagaatactccagtggggagaggaatcttgagggcatattttgatcctctgcctncccttcctcttcttgntttggtgaatctgcattcaggtggccaagtatttgcatttncttcagaccaggctataattgaagaaaaccttg

SEQ ID NO: 2159 - DNA, 841 bp, Homo sapiens
  misc_feature (1)..(2): "n" may be a, t, c, g, other or unknown
  misc_feature (46)..(46): "n" may be a, t, c, g, other or unknown
  misc_feature (695)..(695): "n" may be a, t, c, g, other or unknown
  misc_feature (705)..(705): "n" may be a, t, c, g, other or unknown
  misc_feature (732)..(732): "n" may be a, t, c, g, other or unknown
  misc_feature (827)..(827): "n" may be a, t, c, g, other or unknown
nntctccactgaggcccagctgttcctctccttgaaaagtcaaggnttggttcaagccagatagcacctgaggacagaacatatcaggagccaagttacaccctgtttaaccctgccttcaaagggacgactctgtaagattctctgctacttattcaagttgacacgatgcccttcacactccacctgaggtcccgccttccctctgccataaggagtttgattctacaaaagaaaccaaacatcagaaatacatccagcatggctggagagctccgaccagccagcctggtggtcctgcccaggtcccttgctccagcttttgaaagattctgccaggtcaacactggtcctctacccctgctgggccagagtgagccagaaaagtggatgctgccccctcaaggtgctatctcagagaccaggatgggccatccccagttctggaaatacgagttcggtgcctgcaccggtagcctggcttcgctggagcagtactcggagcagctgaaggacatggtggccttcttcctgggctgcagcttctccctggaggaggccttggagaaagcggggctccccagaagagacccagcaggtcacagccagacaacagtgccttgtgttacccatgctggcttctgctgccctctggtggtcacgatgaggcccattcccaaggacaaagctggaanggctggtgcnggcctgctgttcctcggaggtgaacangggcaacctgtcacatgggcgaaccaaaactgttgggaatcaaagagcttttcaaacctgcctacggggatgccatggtgtgtcccccaagggangttccagtgttctt

SEQ ID NO: 2160 - DNA, 839 bp, Homo sapiens
  misc_feature (839)..(839): "n" may be a, t, c, g, other or unknown
caaggtatagacttttttggttatgatacagttaagccaaaaacagctaatctttgcatctaaagcaaactaatgtatatttcacattttattgagccgacttatttccacaaatagataaacaggacaaaatagttgtacaggttatatgtggcatagcataaccacagtaagaacagaacagatattcagcagaaaactttttatactctaattctttttttttttttttttgagacagagttttagtcttgtttcccaggctggagtgcaatggcacaatcttggctcactgcaacctccgcctcctgggttcaggcaattttcctgcctcagcctcccaagtagctgggattacaggcacccaccaccatgcccagctaatttttgtatttttaatagagagctaataattgtatatttaataaagacgggtttcaccatgttggccaggctggtcttgaactcctgacctcaggtgatcctcctgcattggcctcccaaagtgctggaattccaggcatgagccactgcgcccagtctacacactaattcttgttagcccaacagctgttctgttctatctacccctcatttcacgctcaaggagtcatacctagaatagttacacacaagagggaaactggaagccaaacactgtacagtattgtgtagaaagtcacctccctactccttttattttacatgagtgctgatgtgttttggcagatgagctttcagctgaggcctgatggaaattgagataacctgcaaagacataacagtatttatgagttatatcttaattcttgaaattgggggaatgcatgatggacatn

SEQ ID NO: 2161 - DNA, 841 bp, Homo sapiens
  misc_feature (776)..(776): "n" may be a, t, c, g, other or unknown
tttgtatgagaggagacatgtgtccttttgatcatggaagtgatccagtagttgtagaagatgtgaatcttcctggtatgctgcctttcccagcacagcctcctgttgttgaaggaccacctcctcctggactccccccacctccaccaattcttacacccccacctgtgaatctcaggcccccagtaccaccgccaggtccattgccacccagtctcccacctgttacaggaccaccacctccacttcctcctttgcagccatctggcatggatgctcctccaaactctgcaaccagttctgttcctactgtagtaacaactggcattcatcaccagcctcctcctgctccaccctctctttttactgcagatacatatgacacagatggctacaatcctgaagccccaagcataacaaacacttccagacctatgtatagacacagagtgcatgcacaaaggcccaacttgataggactaacatcaggggatatggatttgccacccagagaaaagcctcccaataaaagcagtatgaggatagtagtggactcagaatcaaggaaaagaaccattggttctggagagcctggagttcctacaaagaagacttggtttgataaaccaaattttaatagaacaaacagcccaggctttcagaagaaggttcaatttggaaatgaaaataccaagcttgaacttagaaaagttcctccagaattaaataatatcaagcaaacttaatgaacattttagtcgatttggaaccttggntaacttacaggttgcttataatggtgatcctgaaggggccctaatccaatttgaacatacgaaaa

SEQ ID NO: 2162 - DNA, 756 bp, Homo sapiens
  misc_feature (3)..(3): "n" may be a, t, c, g, other or unknown
  misc_feature (690)..(690): "n" may be a, t, c, g, other or unknown
  misc_feature (721)..(721): "n" may be a, t, c, g, other or unknown
  misc_feature (730)..(730): "n" may be a, t, c, g, other or unknown
cgntctctgctttctggcagacctccttccctttctctcccctcgtctctcttgaaccccttccgctcagactcctgcacccaccatggcacagagcagctctcactgaggtcaccagccacctcctccactctgttggtccagaggccatgctgggccctcatcctgtggacctgccagcagcatcttctttcgtaaaatgcccctgcttggggcagcaccctctggtcctccctctgcactggctgggcctctgtgtctgtgggttctgctcatctccccgagctctcaccatcggggcttctctgggctcggtgcttcggcagccccccttttttaactccaggtgttccttggggcatctcatgtcatctccagcattaaaccacgtctctgatgattcctgaggctgtttcctggagttctctcctaaactccaggctcaacagcccagccatctacacagtccctccacgtggtggcctcagagctactgcaagcttccatgatcacagctgaattgctggtggcctgccctgccccaaacctgtagctctgtcctcttctccatgggaatggaagctctttgctctcattgctcaagcccaaaagcccgggggtcatcctcagctgctccttctctgtcatacactgcgtcctattcgtcagcaaaatccatctagaatctgnccgcttctcgctggtggcaaccggcaccttnctgaactangggaaccttcatcttttggggctctt

SEQ ID NO: 2163 - DNA, 841 bp, Homo sapiens
  misc_feature (46)..(46): "n" may be a, t, c, g, other or unknown
  misc_feature (815)..(815): "n" may be a, t, c, g, other or unknown
  misc_feature (841)..(841): "n" may be a, t, c, g, other or unknown
attcgagaatgggacatggaatgaggcgacggccccagcaagcccnagcagccccagccccagccccaggcccagcagcagcagcagcagcccctgctctcccgccgcccggagaggctctgcagccatgaagccaaccgtcccgaggcaccgccggtaagcagggagcctccgcggagctcccgccgccgctcccccttggcgccaaaggcacccggtcccggagcagccacgcgcggcccgtgagcctcgccaccagcgggggctcagaggaggaggacaaagacggcggggtgctgttccacgtcaacaagagcggcttccccatcgacagccacacctgggagcgcatgtggatgcacgtggccaaggtgcaccctaaggggggagaaatggtgggcgccatcaggaacgccgccttcttggcaaagccttcaataccccaggtcccaaactacaggctgtcgatgacgatcccagactggctccaggcgatccagaattacatgaagaccctacaatataatcacacagggacccagttctttgaaattaggaaaatgagaccgctgagtgggttaatggaaacagcaaaagaaatgacccgagagtccttgcctatcaaatgccttgaagctgtcatcctgggcatctacttaaccaatgggcagccttccattgagcggttccccatcagctttaaaacctacttctcaggaaactactttcaccacgttgtgctggggatttactgcaatgggccgctatggctcattgggcatgaacccgcaaggcttaactgatggacaagccanttgactttttcggactctgaatgacn

SEQ ID NO: 2164 - DNA, 796 bp, Homo sapiens
  misc_feature (668)..(668): "n" may be a, t, c, g, other or unknown
  misc_feature (716)..(716): "n" may be a, t, c, g, other or unknown
  misc_feature (718)..(718): "n" may be a, t, c, g, other or unknown
  misc_feature (776)..(776): "n" may be a, t, c, g, other or unknown
gctaagaaggggagactgaggctgaggctggggaacatcgggcagcatgagcggctgcgggctcttcctgcgcaccacggctgcggctcgtgcctgccggggtctggtggtctctaccgcgaaccggcggctactgcgcaccagcccgcctgtacgagctttcgccaaagagcttttcctaggcaaaatcaagaaggtaacgcgagccctgggcgaacccttgctgtctggctcccgcttttcaccctcagctgcaagactggtgttgaactttgtgagattccccaaacctgccagagagatacaccctgcggccgaggcgtgttaacactccggattcctgagttccaggaaaaccttcccagagaaaggtggactcccgaaaaattgaccaggaagggaaaatcccagatgaaactttggagaaattgaagagcctagggctttttgggctgcaagtcccagaagaatatggtggcctgggcttctccaacaccatgtactcacgactaggggagatcatcagcatggatgggtccatcactgtgaccctggcagcgcaccaggctattggcctcaaggggatcatcttggctggcactgaggagcagaaagccaaatacttgcctaaactggcgtccggggagcacattgcagccttctgcctnacggagccagccagtgggagcgatgccagccttaatccggagcagagncncccttagtggaagaccagaagcacttacattcttcaatgggcttccaaggtctgggantacttaatgggaggacttgg

SEQ ID NO: 2165 - DNA, 743 bp, Homo sapiens
  misc_feature (674)..(674): "n" may be a, t, c, g, other or unknown
  misc_feature (690)..(690): "n" may be a, t, c, g, other or unknown
  misc_feature (695)..(695): "n" may be a, t, c, g, other or unknown
attcacaggaggctacgggctggagaaggacccgcagagatcaggggacttgtatacccaggcagcagaggcagcgatggaagccatgaagggccgactggccaaccagtactaccaaaaggctgaagaggcctgggcccagatggaggagtaaccaggaaaatcactgccggctagtcccaagcaaacgggctaggaggaaagattaaaaaaacaacaacaacaacttatttagtttggggaggggaagcatttttaagtgtgttgtaaaatcaaattttatatttcattttttgactcttgaaaaatgtctttgctccttggcagctaccagcagagactctatagctgtctcttagggcagtattttggggaagtggggcttgaagaagcagcctaatgaaccaacataccgttttgtgtgtggttttttttgtttgtttgtttgtttgttttgagacagagtcttgctctgtcacccaggctggagtgcagtgacatgatcttagctcactgcaacctccgcctcctgggttcaagtgattctcctgcctcagcctcccaagtagctgggattactggtgcacaccaccacactcagctaatttttgcatttttagtagagatggggtttcaccatgttggccaggctggtctcgaactcctaacctcangtgatccacctgcctnacctnccaaggtgctgggattacaggtgtgaaccaccatgcctgcccattttg

SEQ ID NO: 2166 - DNA, 841 bp, Homo sapiens
  misc_feature (1)..(1): "n" may be a, t, c, g, other or unknown
  misc_feature (74)..(74): "n" may be a, t, c, g, other or unknown
  misc_feature (771)..(771): "n" may be a, t, c, g, other or unknown
naattaagaggagagatgttggtccttatggcattcgatctgaatattgtatcaggaaaatcatttgtcccatnggagttccagaaacaccaaaagaaacgcctacacctcagaggaaaggccttcgatcaagtgcactgcggccaaagagaccagaaacgcccaagcaaactggccctgttattattgaaacctgggtagcagaagaagaactggaattgtgggagatcagggcatttgctgagagagtggagaaagaaaaggcacaagcagttgagcaacaggctaagaaacgactggagcagcagaagccgacagtgattgcaacttccactacttccccaacaagcagtacaaccagcaccatctctccagcacagaaggttatggtggcccccataagtggctcagttacaactggaaccaaaatggtactaactactaaagttggatctccagctacagtaacattccaacaaaacaagagctttcatcaaacctttgctacatgggttaagcaaggccagtcaaattcaggcgttgttcaagtacagcagaaagtcctgggtatcattccatcaagtacaggtaccagtcagcaaacctttacttcattccagcccaggacagcaacagtcacaattaggcccaatacctcagctctggaggaaccacaagcaattcacaagtaatcacagggcctcagattcgccctggtatgaccgtgattagacaccacttccaacagtcaacactaggaaaggcaatttnttcgaacacctgtgatggtacagccaggtgctcctcaacaaggggatggacttcaaatcatcaggggggc

SEQ ID NO: 2167 - DNA, 826 bp, Homo sapiens
  misc_feature (1)..(1): "n" may be a, t, c, g, other or unknown
  misc_feature (45)..(45): "n" may be a, t, c, g, other or unknown
  misc_feature (795)..(795): "n" may be a, t, c, g, other or unknown
  misc_feature (819)..(819): "n" may be a, t, c, g, other or unknown
  misc_feature (822)..(822): "n" may be a, t, c, g, other or unknown
naaaaaaacaccatcatgctgtctgctggcagcttttcctccccntatgagcacctcagccagccagagacaaagcgcatggtagagcactacaccgcctatctcagcgacaacacccgcctcattgctaacccgggcctcaaattctctgtcagaaatgaagtaatggctaccagccacgtcacagatgaatggatgacacaaatggaaatgagtagcctgaacacttacattgtccgccgttacatagcaacacccaatggcgtcctcagaatttatcctggttccctcatggacaaagcatttgatcccactaggagacaatggtatctccatgcagtagctaatccagggttgatttctttgactggtccttacttagatgttggaggagctggttatgttgtgacaatcagtcacacaattcattcatccagtacacagctgtcttctgggcacactgtggctgtgatgggcattgacttcacactcagatacttctacaaagttctgatggacctattacctgtctgtaaccaagatggtggcaacaaaataaggtgcttcataatggaggacaggggttatctggtggcgcacccgactctcatcgaccccaaaggacatgcacctgtggagcagcagcacatcacccacaaggagcccctggtagcaaatgatatcctcaaccaccccaactttgtaaagaaaaacctgtgcaacaagcttcagtgacagaacggtccaaaggtttataattcaacaccagccttgcgggggatttgacgaaccttngcatggcagccactgttcaatacngantaca

SEQ ID NO: 2168 - DNA, 806 bp, Homo sapiens
  misc_feature (45)..(45): "n" may be a, t, c, g, other or unknown
  misc_feature (747)..(747): "n" may be a, t, c, g, other or unknown
  misc_feature (774)..(774): "n" may be a, t, c, g, other or unknown
  misc_feature (795)..(795): "n" may be a, t, c, g, other or unknown
tctgaactagacagggcagttacccaaatcagtgtagacctgatngatgactacccagcatctgacccacggggggctgagtctgtccctgaggaagcacctgggttcagcaatacgtcactgattatccttcaccagctagaagacaagatgaaagctcactcttttcttatggactttattcatcaagttggcttatttggacgtctaggcagttttccagttagagggacaccgatggccactcgactgttgctctgtgagcatgccgaaaagctgtcagccgccattgttctcaagaaccaccactcccggctttctgaccttgtcaacacagccatattgattgctttgaacaagagggagtatgaaatcccatccaacctgactcctgcagatgtctttttcagggaggtatcccaagtagataccatctgtgagtgcttactggagcatgaggagcaagtcttgagggatgcacctatggattccattgaatgggctgaagtggtgatcaatgtgaacaatattctcaaggatatgctgcaggctgctagtcattatcgccaaaatagaaactctttgtatagaagagaagaatcactagaaaaagaacctgaatatgttccatggacggcaacaagtggtcctggtggcatccgaacggtaataatacgccagcatgagattgtcctgaaggtggcttatccacaggcagacagcaacctccgaaacatcgtgaccgancacttggtagccctgatcgattgcttnctggaatggttattgtttctnacttaagtctg

SEQ ID NO: 2169 - DNA, 530 bp, Homo sapiens
  misc_feature (328)..(328): "n" may be a, t, c, g, other or unknown
  misc_feature (332)..(332): "n" may be a, t, c, g, other or unknown
  misc_feature (469)..(469): "n" may be a, t, c, g, other or unknown
  misc_feature (498)..(498): "n" may be a, t, c, g, other or unknown
  misc_feature (506)..(506): "n" may be a, t, c, g, other or unknown
ccggaccccggtgttcatcttcgagaggctctgcagcatcatttatcctgaggagaatgaagtcactgagttctttgtgaccctggagaaggatccccaacaagaagacttcttacagggcaggatgcctgggaacccgtatagcatcaatgagccaggcatcgggccgctgatgagggatataaagaacaagatttgccaggactgtgacttagtggccctcctggaagatgacagtggcatggagcttctagtgaacaataaaatcattagtttggaccttcctgtggctgaagtttacaagaaagtctggtgtaccacgaatgangganagcccatgaggattgtttatcgtatgcgggggctgctgggcgatgccacagaggagttcattgagtccctggactctactacagatgaagaagaagatgaagaagaagtgtataaaatggctggtgtgatggcccantgtgggggcctggaatgcatgcttaacanactcgcanggatcagagatttcaagcagggac

SEQ ID NO: 2170 - DNA, 836 bp, Homo sapiens
actgaaatgtttggtcagtacccacttcaggtcaatgggttcaaagatctgcatgagtgcctagaagctgcaatgattgaaggagaaattgagtctttacattcagagaattcaggaaaatcaggccaagagcattggtttactgaattaccacctgtgttaacatttgaattgtcaagatttgaatttaatcaggcattgggaagaccagaaaaaattcacaacaaattagaatttccccaagttttatatttggacagatacatgcacagaaacagagaaataacaagaattaagagggaagagatcaagagactgaaagattacctcacggtattacaacaaaggctagaaagatatttaagctatggttccggtcccaaacgattccccttggtagatgttcttcagtatgcattggaatttgcctcaagtaaacctgtttgcacttctcctgttgacgatattgacgctagttccccacctagtggttccataccatcacagacattaccaagcacaacagaacaacagggagccctatcttcagaactgccaagcacatcaccttcatcagttgctgccatttcatcgagatcagtaatacacaaaccatttactcagtcccggatacctccagatttgcccatgcatccggcaccaaggcacataacggaggaagaactttctgtgctggaaagttgtttacatcgctggaggacagaaatagaaaatgacaccagagatttgcaggaaagcatatccagaatccatcgaacaattggaattaatgtctctgacaaatctatgatacaagttccttatcgattacattg

SEQ ID NO: 2171 - DNA, 620 bp, Homo sapiens
  misc_feature (576)..(576): "n" may be a, t, c, g, other or unknown
  misc_feature (601)..(601): "n" may be a, t, c, g, other or unknown
  misc_feature (604)..(604): "n" may be a, t, c, g, other or unknown
agttagggcggcggatggaggtcagcggtggtgctcgctgcggtttggaatcacttgctaggagtcttgtctctctgccacccaggacatcatggcagctcacctggtaaagcgatgcacgtgcctcctgagagaagctgctcgtcaggcccctgccatggctccagttggccgactgagacttgcctgggtagcccataagactctgacttcctcagccacctcacccatttcccacctcccaggttccttgatggagccggtggagaaggaacgagcatctactccctacatagagaagcaggtggaccacctcatcaagaaggccacaaggccagaggagctcctggagctacttggtggcagtcacgacttggacagcaatcaagcagcaatggtacttatccggctctctcacttgctgtctgagaagccagaagataaaggcttgctcatacaggatgcccactttcatcaacttctctgtctgctcaacagtcagattgcctcggtctggcatggtaccctctcgaagctgctgggaagcctgtatgctctgggcatccccaaggcctncaaggagctgcagtcggtggagcangangtccgctagcgcatgc

SEQ ID NO: 2172 - DNA, 656 bp, Homo sapiens
  misc_feature (612)..(612): "n" may be a, t, c, g, other or unknown
  misc_feature (636)..(636): "n" may be a, t, c, g, other or unknown
  misc_feature (650)..(650): "n" may be a, t, c, g, other or unknown
aactttatcaagagcctggatgactcgcagtgtggcatcacctacaagatggagaaggtttactccaccttgaaagataaggatttggagctctacctgaaactgcaagagcagaacatcaagcctcagttctttgccttccgctggctgacactgctgctgtcccaggagttcttgctgcctgacgtcatccgcatctgggactccctcttcgccgatgacaaccgctttgacttcctcctcctcgtctgctgcgccatgctcatgctgatccgggagcagttgctggaaggggacttcactgtgaatatgcggctgctgcaggactaccccatcacagatgtctgccagatcctgcagaaagccaaggagctccaagactcaaagtagcccggcggcaagaggcccacgttcgggggagaagcctcccgaccctgtgccctggctcccgggacacatagaaacctgtaggaacccagcctgaggggaagccacaggatcggcccgagacccaggccatgcccactggggacacactgtgccgtgctccttctgccgccacgcccagctccccacctgccctgcactctgcctctttgccaggatactgangagggctggagctcgggaagttgnccttcctgggccanggcccg

SEQ ID NO: 2173 - DNA, 683 bp, Homo sapiens
  misc_feature (77)..(77): "n" may be a, t, c, g, other or unknown
  misc_feature (618)..(618): "n" may be a, t, c, g, other or unknown
  misc_feature (664)..(664): "n" may be a, t, c, g, other or unknown
  misc_feature (682)..(682): "n" may be a, t, c, g, other or unknown
ccggtccatgcagttgtatacatagtgttcatgctgggctcctgtgcattcttctccaaaacgtggattgaggtctnaggttcctctgccaaagatgttgcaaagcagctgaaggagcagcagatggtgatgagaggccaccgagagacctccatggtccatgaactcaaccggtacatccccacagccgcggcctttggtgggctgtgcatcggggccctctcggtcctggctgacttcctaggcgccattgggtctggaaccgggatcctgctcgcagtcacaatcatctaccagtactttgagatcttcgttaaggagcaaagcgaggttggcagcatgggggccctgctcttctgagcccgtctcccggacaggttgaggaagctgctccagaagcgcctcggaaggggagctctcatcatggcgcgtgctgctgcggcatatggacttttaataatgtttttgaatttcgtattccttcattccactgtgtaaagtgctagacattttccaatttaaaattttgctttttatcctggcactggcaaaaagaactgtgaaagtgaaattttattcagcccgactgccagagaagtgggaatggtataggattgnccccaaagtgtccatgtaacttttggtttaacctttgcaccttctnatgctggatgccggttgna

SEQ ID NO: 2174 - DNA, 725 bp, Homo sapiens
  misc_feature (574)..(574): "n" may be a, t, c, g, other or unknown
  misc_feature (646)..(646): "n" may be a, t, c, g, other or unknown
  misc_feature (709)..(709): "n" may be a, t, c, g, other or unknown
  misc_feature (722)..(722): "n" may be a, t, c, g, other or unknown
aaaaaaaaaaaaaaaaaaaaatttacagagttgtcctcggaggtccaggacagcggccagcccggcggcgggagtcagggccacgccacctgcagggaagaacccgagtcgaagcgggaagatggctgcagacaggcctgcagatcagggagcagagaaacatgaaggcacaggtcagtcctctgggatcactgatcaagagaaggagttatccaccaatgctttccaagctttcacatctggaaattatgatgcctgtctacaacaccttgcctgtctacaagatataaacaaagatgattataaaataattttgaatacagcagtagctgagttttttaaaagtaaccaaacaacaacagataatttgagacaaacacttaaccagctgaagaatcaggtccactcagctgttgaagaaatggatggattagatgatgttgaaaacagcatgttgtactataatcaagcagtcattctttatcatctgcggcagtatacagaagccatatcagttggtgaaaaactttatcagttcatagagccttttgaaaaatttgcccaagcagtgtgntttttgcttgtagacctgtatatattaacctaccaagcttgagaaagctttgcatcttcttgctggcctaanaaaaaaatgatttcacaagggtaaccaattacccaaaaatgggaaaggaatggagactgggtnattaaccaacccnccc

SEQ ID NO: 2175 - DNA, 713 bp, Homo sapiens
  misc_feature (2)..(2): "n" may be a, t, c, g, other or unknown
  misc_feature (77)..(77): "n" may be a, t, c, g, other or unknown
  misc_feature (363)..(363): "n" may be a, t, c, g, other or unknown
  misc_feature (568)..(568): "n" may be a, t, c, g, other or unknown
  misc_feature (640)..(640): "n" may be a, t, c, g, other or unknown
  misc_feature (647)..(647): "n" may be a, t, c, g, other or unknown
  misc_feature (692)..(692): "n" may be a, t, c, g, other or unknown
gntatttcagaccaaagtaaatgtccaactctctgcacacagaaaaaatcttggaaatgtaatgaatgtggaaaaanctttactcagagctcatcccttacccaacatcagagaactcatactggagagagaccctacacatgtgaggaatgtgggaaagcctttagtcgtagttcattccttgttcaacatcaaagaattcacactggagtgaaaccatatggatgtgagcagtgtgggaaaacatttcgatgtcgatcatttcttactcagcatcaaagaattcacactggagagaaaccttataaatgcaatgaatgtgggaattccttccgcaatcactcacatctcactgaacaccanagaattcacactggagagaaaccttataaatgcaataggtgtgggaaggcattcaatcagaatacacaccttattcatcatcagagaattcacactggtgagaagccttacatatgcagtgaatgtggctcttcttttcgaaaacactcaaatcttacgcaacatcagagaattcacactggggaaaaaccccataaatgtgacnaatgtgggaaaactttccaaacaaaggcaaacctctctcagcatcagagaattcatagtggagagaaccccnctaatgnaaaagaatgtggcaaagccttttgcagaacccatctcttattaancacccaccgaattcattactc

SEQ ID NO: 2176 - DNA, 557 bp, Homo sapiens
  misc_feature (1)..(2): "n" may be a, t, c, g, other or unknown
  misc_feature (256)..(256): "n" may be a, t, c, g, other or unknown
  misc_feature (338)..(338): "n" may be a, t, c, g, other or unknown
  misc_feature (380)..(380): "n" may be a, t, c, g, other or unknown
  misc_feature (420)..(420): "n" may be a, t, c, g, other or unknown
  misc_feature (466)..(466): "n" may be a, t, c, g, other or unknown
  misc_feature (515)..(515): "n" may be a, t, c, g, other or unknown
  misc_feature (522)..(522): "n" may be a, t, c, g, other or unknown
nntagcgggcggcagagctggagtgaagggagctagtggtaaagggagctggtggaggggtggcggcaggggtaaggggcaggggacaccctctagacggagagcgggctccgaggtcctggctggccctcggtgcgcccgcccctgtgttggtcccacaatccctggcaatgagaggccagggtttattggacagagtcagttgtggggttcagagggtcagcaatcaatcaatcctccgaatccagagatttanacccagtcgtccgtattaggactggaggggggtcaataggttcagtgtttgagatgccaagggaacctgtcttttgatttgnggttcaacatacagaggtagcagtcaccattatgctcaaagnggtgatcctgattggaggccctcaaaagggaactcgcttnagacctttgtcttttgaggtgcccaaaccattgattcctgtggcangggtccctatgatccaacaccatattgaagcctgtgcccaggtccctgnaatgcangagattctgctcattggcttctaccaacctgatga

SEQ ID NO: 2177 - DNA, 616 bp, Homo sapiens
  misc_feature (536)..(536): "n" may be a, t, c, g, other or unknown
  misc_feature (610)..(611): "n" may be a, t, c, g, other or unknown
atgcgtgcaggcccggagccccaggcgctggtggggcagaaacgcggcgccctgcgtcttctggttccgaggctggtcctcaccgtttccgctccggcggaagtgaggaggagggtccttcgacccgtgctgagctggatggaccgcgagacgcgcgccctcgccgacagccacttccgaggcctgggggtcgatgtccccggcgtcggccaggctccgggccgggtagccttcgtctcggagccgggcgccttctcctacgccgactttgtgcggggcttcttgctgcccaacctgccctgcgtgttttccagcgccttcacgcagggctggggcagccggcggcgctgggtgacgcccgcggggaggcccgacttcgaccacctgctacggacctacggagacgtggttgtaccagttgcaaactgtggggtccaggaatacaactcgaaccccaaagagcacatgactctcagagactacatcacctactggaaagagtacatacaggcgggctactcctctccaagggctgnctctaccttaaaagactggcacttgtgcaagggacttttccggtgggaaggacgttttcacccttgcctggggnnccttt

SEQ ID NO: 2178 - DNA, 560 bp, Homo sapiens
  misc_feature (77)..(77): "n" may be a, t, c, g, other or unknown
  misc_feature (526)..(526): "n" may be a, t, c, g, other or unknown
  misc_feature (531)..(531): "n" may be a, t, c, g, other or unknown
  misc_feature (542)..(542): "n" may be a, t, c, g, other or unknown
tcatcatgaccatgatcgtccataagaactgggtggacctggcccgggccgtcagctactacatccggttcttcatnacctacatccctttctacggcatcctgggagccctccttttcctcaacttcatcaggttcctggagagccactggtttgtgtgggtcacacagatgaatcacatcgtcatggagattgaccaggaggcctaccgtgactggttcagtagccagctgacagccacctgcaacgtggagcagtccttcttcaacgactggttcagtggacaccttaacttccagattgagcaccacctcttccccaccatgccccggcacaacttacacaagatcgccccgctggtgaagtctctatgtgccaagcatggcattgaataccaggagaagccgctactgagggccctgctggacatcatcaggtccctgaagaagtctgggaagctgtggctggacgcctaccttcacaaatgaagccacagcccccgggacactgtggggaaggggtgcangtggngtgatggccanaggaatgatgggcttttg

SEQ ID NO: 2179 - DNA, 854 bp, Homo sapiens
  misc_feature (726)..(726): "n" may be a, t, c, g, other or unknown
  misc_feature (808)..(808): "n" may be a, t, c, g, other or unknown
  misc_feature (822)..(822): "n" may be a, t, c, g, other or unknown
  misc_feature (843)..(843): "n" may be a, t, c, g, other or unknown
taaatttggtgaacataatgaatgtacagatgccctctaccagaaattagactttacagcacatcagagaattcacacagaagataaattctacctttctgatgaacatgggaaatgcagaaaatccttttaccggaaagcacacctcattcagcatcagaggccccactcaggagagaaaacttaccaatatgaggaatgtgcaaaatccttttgttcaagttcacatcctattcagcatcctggaacttatgtgggattcaaactttatgaatgtaatgaatgtgggaaagctttctgtcagaattcaaacctcagtaaacatctgagaattcacacaaaagagaaaccttgtgataacaatggctgtgggagatcttacaagtcacccctcataggacaccagaaaacagatgcagagatggaactctgtggtggcagtgaatatgggaagacatcacatctcaaaggacatcagagaattctcatgggggagaaaccctatgaatgtattgaatgtgggaaaactttctccaagacatcacatctcagagcacatcagagaattcacacaggtgaaaaaccctatgaatgtgttgaatgtgagaaaactttctctcacaagacacacctcagtgtacatcagagagttcacacaggggagaaaccctatgaatgtaatgactgtgggaaatcttttacctatactcaccctgagagcacatnaaagaattccacaggtgagaagccctatgaatgcagtgactgtgagaaaacttttgccataattcagcccttagagcacatnatagaattcacacnggggagaaaccttatgaatgnaatgaatgtgg

SEQ ID NO: 2180 - DNA, 706 bp, Homo sapiens
  misc_feature (663)..(663): "n" may be a, t, c, g, other or unknown
  misc_feature (696)..(696): "n" may be a, t, c, g, other or unknown
  misc_feature (701)..(701): "n" may be a, t, c, g, other or unknown
tattgcgctttttaaacagatggattccagaagatatgatgtcaagaccaggaagtggagctttctcttggaagagcacagtaaactaattgcaaaggtgcgctgcctcccacaagttcagctggaccctctgcccacgactctcaccctggcgtttgcttctcagctcaagaagacatctctcagtctcacgccagatgtcccagaggcagacctttctgaagtggaccccaagctcgtgtctaatctgatgccctttcagagagctggagtcaattttgccatagccaaaggaggccgcctgctgctcgctgacgacatgggcctggggaagaccatccaagccatctgcatcgcagccttttaccggaaggagtggccgctcctggtggtggtgccatcctccgtgcgcttcacctgggagcaggccttccttcggtggctgccatctctgagcccagattgcatcaacgtcgtggtgactgggaaggaccgcctgacagctggcctgatcaacattgtcagctttgaccttcttagcaagttggaaaaacagctaaaaaccccttttaaagttgtcatcattgatgaatctcacttcctcaaaaacagtaggactgcccgctgtcgagcagctatgccggtcctaaaggttgccaaganggtgatcctgttgtcgggcacaccagccatgtnccggnccgca

SEQ ID NO: 2181 - DNA, 828 bp, Homo sapiens
  misc_feature (796)..(796): "n" may be a, t, c, g, other or unknown
  misc_feature (816)..(816): "n" may be a, t, c, g, other or unknown
  misc_feature (824)..(824): "n" may be a, t, c, g, other or unknown
tgagaaagctgagaatcaatctcaatctgatttatgatcataaccctaaggtgtttcttggaaatgtggaaaccttcattaaacagatagattctgtggatcatattaacttgttttttacagaattgaaagaagaagatgtcacgaagaccatgtaccctgcaccagttaccagcagtgtctacctgtccagggatcctgacgggaataaaatagaccttgtctgcgatgctatgagagcagtcatggagagcataaatcctcataaatactgcctatccatacttacatctcatgtaaagaagacaaccccagaactggaaattgtactgcaaaaagtacacgagcttcaaggaaatgctccctctgatcctgatgctgtgagtgctgaagaggccttgaaatatttgctgcatctggtagatgttaatgaattatatgatcattctcttggcacctatgactttgatttggtcctcatggtagctgagaagtcacagaaggatcccaaagaatatcttccatttcttaatacacttaagaaaatggaaactaattatcagcggtttactatagacaaatacttgaaacgatatgaaaaagccattggccacctcagcaaatgtggacctgagtacttcccagaatgcttaaacttgataaaagataaaaacttgtataacgaagctctgaagttatattcaccaagctcacaacagtaccaggatatcagcattgcttatggggagcacctgatgcaggagcacatgtatgagccaccggggctcatgtttgncccgttgcggtgcccacganaaaagctntttt

SEQ ID NO: 2182 - DNA, 866 bp, Homo sapiens
  misc_feature (702)..(702): "n" may be a, t, c, g, other or unknown
  misc_feature (704)..(704): "n" may be a, t, c, g, other or unknown
  misc_feature (792)..(792): "n" may be a, t, c, g, other or unknown
  misc_feature (821)..(821): "n" may be a, t, c, g, other or unknown
  misc_feature (829)..(829): "n" may be a, t, c, g, other or unknown
cttcctagggttctttctagagtacggcagcaagttgtcagattccctagttgaatttgctttggacatcagtgtgaagcagaactgatatgccacttgaattaataaaggaagtcaatggggtgcctgaagttcagccgctgagtaaattacataaagtagatttcggatccctacagccaggttacaattatagcaagaaatatattcagggaaaactttcacttatctcttctttaacttatcgtggaaataaaacagctgttttgcagattggactacaaggacaccattgcagtggctagatttattgtttttttagcttcttcatctacaagcagagatggtaaaccttgcatatttttgaaagcatttgaagacctcaaatcaactgtttatgtttatgtcaaatctttaagagatttttctacagaatcaatgtctttggttccagcaacaaattatatatatacacccctgaatcaacttaagggtggtacaattgtcaatgtctatggtgttgtgaagttctttaagcccccatatctaagcaaaggaactgattattgctcagttgtaactattgtggaccagacaaatgtaaaactaacttgcctgctctttagtggaaactatgaagcccttccaataatttataaaaatggagatattggtcgctttcacaggctgaagattcaagtntntaaaaaggagactcagggtatcaccagctctggctttgcatctttgacgttgagggactttgggagcccctatcataccttgcacttnagccagtattttacttcctactgaggccncaaatggnagaagccttacgggtttgggctttactcatatgcacg

SEQ ID NO: 2183 - DNA, 865 bp, Homo sapiens
  misc_feature (821)..(821): "n" may be a, t, c, g, other or unknown
aacaaagatggtggaggaggagaacatccgcgtggttcgttgtggcggcagcgagttgaactttaggagagctgtgttctctgcagattctaagtatatcttctgtgtctctggagactttgttaaagtttacagcacagttacagaagagtgtgtacacatactgcatggacacagaaatctggtgactggaatccagcttaaccccaacaaccatctacagctgtattcttgttcccttgatggcacaattaaactgtgggactatatagatggcatcttaataaagactttcatagttggatgtaaacttcatgccctctttactcttgcccaagctgaggattctgtctttgttatagtgaataaagaaaaaccaaatatatttcagctggtttcagtgaaactgccaaaatcctcaagccaggaagtagaagccaaggagctgtcctttgttttggattacataaaccagtcacccaagtgcattgcctttggaaacgagggagtatatgttgctgcagtacgggaattttacttgtctgtttattttttcaaaaagaaaacaacatcaaggtttactttatcatcatcaagaaataagaagcatgctaaaaacaattttacgtgtgtagcatgtcacccaacggaagactgcatcgcatctggtcacatggatggcaaaattcgctttggaggaatttttatgatgataagaaatatacgtacacatgtttacattgcaccatgatccggtatggatttggctttttcagtgacaggcaccagtctgctgaatgcggtcgtgaatctgtcttganagtggcccgatgcaccagagaaaataggagttctcccgcgttag

SEQ ID NO: 2184 - DNA, 878 bp, Homo sapiens
  misc_feature (801)..(801): "n" may be a, t, c, g, other or unknown
  misc_feature (835)..(835): "n" may be a, t, c, g, other or unknown
atgaaatgggtcttggcaaaactattcaatcaattacattcctctatgaaatccttctgactggtataagaggacctttcctgattattgctccactttctactattgcaaactgggagagagaatttcgtacgtggactgatattaacgttgtggtttatcatgggagcctgattagcagacaaatgatacagcaatacgagatgtacttcagggattcacaggggcgtatcattcgaggagcttacagattccaagccatcatcaccacttttgaaatgattcttggaggctgtggagagcttaatgcaattgaatggcgatgtgtgattattgatgaagcacataggttaaaaaataaaaattgtaaactcttagagggcctgaaactcatgaatctggaacacaaggtgcttttgactggcacccctctccaaaatacagttgaagaactatttagtcttcttcactttcttgaacccttaaggtttccttctgaatcaacatttatgcaagaatttggggatctgaaaacagaggaacaggtacagaaacttcaggttatcctgaaaccaatgatgttgagacgattaaaagaagatgtggaaaagaagttggcacctaaagaagaaaccatcattgaagtagaacttactaatattcaaaagaaatactaccgggctatcttggaaaagacttttcttttttatccaaaggagcaggacaaactaatgtcctaacttgggcaataccatgatggagctcaggaaatggtggaatcatccatatcttataaaaagngctgaggagaaaaatccttggagaattagagatncttccaatccactggttctggatttcatcttcaaccaaggatc

SEQ ID NO: 2185 - DNA, 760 bp, Homo sapiens
  misc_feature (679)..(679): "n" may be a, t, c, g, other or unknown
  misc_feature (715)..(715): "n" may be a, t, c, g, other or unknown
  misc_feature (719)..(719): "n" may be a, t, c, g, other or unknown
gcgcgcgtgagctgagccggtgggtgagcggcggccacggcatcctgtgctgtgggggctacgaggaaagatctaattatcatggacctgcaacagtttcttatgtgcctgtccctgtgcacagcctttgccttgagcaaacccacagaaaagaaggaccgtgtacatcatgagcctcagctcagtgacaaggttcacaatgatgctcagagttttgattatgaccatgatgccttcttgggtgctgaagaagcaaagacctttgatcagctgacaccagaagagagcaaggaaaggcttggaatgattgtagataaaatagacgcggataaagatgggtttgtgacggagggggagctgaaatcctggattaagcacgcccagaagaaatacatatatgacaatgttgaaaaccaatggcaggagtttgatatgaatcaagacggcttaatctcctgggatgagtacagaaacgtgacttatggcacttacctggatgatccagatcctgatgatggatttaactataaacagatgatggttagagatgagcggaggtttaaaatggcagacaaggatggagacctcattgccaccaaggaggagttcacagctttcctgcaccctgaggagtatgactacatgaaagatatagtagtacaggaaacaatggaagatntagattagaatgctgatgggttcattgatctagaanagtntattggtgacatgtacagccatgatgggaatctgatgaacc

SEQ ID NO: 2186 - DNA, 809 bp, Homo sapiens
  misc_feature (683)..(683): "n" may be a, t, c, g, other or unknown
  misc_feature (760)..(760): "n" may be a, t, c, g, other or unknown
  misc_feature (779)..(779): "n" may be a, t, c, g, other or unknown
  misc_feature (806)..(806): "n" may be a, t, c, g, other or unknown
ggagagatggggtttcaccatgttggctaagctggtctggaactcatggcctcaagttatctgcccacctcagcctcccaaagtgctgagtaagccaagttttctaatagccacattagacaagtaaaaggaaacaggttaaattcattttaacatgttttacttaacccaatgtatccaaaatagcatttcaacatgtcatcggttttttagttttttttttttttgagatagtgcttcgctttgttgcccaggctggagtgcagtggcacaatctcggctcactgcaacctccaccttccaggttcaagtgattctcctgcctcagcctcccgagtagctgggattacaggcacccgccaccatgcccactaatttttgtatttttggttagagatggggtttcgccatgttggccaggctagtctcaaactcctgacctcaggtgatccacccacctcggcctcccaaagtgctaggattacaggcgtgaggcaccgtgcctggcgtcatcggtattatttaaatgaattatgttacgttcttttgtgctgtcttcaaaatctgttatatattttacacttacaccaaatctcaattaccatggtacatttttatctgaaatgcttgacctttattttgatttcataaaattcatagttggagaagtagattcacatatncaagttgttccaattatataataagttttccaaaactggaaatgggtgtccattttttttttaaagtaaaaaagccnggctggtattttgaccaanttgtggggtggtttggtttggtttganaca

SEQ ID NO: 2187 - DNA, 831 bp, Homo sapiens
  misc_feature (584)..(584): "n" may be a, t, c, g, other or unknown
  misc_feature (642)..(642): "n" may be a, t, c, g, other or unknown
  misc_feature (720)..(720): "n" may be a, t, c, g, other or unknown
  misc_feature (763)..(763): "n" may be a, t, c, g, other or unknown
  misc_feature (773)..(773): "n" may be a, t, c, g, other or unknown
  misc_feature (826)..(826): "n" may be a, t, c, g, other or unknown
aggaagggcccgtcccgccttccccggcgcgccatggagccccgggcggttgcagaagccgtggagacgggtgaggaggatgtgattatggaagctctgcggtcatacaaccaggagcactcccagagcttcacgtttgatgatgcccaacaggaggaccggaagagactggcgtgctgctggtctccgtcctggaacagggcttgccaccctcccaccgtgtcatctggctgcagagtgtccgaatcctgtcccgggaccgcaactgcctggacccgttcaccagccgccagagcctgcaggcactagcctgctatgctgacatctctgtctctgaggggtccgtcccagagtccgcagacatggatgttgtactggagtccctcaagtgcctgtgcaacctcgtgctcagcagccctgtggcacagatgctggcagcagaggcccgcctagtggtgaagctcacagagcgtgtggggctgtaccgtgagaggagcttcccccacgatgtccagttctttgacttgcggctcctcttcctgctaacggcactccgcaccgatgtgcgccagcagctgtttcangagctgaaaggagtgcgcctgctaactgacacactggagctgacgctgggggtgactnctgaagggaaccccccacccacgctccttccttccaagagactgaaccgggccatggagatcctcaaaagtgctcttnaacatcaccctggacttcatcaaagggggaagttggaccaagnaaaaccttgnccttttaaccgacaccctgggggaacccttttttccgggacttgggtgaatgnatccg

SEQ ID NO: 2188 - DNA, 896 bp, Homo sapiens
  misc_feature (831)..(831): "n" may be a, t, c, g, other or unknown
  misc_feature (840)..(840): "n" may be a, t, c, g, other or unknown
  misc_feature (877)..(877): "n" may be a, t, c, g, other or unknown
aaaaaaaaactgggaagatggacgcagctactctgacctacgacactctccggtttgctgagtttgaagattttcctgagacctcagagcccgtttggatactgggtagaaaatacagcattttcacagaaaaggacgagatcttgtctgatgtggcatctagactttggtttacatacaggaaaactttccagccattggggggacaggccccacctcggacacaggctggggctgcatgctgcggtgtggacagatgatctttgcccaagccctggtgtgccggcacctaggccgagattggaggtggacacaaaggaagaggcagccagacagctacttcagcgtcctcaacgcattcatcgacaggaaggacagttactactccattcaccagatagcgcaaatgggagttggcgaaggcaagtccataggccagtggtacgggcccaacactgtcgcccaggtcctgaagaagcttgctgtcttcgatacgtggagctccttggcggtccacattgcaatggacaacactgttgtgatggaggaaatcagaaggttgtgcaggaccagcgttctctgtgcaggcgccactgcgtttcctgcagattccgaccggcactgcaacggattccctgccggagctgaggtcaccaacaggccgtcgccatggagacccctggtacttctcattcccctgcgcctggggctcacggacatcaacgaggcctacgtggagacgctgaagcactgcttcatgatgccccagtccctgggcgtcatcggagggaaacccaacagcgcccactacttatcggctacgttggtgangagctcatntacctggacccccaaaccacgcaaccagccgtggaanccactgattggcttgtttc

SEQ ID NO: 2189 - DNA, 895 bp, Homo sapiens
  misc_feature (846)..(846): "n" may be a, t, c, g, other or unknown
  misc_feature (862)..(862): "n" may be a, t, c, g, other or unknown
cttgtatgcaaccacttctaaactataggaaaacatttgatgtaattgtgatagatccaccatggcagaacaaatcagttaaaagaagtaataggtacagttatttgtcacccctgcaaataaagcaaatacctatccctaaattggctgctccaaactgtcttcttgttacttgggtgaccaatagacagaagcacctacgttttataaaggaagaactttatccctcttggtctgtggaggtagttgctgagtggcactgggtaaaaaggttttaaaagactacatcaagccagatggggaatatttggagttgtttgctcgaaatttacagccaggttggactagttggggcaatgaagttctcaaatttcagcatgtggattattttattgctctggagtctggaagctgactatgatcttgattaaagtagtggtttcttcattgtttcctcaccacttttcccttaattctaagtcatttttttattttgttaccaacccatattcttagaatataaacaggacttgtttttttcagtaagggaccagaagtgactagccttcatgtaattttaagatgaattttacttgagttgcactaacattctatgttattctagactatacaaattaagtggtaagcagttataaagacggcaagaccatgctattgaaaaagttcagaaaacatacaccgtggaccagaggtcttaatcctatctatggatgtgttttgtgtgacccatacagtgttgtaaaaaacacttagaaccattattctaaaaaatggggctatttcacattaaagtccagaattctggttcttttttaaacatcagangcttttggctacacanaggccttttttcttttctggcatcaatctgcag

SEQ ID NO: 2190 - DNA, 906 bp, Homo sapiens
  misc_feature (746)..(746): "n" may be a, t, c, g, other or unknown
  misc_feature (772)..(772): "n" may be a, t, c, g, other or unknown
  misc_feature (804)..(804): "n" may be a, t, c, g, other or unknown
  misc_feature (871)..(871): "n" may be a, t, c, g, other or unknown
tcgcatgaagatgaccaaaaacaaagggctggatgtttgcaattggactgatggggatgagatgcagtggggcccagccagggcagaggaggagcatggtgtctatgtgtatgacctgatggctactgtggtacacatcctggactcacgcacagggggcagcctggtggctcacatcaaagttggagagacctaccaccagcgcaaggagggcgttactcaccagcagtggtatctgttcaatgactttcttattgaacctattgataagcatgaagctgtgcagtttgacatgaattggaaagtacctgcaatcctttattatgtcaaacggaatctcaattccagatacaacctgaacatcaagaaccctattgaggcaagtgtcttgctggctgaagcctcgctggcacggaagcagcggaaaacacatactacctttattccactgatgctgaatgagatgccacagattggggacctggtgggtctggatgctgagtttgtcacccttaatgaggaggaagcagagttacgcagtgatggtaccaagtctaccattaaaccaagccagatgtcagtagccaggattacctgtgttcggggccagggacccaatgagggtatccccttcattgatgactacatctctacccaggagcaggtggtggattacttgactcaatactcgggtataaagcctggtggcctcgatgccaaaatttccttcaagcacctaacaactntcaagtctacctacttaaagcttcgntttctcattgacattggaagtcaaagtttggngggtcatggggcctgcaaaaaggactttccgggtcatcaacctgatggtgccccaagggcccaagtnccttgacactggctacctggttccattatgccccg

SEQ ID NO: 2191 - DNA, 681 bp, Homo sapiens
  misc_feature (341)..(341): "n" may be a, t, c, g, other or unknown
  misc_feature (367)..(367): "n" may be a, t, c, g, other or unknown
  misc_feature (599)..(599): "n" may be a, t, c, g, other or unknown
  misc_feature (630)..(630): "n" may be a, t, c, g, other or unknown
  misc_feature (660)..(660): "n" may be a, t, c, g, other or unknown
atacttgtgcggttccaagtgtggagaaagcggctctgggtctagattgagggatactccccctttccaccatgggcaagaagggcaaagttggcaagagccgacgagacaagttttatcacttggcgaaggagacgggttaccgttcccgatctgctttcaagctgatccagctcaatcgccgctttcagttcctgcagaaagcccgagccttgctggacctgtgtgctgcgccagggggatggctgcaggtagctgccaagtttatgcctgtatccagccttattgtgggagtggacctggttccaatcaagcctctccccaatgtggtgactctccangaggacatcacaacagaacgttgtangcaggccctgaggaaggagctgaagacctggaaggttgatgttgtgctcaatgatggggcccccaacgttggggctagctgggtccatgatgcttactcacaagcccatttgacactgatggctctacgtttggcttgtgactttttggcccgtggtggcagcttcatcacaaaggttttccgttctcgtgactatcagcctctgctatggatctttcagcagctggtccgncgtgtccaggccaccaagccccaagcctctngcatgaatctgcagagatctttgtatctgncaaggattcctggccctgcaa

SEQ ID NO: 2192 - DNA, 871 bp, Homo sapiens
  misc_feature (764)..(764): "n" may be a, t, c, g, other or unknown
  misc_feature (846)..(846): "n" may be a, t, c, g, other or unknown
  misc_feature (865)..(865): "n" may be a, t, c, g, other or unknown
cagactcgcagggatcagagatttcaagcagggacgccaccttctaacagtgctactgaaattgttcagttactgcgtgaaggtgaaagtcaaccggcagcaactggtcaaactggaaatgaacaccttgaacgtcatgctggggaccctaaacctggcccttgtagctgaacaagaaagcaaggacagtgggggtgcagctgtggctgagcaggtgcttagcatcatggagatcattctagatgagtccaatgctgagcccctgagtgaggacaagggcaacctcctcctgacaggtgacaaggatcaactggtgatgctcttggaccagatcaacggcacctttgttcgctccaaccccagtgtgctccagggcctgcttcgcatcatcccgtacctttcctttggagaggtggagaaaatgcagatcttggtggagcgattcaaaccatactgcaactttgataaatatgatgaagatcacagtggtgatgataaagtcttcctggactgcttctgtaaaatagctgctggcatcaagaacaacagcaatgggcaccagctgaaggatctgattctccagaaggggatcacccagaatgcacttgactacatgaaaaagcacatccctagcgccaagaatttggatgccgacatctggaaaaagtttttgtctcgcccagccttgccatttatcctaaggctgcttcgggcctggccatccacaccctggcacccaggttctgattggaactgattccatnccgaacctgctaagctggagcaggtgtccatgataagctttggaccttgcagaaaacctgttggaaccctggggacacctgnctaaccagaaattgcccancccagg

SEQ ID NO: 2193 - DNA, 819 bp, Homo sapiens
  misc_feature (679)..(679): "n" may be a, t, c, g, other or unknown
  misc_feature (757)..(757): "n" may be a, t, c, g, other or unknown
  misc_feature (767)..(767): "n" may be a, t, c, g, other or unknown
  misc_feature (811)..(811): "n" may be a, t, c, g, other or unknown
cccgttcctgcaccagccccgcaccctccccagaaggctggtcgccctggtctgagtggagtaagtgcactgacgacggagcccagagccgaagccggcactgtgaggagctcctcccagggtccagcgcctgtgctggaaacagcagccagagccgcccctgcccctacagcgagattcccgtcatcctgccagcctccagcatggaggaggccaccggctgtgcagggttcaatctcatccacttggtggccacgggcatctcctgcttcttgggctctgggctcctgaccctagcagtgtacctgtcttgccagcactgccagcgtcagtcccaggagtccacactggtccatcctgccacccccaaccatttgcactacaagggcggaggcaccccgaagaatgaaaagtacacacccatggaattcaagaccctgaacaagaataacttgatccctgatgacagagccaacttctacccattgcagcagaccaatgtgtacacgactacttactacccaagccccctgaacaaacacagcttccggcccgaggcctcacctggacaacggtgcttccccaacagctgataccgccgtcctggggacttgggcttcttgccttcataaggcacagagcagatggagatgggacagtggagccagtttggtttctncctctgcactagccaagaacttgctgcttgctgtgggggtccatcggttcaagactctgctggatgacatggggaagntggtcagctnattgcgaagtcagtagcagcttatgttttcacatgacctaattntgctgctg

SEQ ID NO: 2194 - DNA, 786 bp, Homo sapiens
  misc_feature (726)..(726): "n" may be a, t, c, g, other or unknown
  misc_feature (732)..(732): "n" may be a, t, c, g, other or unknown
  misc_feature (786)..(786): "n" may be a, t, c, g, other or unknown
aacgggatggggagctggaccagcagattatgagcttacagaaagcctggcctacattttactctttttggatttcttcctcatcaagagactgctgcagtgcctgtcatgtgacagcggcatggacatatgccccaggctttcctgctggggtccatccatgagcctgcaggtgccctcatggagccccagccctgccctggaagcttggctgagagcttcctggaggaggagcttcggctcaatgctgagctgagccagctgcagttttcggagcctgtgggcatcatctacaatcccgtggagtatgcatgggagccacatcgcaactacgtgactcgctactgccagggccccaaggaagtactcttcctgggcatgaaccctggaccttttggcatggcccagactggggtgccctttggggaagtaagcatggtccgggactggttgggcattgtggggcctgtgctgacccctccccaagagcatcctaaacgaccagtgctgggactggagtgcccacagtcagaagtgagtggtgcccgattctggggctttttccggaacctctgtggacagcctgaggtcttcttccatcactggtttgtccacaatctatgccctctgcttttcctggctcccagcgggcgcaaccttactcctgctgagctgcctgccaagcagcgagaacagcttcttgggatctgtgatgcaaccctctgncggcangtgcaactgcttgggggtgccggctggtggttgggaagttgggccaactggcan

SEQ ID NO: 2195 - DNA, 698 bp, Homo sapiens
  misc_feature (618)..(618): "n" may be a, t, c, g, other or unknown
  misc_feature (647)..(647): "n" may be a, t, c, g, other or unknown
  misc_feature (657)..(657): "n" may be a, t, c, g, other or unknown
gataattacccagcctaaccatttctcaggtgcttgcgaggtgatcagaaggcaaagatgtcggagcgaaaagtattaaacaaatactacccgccggactttgacccatcaaagatccccaaactcaagctccccaaagaccggcagtacgtggtgcggctgatggcccccttcaacatgaggtgtaagacgtgcggagaatacatctacaaggggaagaaattcaatgctcggaaggagacggtgcagaacgaggtctacctgggcctgcccatcttccgcttttacatcaagtgcacgcgctgcctggcagagatcaccttcaagacagaccctgaaaacacagactacaccatggagcatggagccgcgcggaatttccaggctgagaagctcctggaggaggaggagaagagggtgcagaaggagcgggaggacgaggagctgaacaaccccatgaaggtgctggagaaccggaccaaggactccaagctggagatggaggtgctggagaacctccaggagctgaaagacctgaaccagcggcaggcgcacgtggacttcgaggctatgctgaggcagcaccgcctgtcggaggaggaacggcggaggcagcancaggaggaggacgagcaggagaccgcggncctgttggangaagccagaaagcgaaactgctggaggacttccgactcaga

SEQ ID NO: 2196 - DNA, 845 bp, Homo sapiens
  misc_feature (765)..(765): "n" may be a, t, c, g, other or unknown
  misc_feature (792)..(792): "n" may be a, t, c, g, other or unknown
  misc_feature (830)..(830): "n" may be a, t, c, g, other or unknown
taatgaaaactttacatgaatgcttatttaggttgttcaaagtaaaaagggctacaggtcacagatcgtcagtgcctgagaaagaacattgacttactctatatcaattgaggggaaagtgcagtaccgtcatcttcaagccttgtaagcataaaagagaataggctgcccatataagtcaaaggaaaatgagcccaggccttgctatgaagcagtgtgtgaatggacaatgttgaatgaatgtctggctcagtgatggagagccaggttcatctttgaaatctagggctcttcactcatgaagcagactcctattagaatgttactaggggcagaagcagtgggattggtaaaagagtgcaatgataacaccatgagagccttcacatacagaaccagacagaacttcaaaggttttgatgataacaatgatgatttcctgacaatggcagaatgtcaattcattatcaaacatgaacttgaaaatcttagagctaaagatgaaaaaatgatccctggttaccctcaggcaaagttgtatccaggaaaatcattgttgagaagattgctcacgtctggcatcgtgattcaggtgtttccactgcatgacagtgaagccctgaagaagcttgaggacacctggtacactcggtttgctttgaagtatcagcccatagacagtattcgtggctactttggggaaacaatgctctgtctttggattttttggagtatttcacttttgcattaatccccatggcttgncattgggttaccttactacttggttgngtggggaagactatgaccagtacctgatctttggcctngtcaaccctcattgg

SEQ ID NO: 2197 - DNA, 913 bp, Homo sapiens
  misc_feature (776)..(776): "n" may be a, t, c, g, other or unknown
  misc_feature (860)..(860): "n" may be a, t, c, g, other or unknown
  misc_feature (870)..(870): "n" may be a, t, c, g, other or unknown
  misc_feature (901)..(901): "n" may be a, t, c, g, other or unknown
ctgtcacgcttgttacttattgccaaaactgggaagttgaaggaagcccaagcatgtgttgaagctaacagagaccccatagtaaaaatcctgggctctgattataatacaatgaaagaaaactcaattgcattaaatattcttggcaaaattaccagagatgatgatcctgaaagtgaaattaagatgaagattgctatgctgcttaagcaattggatctgcacctcctcaatcattctctaaaacatatttcattagaaataagtttaagtcccatgacggtgaagaaggatatagaactgctcaaacgtttctcaggaaaaggaaaccaaacagtcttggaatctattgaatatacctcagattatgaattttcaaatggatgtcgagccccaccgtggagacaaattcgtggggaaatttgttatgtgctggtgaaacctcacgatggtgagactctgtgcattacttgcagtgcaggaggagtatttttaaatggtggcaaaacagatgatgaaggggacgttaattatgagagaaaaggttcaatttataaaaaccttgtcacatttttaagagaaaaatcaccaaaattttcagaaaatatgtctaaattgggaattagcttcagtgaagaccagcaaaaggaaaaggatcagcttggcaaagcccccaagaaggaagaagcagctgccctccgcaaagacatttctggttcagacaaaaggtcactggagaggaaccaaattaattttttggaggaatcaaatgaccnaagagatggggaacccaaccttaaactgggaagaccactggttaattaccaaaggccaaagctcagcaaaagaaatccaagganggccaacccnccgggaaaaacttggaaaaacccaggaaccntctggtttcaac

SEQ ID NO: 2198 - DNA, 146 bp, Homo sapiens
  misc_feature (125)..(125): "n" may be a, t, c, g, other or unknown
  misc_feature (129)..(129): "n" may be a, t, c, g, other or unknown
  misc_feature (143)..(143): "n" may be a, t, c, g, other or unknown
atcatgccgctgggactggggcggcggaaaaaggcgccccctctagtggaaaatgaggaggctgagccaggccgtggagggctgggcgtgggggagccagggcctctgggcggaggtgggtcggntgtncaaagaccgcttcncgg

SEQ ID NO: 2199 - DNA, 808 bp, Homo sapiens
  misc_feature (734)..(734): "n" may be a, t, c, g, other or unknown
  misc_feature (785)..(785): "n" may be a, t, c, g, other or unknown
  misc_feature (788)..(788): "n" may be a, t, c, g, other or unknown
acttccggaatctctcggcgtgtgagcttggttgtcctaccaaagccagcgtttcggctcgcgtgcgccggcctagtttgctcgcgccctcacgcgctttgggtttcccggtctcatggccggcctgaccttatttgtgggccgcctcccgccctcggcccgcagtgagcagctggaggaactgttcagtcaggtggggccggtgaagcagtgcttcgtggtgactgaaaaagggagtaaggcatgtcgaggctttggctatgtcactttttcaatgctggaagatgttcagagggccctcaaggagattaccacctttgaaggttgcaagatcaacgtgactgttgccaagaaaaaactgaggaacaagacaaaggaaaaggggaaaaatgaaaactcagagtgcccaaagaaggagccgaaggctaaaaaagccaaagtggcagataagaaagccagattaattattcggaacctgagctttaagtgttcagaagatgacttgaagacagtatttgctcaatttggagctgtcctggaagtaaatatccctaggaaaccagatgggaagatgcgcggttttggttttgttcagttcaaaaacctcctagaagcaggtaaagctctcaaaggcatgaacatgaaagagataaaaggccggacagtggctgtggattgggcccgtggcaaaggataaatataaagatacacagtctgtttctgctataggtgangaaaagagccatgaatctaaacatcaggaatcaagttaaaaagaagggcanaanaggaagaaggatttggaaga

SEQ ID NO: 2200 - DNA, 827 bp, Homo sapiens
  misc_feature (784)..(784): "n" may be a, t, c, g, other or unknown
  misc_feature (813)..(813): "n" may be a, t, c, g, other or unknown
  misc_feature (819)..(819): "n" may be a, t, c, g, other or unknown
tgcaacactgtggtgctgccccagtggcactccttctccaggacccacaacgtctgtgaactctgtgtcaaccagacctccgggggcatgaagccgagctcggtcagcgtgccacagtgcagcttttttgaaatggcagcagctctggattctttctacctcaaggagcagaccttttatcatgtggcatcagacagcatagaatgcagcaattttttaacttcctatagccccttcagctactacactgcatgttgcaggaccataagcaggggtgtgtcaggcttcatcgactctgaacaaggtgtctttgaagcccctactgttgcattttcttcccttgagaagaaatgtgaggttgatgccccaagctccgttcctcacattgaggagaacaggtatctctttccagaagtggacatgactagcacaaacttcacaggcctgagctgcagaaccaacaagactctcaacatctaccttttggattcaaatttgttttggttatatgcagagagactgggtgctccgagctccactcaggtgaaagaatttgcggcaattgttgacgtgaaagaagaatctcattacatcttggatccaaagcaagcactgatgaagctcaccctagagtcttttattcaaaacttcagcgttctctatagtcccttgaaaaggcatctcattggaagtggctctgcccagttccccgtctcacatttaatcactgaagtgacaactgataccttttgggaagtagtccttcaaaaacagggacgttctnctgctctattacgcttccgtggtgccggnttctgnccatccct

SEQ ID NO: 2201 - DNA, 801 bp, Homo sapiens
  misc_feature (731)..(731): "n" may be a, t, c, g, other or unknown
  misc_feature (783)..(783): "n" may be a, t, c, g, other or unknown
  misc_feature (789)..(789): "n" may be a, t, c, g, other or unknown
aagattgcatgggaactggatcagactgtacttggaggaaaagcattcagaagtcctattcaacctgggctccaaggttctcaggcagtacctggatgctctgaagacgctgagcttgtccctgagtgcacaagtggcccagtacgacatctattcgatgatggtggggactgtcgtggttttggaggttctcaccctgctcctgctcagcgtcccacaggcactgcgcagaaaggctgagctggaagtcccactgtcatctcctgggttttctctgctcttttatttggtgatcctggttctttcggccgttcacgtcattgtgtgcacctcagctgaaagttcgtgctacttctgtggcctctcgtggctggcggcaggtggggtgatggtgctggcctcggcgctgctgtgtgtgattgtgtctgttctgaccaacgtgctcgtgggtggaaacaccccaaggaagaaccccatgcatcccagctcaaggtggtcagagctagaccttcttattctgttggggacggcgggccacgtcttgagcctgggcgccagcagcttcgtggaggaggagcaccagacctggtacttccttgtgaacaccctgtgtctagctctgagccaagaaacctacagaaactactttctgggagatgacggtgagccttccgtgtggcctctgtgtggaacaagggcatgacggggccacagcaaccgtggcaaggacnggcctggcttgtgatatcctggaacgaggacaaaaggccacggaagcccctntacctncgaatgcttaaa

SEQ ID NO: 2202 - DNA, 852 bp, Homo sapiens
  misc_feature (808)..(808): "n" may be a, t, c, g, other or unknown
  misc_feature (831)..(831): "n" may be a, t, c, g, other or unknown
  misc_feature (839)..(839): "n" may be a, t, c, g, other or unknown
atgaccttctacagtgaggtgaaacaaatagagaagagaaggttgaaaagagaagtaacagtgacagcaaagaaaaccgggaaacaaaattaaatggtcctggtgaaaacgtcagtgaggatgaggctcagtcaagtaatcaacgtaagagagctaataagcacaagtgggtaccactccacttagatgttgtaagatcagagagtcaagaaagacctggatcccggaacagctcaagatgtcaacctgaagcaaataaaccaacacataacaataggagaaatgatacacgaagttggaagcgagatagagaaaaaagagatgatcaagatgacgtttccagtgtgagaagtgagggtggtaatatccgaggttcctttagaggtcgaggaagaggccgaggacggggaagaggacgaggcagaggaaatcctcgatcgaactttgattattcatatggttatcaagaacatggtgaaaggactgatcaaccatttcaaacagaacttaataccagtatgatgtattactatgatgatggtacaggtgtacaggtgtatcctgtggaagaagcgttgcttaaagagtatattaagcgtcaaattgaatattacttcagtgtagaaaatttggaacgagacttctttcttcggggaaagatggatgaacaaggtttcttgcctatttccctgattgctggtttcagcgtgttcaggctctcactacaaaccttaatctcatcttaaagcacttgaaggatacacagaatagaaattgtggatgagaaattgagaaaagagattgaccngaaaaatgggccaatttccaggnccttcttncacgcaatgtgcc

SEQ ID NO: 2203 - DNA, 890 bp, Homo sapiens
caggggagctcagtctgctatcgtacattaggcctgacgttaaagggctttcaacgcttcaggatattgaaataggagtgcagcatattttagcagatatgattgctaaagacaaagacacgcttgacttcattcggaacttgtgccagaagagacatgtttgtatccagtcatctctggcaaaagtatcctcaaaaaaggtaaatgagaaagatgttgataagtttctgctctaccagcatttttcctgcaacataagaaacattcaccatcatcagattctggcaattaaccgtggagaaaatttgaaggtactgacggttaaggtcaatatttctgatggagtgaaggatgaattctgtaggtggtgcatccaaaacaggtggagaccacgtagctttgcaaggccagagttaatgaagatcttatataattcactgaatgattcctttaaacgccttatttatcctcttctctgtagagaattcagagccaaactaacatcagatgcagagaaggaatcagtaatgatgtttggacggaaccttcgtcagctccttttaacaagccctgttccagggcgcaccttaatgggagtggatcctggttataaacatggttgcaaattagctataatttctcctactagtcagatacttcatactgatgtggtttacttgcattgtggacaaggcttccgagaggcggagaaaataaagaccttttgctgaattcaactgcagcacagtagtgattggaagtggaactgcctgcagggaaacagaacttactttgctgacctgataatgaagaattattttgcaccctggatgtggttactggatcgtcagtgaagcaggacctcaatctaagtgtcagccctgaactaa

SEQ ID NO: 2204 - DNA, 827 bp, Homo sapiens
  misc_feature (762)..(762): "n" may be a, t, c, g, other or unknown
  misc_feature (810)..(810): "n" may be a, t, c, g, other or unknown
  misc_feature (823)..(823): "n" may be a, t, c, g, other or unknown
aaaaaaaaaggtaacttcagtgcgtttatgcagaaggagatcttcgaacagccagaatcagttttcaatactatgagaggtcgggtgaattttgaaaccaacacagtgctcctgggtggcttgaaggaccacttgaaggagattcgacgatgccgacggctcatcgtgattggctgtggaaccagctaccacgctgccgtggctacgcggcaagttttggaggaactgactgagcttcctgtgatggttgaacttgctagtgattttctggacaggaacacacctgtgttcagggatgacgtttgctttttcatcagccagtcaggcgagaccgcggacaccctcctggcgctgcgctactgtaaggaccgcggcgctctcaccgtgggcgtcaccaacaccgtgggcagctccatctctcgcgagaccgactgcggcgtccacatcaacgcagggccggagatcggcgtggccagcaccaaggcttataccagtcagttcatctctctggtgatgtttggtttgatgatgtctgaagaccgaatttcactacaaaacaggaggcaagagatcatccgtggcttgagatctttacctgagctgatcaaggaagtgctgtctctggaggagaagatccacgacttggccctggagctctacacgcagagatcgctgctggtgatggggcgggctacaactatgccacctgcctggaaggagccctgaaaattaaagagatacctacatgcctcagaaggcatnctgctggggaactgaagcacgggcccctggcacttgattgacaagcanatgccccgtcatnatgg

SEQ ID NO: 2205 - DNA, 787 bp, Homo sapiens
  misc_feature (671)..(671): "n" may be a, t, c, g, other or unknown
  misc_feature (774)..(774): "n" may be a, t, c, g, other or unknown
  misc_feature (777)..(777): "n" may be a, t, c, g, other or unknown
  misc_feature (779)..(779): "n" may be a, t, c, g, other or unknown
atggcagtggagtcattcatggcaacagccccctttgtccaaattggcaggtttttcctctcgtcaggcctcatcgacaaagtcgacaacttcaagtccctgagcctatccaagctggaggaccctcatgtggacatcattcgccgtggagactttttctaccacagcgaaaatcccaagtatccagaggtgggagacttgcgtgtctccttttcctatgctggactgagcggcgatgaccctgacctgggcccagctcacgtggtcactgtgattgcccggcagcggggtgaccagctagtcccattctccaccaagtctggggataccttactgctcctgcaccacggggacttctcagcagaggaggtgtttcatagagaactaaggagcaactccatgaagacctggggcctgcgggcagctggctggatggccatgttcatgggcctcaaccttatgacacggatcctctacaccttggtggactggtttcctgttttccgagacctggtcaacattggcctgaaagcctttgccttctgtgtggccacctcgctgaccctgctgaccgtggcggctggctggctcttctaccgacccctgtgggccctcctcattgccggcctggcccttgtgcccatccttgttgctcgggacacgggtgccanccaaaaaagttggagtgaaaagaccctggcaccccgcccgacacctgcgttgaacccctaggatccaggtcctttttaacctctgacccagcttcaatgccanagnanggagcccc

SEQ ID NO: 2206 - DNA, 876 bp, Homo sapiens
  misc_feature (839)..(839): "n" may be a, t, c, g, other or unknown
  misc_feature (858)..(858): "n" may be a, t, c, g, other or unknown
  misc_feature (874)..(874): "n" may be a, t, c, g, other or unknown
agatgcatgttgcagtgtccatcagtagaagtcagcttcttacctctcatagtgaatacagttgctctgcctgatgaattgagctacatatgtacacatggggaagactgggatgtagcttacattattcatctttatccttctctcactttgcggaatcttctcccatattccctaagatatttacttgagggaacagcagaaactcatgagctggcagaaggcagtactgctgatgttctgcattcgagaatcagtggtgaaataatggaattagtcctggtgaaataccagggcaaaaactggaatggacatttccgcatacgtgatacactaccagaattctttcctgtgtgtttttcttctgactccacagaagtgacgacagtcgacctgtcagtccacgtcaggagaattggcagccggatggtgctgtctgtctttagtccctattggttaatcaacaagactacccgggttctccagtatcgttcagaagatattcatgtgaaacatccagctgatttcagggatattattttattttctttcaagaagaagaacatttttactaaaaataaggtacaattaaaaatttcaaccagtgcctggtccagtagtttctcattggatacagtgggaagttatgggtgtgtgaagtgtcctgccaacaatatggagtacctggttggtgttagcatcaaaatgagcagtttcaacctttcacgaatagttaccctgacttcccttttgtaccattggcaaacaagtcatcattaggaactagaaagtttggccaagattggcattctggaatgggcttcaatggccaacttaantaaaatgggaacctattantgggctttcttttcanaa

SEQ ID NO: 2207 - DNA, 762 bp, Homo sapiens
  misc_feature (684)..(684): "n" may be a, t, c, g, other or unknown
  misc_feature (688)..(688): "n" may be a, t, c, g, other or unknown
  misc_feature (762)..(762): "n" may be a, t, c, g, other or unknown
actcattgttcgcagctgatgtcactcgcagttgtgagcggccgcctctcccggggacaatgtgggactgagcggcccagccgccgtgccgccgccgccgccgccgcaggacagccccagcgaggccatttccagcacatagaagagagattggaaaccaacgtgcagaactgccagtcccctgacacgctgtgccccacccactgcagcccagtgctgaatgaaccctgcccagaggtgtctgtagtgagcttctgccctagtgacttttggtaggtgggagtgtgcctcaattcccccctcaacccctgcctcaagcctttaccaggcagtggcaagacctgaccacacccgaggcctccctgccttcaaggcttcccatggctgctccagcttcctccccagctgctcttctgtgctccatccaccatctggctgctggacgaaagtgcctctcatatggaagccggccaggttgcagcgcggacacactcgcaggtcgctgtggccccagcctcgcctgacagaatgagcggctcggacgggggactggaggaggagccagagctcagcatcaccctcacgctgcggatgctgatgcacgggaaggaagtgggcagcatcatcgggaagaagggcgagactgtaaagcgaatccgggagcagtgcccggatcaccatctncganggctcctgcctgaacgcatcaccaccatcaccgggtctacagcaactgtctttcatgcagtcttccatgattgn

SEQ ID NO: 2208 - DNA, 772 bp, Homo sapiens
  misc_feature (739)..(739): "n" may be a, t, c, g, other or unknown
  misc_feature (754)..(754): "n" may be a, t, c, g, other or unknown
  misc_feature (772)..(772): "n" may be a, t, c, g, other or unknown
gaagaagaagaacttctaggtcctaaactagaagaggaagaagaagaggaagtagttgaaaatgatgaggagatagccttttcaggcaaggacaagccagcttcagagaatagtgaggagaagctgatcagtaagtttgacaagcttccagtaaagatcgtacagaagaatgatccatttgtggtggactgctcagataagcttgggcgtgtgcaggagtttgacagtggcctgctgcactggcggattggtgggggggacaccactgagcatatccagacccacttcgagagcaagacagagctgctgccttcccggcctcacgcaccctgcccaccagcccctcggaagcatgtgacaacagcagagggtacaccagggacaacagaccaggaggggcccccacctgatggacctccagaaaaacggatcacagccactatggatgacatgttgtctactcggtctagcaccttgaccgaggatggagctaagagttcagaggccatcaaggagagcagcaagtttccatttggcattagcccagcacagagccaccggaacatcaagatcctagaggacgaaccccacagtaaggatgagaccccactgtgtacccttctggactggcaggattctcttgccaagcgctgcgtctgtgtgtccaataccattcgaagcctgtcatttgtgccaggcaatgacttttgagatgtccaaaccccccagggcttggtgnttattctggggcaancttgatcctggttgaccn

SEQ ID NO: 2209 - DNA, 866 bp, Homo sapiens
  misc_feature (823)..(823): "n" may be a, t, c, g, other or unknown
  misc_feature (852)..(852): "n" may be a, t, c, g, other or unknown
  misc_feature (862)..(862): "n" may be a, t, c, g, other or unknown
cacgtccaaggaaccgatcttcctgacccaattgctacatttcagcaacttgaccaggaatataaaatcaattctcgactacttcagaacattctagatgcaggtttccaaatgcctacgccaatccaaatgcaagccatcccagttatgctgcatggtcgggaacttctggcttctgctccaactggatctggaaaaacattagcttttagcattcctattttaatgcagctgaaacaacccgcaaataaaggcttcagagccctgattatatcaccaacacgagaacttgccagccagattcacagagagttaataaaaatttctgagggaacaggattcagaatacacatgatccacaaagcagcagtggcagccaagaaatttggacctaaatcatctaaaaagtttgatattcttgtgactactccaaatcgactaatctatttattaaagcaagatccccccggaatcgacctagcaagtgttgagtggcttgtagtagacgaatcagataaactgtttgaagatggcaaaactgggttcagagaccagctggcttccattttcctggcctgcacatcccacaaggtccgaagagctatgttcagtgcaacttttgcatatgatgttgaacagtggtgcaaactcaacctggacaatgtcatcagtgtgtccattggagcaaggaattctgcagtagaaactgtagaacaagagcttctctttgttggatctgagaccggaaaacttctggccgtgagagaacttgttaaaagggtttcaatccacctggtcttggttttggtcagtccattggaangggttaaagaactttttcatgagctcatntttgaagggnttaa

SEQ ID NO: 2210 - DNA, 684 bp, Homo sapiens
  misc_feature (647)..(647): "n" may be a, t, c, g, other or unknown
  misc_feature (677)..(677): "n" may be a, t, c, g, other or unknown
  misc_feature (680)..(680): "n" may be a, t, c, g, other or unknown
ctccccgagctgaccaagctggacatcaccaataacccacggctgtccttcatccacccccgcgccttccaccacctgccccagatggagaccctcatgctcaacaacaacgctctcagtgccttgcaccagcagacggtggagtccctgcccaacctgcaggaggtaggtctccacggcaaccccatccgctgtgactgtgtcatccgctgggccaatgccacgggcacccgtgtccgcttcatcgagccgcaatccaccctgtgtgcggagcctccggacctccagcgcctcccggtccgtgaggtgcccttccgggagatgacggaccactgtttgcccctcatctccccacgaagcttccccccaagcctccaggtagccagtggagagagcatggtgctgcattgccgggcactggccgaacccgaacccgagatctactgggtcactccagctgggcttcgactgacacctgcccatgcaggcaggaggtaccgggtgtaccccgaggggaccctggagctgcggagggtgacagcagaagaggcagggctatacacctgtgtggcccagaacctggtgggggctgacactaagacggttagtgtggttgtgggccgtgctctctcagccaggcagggacnaaaggacaagggcttgaacttccggtgccnganacca

SEQ ID NO: 2211 - DNA, 648 bp, Homo sapiens
  misc_feature (589)..(589): "n" may be a, t, c, g, other or unknown
  misc_feature (599)..(599): "n" may be a, t, c, g, other or unknown
  misc_feature (610)..(610): "n" may be a, t, c, g, other or unknown
agtgctttcaaaagaattggcgtccgctgttcgcctctcctcccgggagtcttctgcctactcccagaagaggagggaagcacaggtgggtttctttagctctgcgtcggatccctgagaacttcgaagccatcctggctgaggctaatctccgctgtgcttcctctgcagtatgaagactttggagactcaaccgttagctccggactgctgtccttcagaccaggacccagttccagcccatccttctccccacgcttccccgatgaataaaaatgcggactctgaactgatgccaccgcctcccgaaaggggggatccgccccggttgtccccagatcctgtggctggctcagctgtgtcccaggagctacgggagggggacccagtttctctctccactcccctggaaacagagtttggttcccctagtgagttgagtcctcgaatcgaggagcaagaactttctgaaaatacaagccttcctgcagaagaagcaaacgggagcctttctgaagaagaagcgaacgggccagagttggggtctggaaaagccatggaagatacctctggggaacccgctgcagangacgaggganacaccgcttgnaactacagcttctcccagctgcctcgatttctcagtgg

SEQ ID NO: 2212 - DNA, 836 bp, Homo sapiens
  misc_feature (749)..(749): "n" may be a, t, c, g, other or unknown
  misc_feature (811)..(811): "n" may be a, t, c, g, other or unknown
  misc_feature (833)..(833): "n" may be a, t, c, g, other or unknown
ctttattacggggccaacgcagtcaccgccgtccgcagtcacagtccagccactgaccgcagcagcgcccttgcgtagcagccgcttgcagcgagaacactgaattgccaacgagcaggagagtctcaaggcgcaagaggaggccagggctcgacccacagagcaccctcagccatcgcgagtttccgggcgccaaagccaggagaagccgcccatcccgcagggccggtctgccagcgagacgagagttggcgagggcggaggagtgccgggaatcccgccacaccggctatagccaggcccccagcgcgggccttggagagcgcgtgaaggcgggcatccccttgacccggccgaccatccccgtgcccctgcgtccctgcgctccaacgtccgcgcggccaccatgatgcaaatctgcgacacctacaaccagaagcactcgctctttaacgccatgaatcgcttcattggcgccgtgaacaacatggaccagacggtgatggtgcccagcttgctgcgcgacgtgcccctggctgaccccgggttagacaacgatgttggcgtggaggtaggcggcagtggcggctgcctggaggagcgcacgcccccagtccccgactcgggaagcgccaatggcagctttttcgcgccctctcgggacatgtacagccactacgtgcttctcaagtccatccgcaacgacatcgagtggggggtcctgcaccagcgctcaccggctggagcangaggcagtgctgaatcaaggcatctgtgactggcattgaggtgcgcgcgcaaaaactgacanagtcatcactggcgctgaatgnttc

SEQ ID NO: 2213 - DNA, 835 bp, Homo sapiens
  misc_feature (779)..(779): "n" may be a, t, c, g, other or unknown
  misc_feature (789)..(789): "n" may be a, t, c, g, other or unknown
  misc_feature (820)..(820): "n" may be a, t, c, g, other or unknown
gctaatgttttggccgcttcaagatggcggtgcaggagtcggcggctcagttgtccatgaccctgaaggtccaggagtacccgaccctcaaggtgccctacgagacgctgaacaaacgctttcgcgccgctcagaagaacattgaccgggagaccagccacgtcaccatggtggtggccgagctggagaagacgttgagcggctgccccgccgtggactccgtggtcagcctgctggacggcgtggtggagaagctcagcgtcctcaagaggaaggcggtggaatccatccaggccgaggacgagagcgccaagctgtgcaagcgccggatcgagcacctcaaagagcatagcagcgaccagcccgcggcggccagcgtgtggaagaggaagcgcatggatcgcatgatggtggagcacctgctgcgttgcggctactacaacacggctgtcaagctggcgcgccagagcggcatcgagagctgcctggagttcagcctcagaatccaggagttcattgaactcatccggcagaataagagactggacgctgtgagacatgcaagaaagcacttcagccaagcagaagggagccagctggacgaggtgcgccaggccatgggcatgctggccttcccgccgacacgcacatctcccgtacaaggaccttctggaccctgcacggtggcggatgctgatccagcagtttccggtacgacaacttaccgactacaccagcttgggaaacaatttctggggtttcaccctttacccttgcangcttggcctnttaagccctttaaggacaccaccagtgcttncaaagggaggaccgg

SEQ ID NO: 2214 - DNA, 852 bp, Homo sapiens
  misc_feature (702)..(702): "n" may be a, t, c, g, other or unknown
  misc_feature (733)..(733): "n" may be a, t, c, g, other or unknown
  misc_feature (772)..(772): "n" may be a, t, c, g, other or unknown
  misc_feature (811)..(811): "n" may be a, t, c, g, other or unknown
  misc_feature (846)..(846): "n" may be a, t, c, g, other or unknown
atttaccaagggacattggagctccccacaccactcattgctgcccaccagctatacaactacgtggctgatcacgccagctcttaccacatgaagccattgcgaatggcccggccagggggcccagaacacaacgagtatgccctggtgtcggcatggcacagttctggctcctacctggactctgagggacttcgacaccaggatgactttgatgtgtctctgcttgtctgtcactgtgctgcaccctttgaggagcaaggagaggctgagcggcacgttctgcggctacagttcttcgtggtgctcaccagccagcgagagctcttccccaggctcactgctgacatgcgccgcttccggaagccacccagactgccccctgagccagaggctcctgggagttcagctggcagccctggggaggcctcagggcttattctagcgcctggaccggctcctctgttcccaccactggctgcagaggtgggcatggcacgagcacggctggctcagctggtgcggctggctggagggcactgccgtcgggacaccctttggaagcgcctcttcttgctggagccaccggggcctgatcgactgcggctaggggggcgcctggccctggcagagctggaggaactcctagaagcaagtccatgccaaatccattggggacatcgaccccccagcttggactgnttcctatccatgacggtctcctggtaccagnagcctgatcaaaagttcttcttaagccggtttcccccanaacttgtcggccattttccaaaagccccaaactttgggnaacttaagttaccctgggttggggcttgaattcanaaagtt

SEQ ID NO: 2215 - DNA, 508 bp, Homo sapiens
  misc_feature (473)..(473): "n" may be a, t, c, g, other or unknown
  misc_feature (482)..(482): "n" may be a, t, c, g, other or unknown
  misc_feature (484)..(484): "n" may be a, t, c, g, other or unknown
agcagcggcgcagggcaccatgggaaacggacggaagctccattgagccaaataagttggccacgtggggcggaacggaaacctcgcagggtcagaccgtagcgacgcgggaagtccggacgcagtagctccctgaagcggaggcgaaggggagtttaagccccagcggcggcaatggcggagaggcccgaggacctaaacctgcccaatgccgtgatcaccaggatcatcaaggaggcgctcccggacggtgtcaacatctccaaggaggcccggagcgccatctcccgcgccgccagcgtcttcgtgctgtacgccacatcctgtgctaacaactttgcaatgaaaggaaagcggaagacgctgaatgccagtgatgtgctctcagccatggaagagatggagttccagcggttcgttaccccattgaaagaagctctggaagcatataggcgggagcagaaaggcaaganggaggcctnanagcaaaagaagaaggacaaagaca

SEQ ID NO: 2216 - DNA, 811 bp, Homo sapiens
  misc_feature (661)..(661): "n" may be a, t, c, g, other or unknown
  misc_feature (723)..(723): "n" may be a, t, c, g, other or unknown
  misc_feature (745)..(745): "n" may be a, t, c, g, other or unknown
  misc_feature (790)..(790): "n" may be a, t, c, g, other or unknown
tattgaagatgctcttgttttaaacaaggcctctttagacagaggctttgggcgttgccttgtatataaaaatgctaaatgtacgttgaaacgatacaccaatcagacttttgataaagtgatggggcccatgttggatgctgctacaaggaaacctatctggcgacatgaaatcttagatgcagatggtatttgttctccaggtgagaaagtagaaaacaaacaagtgcttgtaaataagtccatgcccacagtgactcagattcctttggaaggaagtaatgtaccacagcaaccacagtacaaagatgtacccataacctacaaaggagcaacagactcatatattgaaaaagtgatgatatcttcaaatgctgaagatgcttttctgatcaaaatgctgctgagacagacaaggcgtccagaaattggagacaaattcagcagtcgtcatgggcaaaaaggtgtttgtggcttgatcgtcccccaggaagacatgccattttgtgattctggcatctgtccggacatcatcatgaacccacacggctttccatcacgaatgacggtggggaagctcattgagctgctggctggcaaggccggtgtgctggacggcagattccactacggcactgcgtttggaggcagtaaagtgaangatgtgtgtgaggacctcgttcgccatgggtataactacttggggaaagactatgttacatncggcatcacaggtgacccttanaacatcatctattttggcccctgtctatcagaactgaacaatggngctagataaatgcatgcccgg

SEQ ID NO: 2217 - DNA, 873 bp, Homo sapiens
  misc_feature (829)..(829): "n" may be a, t, c, g, other or unknown
  misc_feature (868)..(868): "n" may be a, t, c, g, other or unknown
  misc_feature (870)..(870): "n" may be a, t, c, g, other or unknown
tggatttggtgattctacaaaaaaagacactgaggttgagaccttgaagcatgacactgctgcagtcgatcgttccgtcaagcgtcttttcaaagttcggagtgatcttgattttgctgagcaactgtggtgcaaaatgagcagtagtgtgatttcataccaagacttggtgaagtgtttcacattgatcatccagagtctacaacgtggtgatatacagccatggctccatagtggaagtaacagtttactaagtaagctcattcatcagtcttatcatggaaccatggacacagtttctctcagtgggactattccagttcaaatgcttttggaaattggtttggacaaactaaagaaagattatatcagttttttcataggtcaggaacttgcatctttgaatcatttggaatacttcattgctccatcagtagatatacaagaacaggtttatcgtgtccaaaaactccaccatattctagaaatattagtcagttgcatgcctttcattaaatctcaacatgaactcctcttttctttaacacagatctgcataaagtattacaaacaaaatcctcttgatgagcaacacatttttcagctgccagtcagaccaactgctgtaaagaacttatatcaaagtgagaagccacagaaatgggagagtggaaatatatagtggtcaaaagaagattaagacagtttggcaactgagtgacagctcacccatagaccatctgaattttcacaaacctgatttttcggaattaacacttaacggtagcctggaagaaaggatattctttactaacatgggtacctgcancaagtgcatttcaaggtgaatgtgcctgatgaagtcctntntaa

SEQ ID NO: 2218 - DNA, 746 bp, Homo sapiens
  misc_feature (649)..(649): "n" may be a, t, c, g, other or unknown
  misc_feature (694)..(694): "n" may be a, t, c, g, other or unknown
  misc_feature (697)..(697): "n" may be a, t, c, g, other or unknown
gtgcggagcggcgcggcacagagcctgttgttgagctcagtatgtcgtgggaatccggggccgggccaggtctaggttcccaggggatggatctcgtgtggagtgcgtggtacggaaagtgcgttaaagggaaagggtcgttgccactctcggcccacggcatcgtggtcgcctggctcagcagggccgagtgggaccaggtgacggtttatctgttctgtgacgaccataagttgcagcggtacgcgcttaaccgcatcacggtgtggaggagcaggtcaggcaacgaactccctctggcagtggcttctactgctgacctgatacgctgtaagctcttggatgtaactggtggcttgggcactgatgaacttagactgctctatggcatggcattggtcaggtttgtgaatcttatctcagagaggaagacaaagtttgccaaggtccccctcaagtgtctggctcaagaggtaaatattccggattggattgttgaccttcgccatgagttgacccacaagaaaatgccccatataaatgactgccgcagaggctgctactttgtcctggattggctccagaagacctattggtgccgccaactggagaacagcctgagagagacctgggagttggaggagttcanggaagggatagaggaagaggatcaagaggaagataagaacattgntgntgatgacatcacagaacagaaaccagagccttaggatgatgggaaaagt

SEQ ID NO: 2219 - DNA, 768 bp, Homo sapiens
  misc_feature (722)..(722): "n" may be a, t, c, g, other or unknown
  misc_feature (734)..(734): "n" may be a, t, c, g, other or unknown
  misc_feature (759)..(759): "n" may be a, t, c, g, other or unknown
agtttcggaaccccagccagctcacctctgcgccgctgaacccgatccgagcctccggcaaaggtttttccctcctcccccggccgagggcttctgccgcccgggcacccccgccccgcggcgccccacattcccccagcccggggcccttggcgcgtgcgctccgtgcggctgtgctccgcgggactttgtttgtttcctcctcgtccctctttgttgggctgaacaccagcctcgtcaaagccccccactccggagggagttcggcttctccagcagggcggctgcagcgcgctgccccgaccccgcctgcggcccctcacgccgctagtgctcccaccccgccctcctggcaccccgcctgcgtccgttcgcccgaggaagccaaccgcgacttcattgatgcacccattccagtggtgtaacgggtgtttctgtggcctgggactggttagcaccaacaagtcctgctcgatgccacccatcagtttccaagaccttccgctcaacatctatatggtcatctttggcacaggcatctttgtcttcatgctcagccttatcttctgctgctattttatcaagcaaactgcggaaccaggcacagagtgatcgatacggatataaggaggtggtgcttaaaggtgatgccaagaagttacaattatatgggcagacctgcgcaatctgtctggaagacttcaaggggaaggatgaattangcgtgcttccgngccaacacgccttttaaccgcaagngtcttggtg

SEQ ID NO: 2220 - DNA, 754 bp, Homo sapiens
  misc_feature (600)..(600): "n" may be a, t, c, g, other or unknown
  misc_feature (669)..(669): "n" may be a, t, c, g, other or unknown
  misc_feature (674)..(674): "n" may be a, t, c, g, other or unknown
  misc_feature (710)..(710): "n" may be a, t, c, g, other or unknown
tgctggccagtacttgttctcccttgccccaaccctttaccggatatcttgacaaactctccaattttctaaaatgatatggagctctgaaaggcatgtccataaggtctgacaacagcttgccaaatttggttagtccttggatcagagcctgttgtgggaggtagggaggaaatatgtaaagaaaaacaggaagatacctgcactaatcattcagacttcattgagctctgcaaactttgcctgtttgctattggctaccttgatttgaaatgctttgtgaaaaaaggcacttttaacatcatagccacagaaatcaagtgccagtctatctggaatccatgttgtattgcagataatgttctcatttatttttgatgtagaatttacattgccatgggtgttaaataagctttgagtcaaaagtcaagaaagtgactgaatatacagtcaccttttatgaaatgagtctctgtgttactgggtggcatgactgattgaggtgaagctcacggggccaggctgaccgtcttgaccgttccacttgagataggttggtcatcgtgcagaaggccccaggacctcagcacacacagcctnctcttggtctgagtaggcatcatgtgggggccagatctgcctgctggttccatgggttacatttactgngctgnatctcagatgttggtgtctggaagtttattcttaanagactgtacccaactgggctggattaatgggaagttgcagttcg

SEQ ID NO: 2221 - DNA, 854 bp, Homo sapiens
  misc_feature (700)..(700): "n" may be a, t, c, g, other or unknown
  misc_feature (778)..(778): "n" may be a, t, c, g, other or unknown
  misc_feature (809)..(809): "n" may be a, t, c, g, other or unknown
  misc_feature (840)..(840): "n" may be a, t, c, g, other or unknown
cagactggagcacatgctgatttaaatccattttaccaaaagtacagcagccgcactcagcatgctattctatacatgaatcctcataaaatcaacctggatctcattttggaacttcttgcatacttagataaaagtccccaattcagaaatattgaaggagcagtattgatctttttaccaggacttgctcatattcagcagttgtatgatcttctatcaaatgatagaagattttattctgaacgatataaagtgatagctctgcattctattctttcaacccaagatcaagctgcagcattcacacttccccctccaggagtcaggaagattgttttagcaaccaatattgcagagacgggtatcactattcctgatgttgtatttgtaattgatactggaagaacaaaagaaaataagtaccatgaaagcagtcagatgagttctttggtggagacgtttgtcagtaaagccagtgctttgcagcgccagggaagagctgggcgggtcagagatggcttctgtttccgaatgtacacaagagaaagtattactttatttttcagatttgaaggctttatggattattctgttcctgaaatcttacgtgtacctttggaggaattatgccttcatattatgaaatgtaatcttggttctcctgaagatttcctctccaaagccttagatcctcctnagctccaagtgatcagcaatgcaatgaatttgctccgaaaaattggagcttgtgaattaaatgagcctaaactgactncgttgggccaacaccttgcagctttacctgngaatgtcaagaatggcagagcttattttggngccatattggctgc

SEQ ID NO: 2222 - DNA, 796 bp, Homo sapiens
  misc_feature (760)..(760): "n" may be a, t, c, g, other or unknown
  misc_feature (769)..(769): "n" may be a, t, c, g, other or unknown
  misc_feature (786)..(786): "n" may be a, t, c, g, other or unknown
actgtttcttgtcaagaaaaggatcttttggcactggaacaagatgctgtctttggcctggaatccctactggtactttgtagtcaagatgatagtccaggtgctcaggccactttaaagattgctctaaactgtatggtgaagttggccaagggcaggccccatcttagccagtcagtagttgagaccttgttgactcaattgcacagtgctcaagacgctgcccggattttgatgtgccattgcctggcagccattgccatgcaactgccggtgctgggtgatgggatgcttggtgacctcatggagctgtacaaggtgattggacgatcagccacagacaagcaacaagaacttctggtgagtttggctactgtgatttttgttgcaagtcagaaggcattgtctgtggaaagtaaggcagtaattaagcagcagcttgaaagtgtctccaatggatggactgtataccgtattgccagacaggcttccagaatgggtaatcatgacatggccaaagagctttatcagagtttgctgactcaggttgcctcagaacatttctacttctggctaaatagtttgaaggagttttcacatgcagaacagtgtctcactgggttgcaagaggaaaattatagttcagcactttcttgcattgctgaatctttaaaattctatcacaaagggattgcttcttaacagcagctagtacaccactgaatcctttaagctttcagtgtgaatttgtaaaactcangattgaccntttacaagccttctctnaacttatctg

SEQ ID NO: 2223 - DNA, 702 bp, Homo sapiens
  misc_feature (674)..(674): "n" may be a, t, c, g, other or unknown
  misc_feature (687)..(687): "n" may be a, t, c, g, other or unknown
  misc_feature (689)..(689): "n" may be a, t, c, g, other or unknown
tttatgaagagctcgactctgactccgaggacctagaccccaatcctgaagatctggacccggtttctgaagacccagagcctgatcctgaagacctcaacactgtcccggaagacgtggaccccagctatgaagatctggagcccgtctcggaggatctggaccccgacgccgaagctccgggctcggaaccccaagatcccgaccccatgtcttcgagtttcgacctcgatccagatgtgattggccccgtacccctgattctcgatcctaacagcgacaccctcagccccggcgatccaaaagtggaccccatctcctctggcctcactgccaccccccaggtcttggccaccagccccgcggtgctccccgcccccgccagcccgccccggcccttctcctgcccggattgcgggcgagccttccgccgcagctccgggctgagccagcatcgccgcacgcacagcggcgagaagccgtaccgctgccccgactgcgggaagtccttcagccacggtgccaccctggctcagcaccgtggcatccacactggggcgcggccgtaccagtgcgcggctgcggcaaggccttcggctggcgctccacgctgctgaaacatcgcagcagccacagcggggagaagccgaccactgcccggtgtgtggcaaggncttcgggcacggntngttctggcacaag

SEQ ID NO: 2224 - DNA, 871 bp, Homo sapiens
  misc_feature (680)..(680): "n" may be a, t, c, g, other or unknown
  misc_feature (787)..(787): "n" may be a, t, c, g, other or unknown
  misc_feature (842)..(842): "n" may be a, t, c, g, other or unknown
  misc_feature (866)..(866): "n" may be a, t, c, g, other or unknown
tgtgttacatccatattgctgctctcattgcagagtatctgaaaagaaagggttactggaaagtggaaaagatttgcacagcatccctgctctcggaggatacccacccctgtgatagcaactcattactaacaactcccagtggaggaagcatgttctctatgggatggccagcttttttgagcattacaccaaacattaaggaagaaggagcgatgaaagaggattctggaatgcaagatacaccatacaatgagaatatcctggtggagcagctatacatgtgtgtggagtttctctggaagtctgagcgatatgaactcattgctgatgtcgacaagcccatcattgctgtctttgagaaacaacgagacttcaaaaaattgtcagatctctactacgacattcatcggtcatatctgaaagtggcagaggtggtgaattcggagaagcggctgtttggtcgctactatcgtgtggcattttatgggcagggcttttttgaagaagaagaaggtaaagagtatatttataaagagcctaagctgacaggtctgtccgagatttcccaaagattactcaagctctatgcagataaatttggagcagacaatgtgaagataatccaggattccaacaaggtaaaccccaaggatttggaccccaaatatgcctacatncaggtgacctatgtgacgccgtctttgaggaaaaggaaatcgaagaccggaagacagatttcgaaatgcaccacaacatcaaccggtttggcttcgagacacccttnacgcttgtcgggccaagaagccccggtgggggtggccggaacaatgcaagccggnggaccaatcctgacaacgagtcanctgtt

SEQ ID NO: 2225 - DNA, 706 bp, Homo sapiens
  misc_feature (667)..(667): "n" may be a, t, c, g, other or unknown
  misc_feature (693)..(693): "n" may be a, t, c, g, other or unknown
  misc_feature (697)..(697): "n" may be a, t, c, g, other or unknown
aatctgtttgaggatgtaggcactggtgtgaaggaacatggccctgtatcagaggtggcggtgtctccggctccaaggtttacaggcttgcaggctacacacggcagttgtgtcgacccctccacgctggttggcagagcggcttggcctttttgaggagctgtgggctgctcaggtaaagagattagcaagcatggcacagaaggaaccccggactattaagatatcacttcctggaggccagaaaattgatgctgtggcatggaacacaaccccctaccaactagcccggcagatcagttcaacactggcagatactgcagtggctgctcaagtgaatggagaaccttatgatctggagcggcccttggagacagattctgacctcagatttctgacattcgattccccagaggggaaagcagtgttctggcactccagcacccatgtcctgggggcagcagctgaacaattcctaggtgctgttctctgcagaggtccaagtacagaatatggcttttaccatgatttcttcctgggaaaggagaggacaatccggggctcaaagctgcctgttttggagcggatttgccaggaacttacagctgctgctcgacccttccggaggctagaggcttcacgggatcagcttcgccagttgttcaangctgagtatgcccatcgtgggttctncgangtgaaaact

SEQ ID NO: 2226 - DNA, 806 bp, Homo sapiens
  misc_feature (652)..(652): "n" may be a, t, c, g, other or unknown
  misc_feature (738)..(738): "n" may be a, t, c, g, other or unknown
  misc_feature (766)..(766): "n" may be a, t, c, g, other or unknown
  misc_feature (803)..(803): "n" may be a, t, c, g, other or unknown
gacgggccacaccctctgagaaccttgtaccctcatctgctcgtgtggataagccccccagtgtgctgccctacttcaatcgtcctccttcggcccttcccctgatgggtctgcccccaccaccaattccacccccaccacctctctcctcaagctttggggtccctcctcctcctcctggtatccactaccagcatctcatgcccccacctcctcgattacctcctcatcttgctgtacctccccctggggccatcccacctgcccttcacctcaatccagccttcttccccccaccaaacgctacagtggggcctccaccagatacttacatgaaggcctctgccccctataaccaccatggcagccgagattcgggccctccaccctctacagtgagtgaagccgaatttgaagatatcatgaagcgaaacagagcaatttccagcagtgccatttccaaagcagtatctggagccagtgcaggggattacagtgacgcaattgagacgttgctcacagccattgcggttatcaaacagtcccgggttgccaatgatgatcgttgccgtgtcctcatctcctctcttaaggactgtcttcatggcattgaagccaagtcctacagtgtgggtgccagtgggagctcttncaggaaaagacatcgctcccgggaaaggtcacctagccggtcccgggagaacagcaggaggcaccgggatctgcttcataatgaanatcggcatgatgattatttccaagaaanggaaccgggagcattgagaaaacaccggggatagaanaac

SEQ ID NO: 2227 - DNA, 814 bp, Homo sapiens
  misc_feature (723)..(723): "n" may be a, t, c, g, other or unknown
  misc_feature (739)..(739): "n" may be a, t, c, g, other or unknown
  misc_feature (794)..(794): "n" may be a, t, c, g, other or unknown
caactactctgaaagtgtcttacttagagatttacaatgaagaaattttggatcttctatgcccatctcgtgagaaagctcaaataaatatacgagaggatcctaaggaaggcataaagattgtgggactcactgagaagactgttttggttgccttggatactgtttcctgtttggaacagggcaacaactctaggactgtggcctccacggctatgaactcccagtcgtcccgatctcatgccatctttacaatctccttagagcaaagaaagaaaagtgacaagaatagcagctttcgctccaagctgcatcttgtagacctcgctggatcagaaagacagaagaaaaccaaggctgaaggggatcgtctaaaagagggtattaatattaaccgaggcctcctatgcttgggaaatgtaatcagtgctcttggagatgacaaaaagggtggctttgtgccctacagagattccaagttgactcgactgcttcaagattctctaggaggtaatagccatactcttatgatagcctgtgtgagtcctgctgactccaatctagaggaaacattaaatacccttcgctatgctgacagagcaagaaaaatcaagaacaaacctattggtaatattgatccccagacagctgaacttaatcatctaaagcaacaggtacaacagctacaagtcttggtgctacaggcccatggaggtaccctgnctggatctataactgnggaaccatcagagaatctacaatccctgatggagaaagaatcagtcccttggtanaaggagaatggaaaaattaa

SEQ ID NO: 2228 - DNA, 772 bp, Homo sapiens
  misc_feature (729)..(729): "n" may be a, t, c, g, other or unknown
  misc_feature (751)..(751): "n" may be a, t, c, g, other or unknown
  misc_feature (760)..(760): "n" may be a, t, c, g, other or unknown
taagaagtctcttgaaataaaagaagaaaaaattgctgctttagaagctcgattagaagaatccacgaattataaccagcaattgcgccaagaacttaaaacaaatgctacactgcaagcagagaagcaagcgttgaaaactcaactgaagcaacttgagacacagaacaataatttgcaggctcagattcttgcacttcagaggcagacagtgtcattacaagaacagaataccactcttcaaacacagaatgccaagcttcaggttgaaaattccacccttaattcccaaagtacctcactcatgaaccagaatgcccaactcctaatccagcagtcttccttagaaaatgaaaatgaatctgtaatcaaagagcgagaagacctaaaatctctctatgattctctgatcaaagatcatgaaaagctggaacttcttcatgaacgtcaggcttcagagtatgaatctcttatctctaaacatggaactctgaagtctgcccacaaaaatcttgaggtggaacatagagaccttgaagaccgttacaatcagttattaaaacagaaaggacagttggaagatttggaaaaaatgctcaaagtagaacaggaaaaaatgctgcttgaaaataaaaatcatgaaacagtagctgcagaatacaagaaactttgtggtgaaaatgataggctgaatcatacctatagtcaacttttaaaagagactgaagntttacaaactgaccattaaaanttgaaaagncttctgaatatt

SEQ ID NO: 2229 - DNA, 773 bp, Homo sapiens
  misc_feature (694)..(694): "n" may be a, t, c, g, other or unknown
  misc_feature (709)..(709): "n" may be a, t, c, g, other or unknown
  misc_feature (739)..(739): "n" may be a, t, c, g, other or unknown
aaaagaatggaggagtcggaacccgaacggaagcgggctcgcaccgacgaggtgcctgccggaggaagccgctccgaggcggaagatgaggacgacgaggactacgtgccctatgtgccgttacggcagcgccggcagctactgctccagaagctgctgcagcgaagacgcgagggagctgcggaggaagagcagcaggacagcggtagtgaaccccggggagatgaggacgacatcccgctaggccctcagtccaacgtcagcctcctggatcagcaccagcaccttaaagagaaggctgaagcgcgcaaagagtctgccaaggagaagcagctgaaggaagaagagaagatcctggagagtgttgccgagggccgagcattgatgtcagtgaaggagatggctaagggcattacgtatgatgaccccatcaaaaccagctggactccaccccgttatgttctgagcatgtctgaagagcgacatgagcgcgtgcggaagaaataccacatcctggtggagggagacggtatcccaccacccatcaagagcttcaaggaaatgaagtttcctgcaaccatcctgagaggcctgaagaagaaaggcattcaccacccaacacccattcagatccagggcatccccaccattctatctggccgtgacatgataggcatcgctttcacgggttcangcaagacactggtgntcacgtttgccccgtcatcattgttctggnctgggaacaaggaagaaagaagggttaccccttt

SEQ ID NO: 2230 - DNA, 826 bp, Homo sapiens
  misc_feature (739)..(739): "n" may be a, t, c, g, other or unknown
  misc_feature (748)..(748): "n" may be a, t, c, g, other or unknown
  misc_feature (825)..(825): "n" may be a, t, c, g, other or unknown
aattaatacaagtcccaggcccaatgcctaagagaccagacgtgggcaaagacaagtttggatggaaaggtgttatcacagagccctgtccagctcctagaattcctcaggccagtgacacttttttgctgctggccacccatgcctctgatgagaacacttgccaatttggccagcagaaagagagtaggccggatgttttcatgagcccacaaatttagaaactctcctagtagtactttttctctctccatttaagagacaactacggtcaaaagtttgagccattctcttctaccccttcagtgtctgaccctttcactggctcttatctgtaaacacagggaggcaggtatggatttttcacagtagacaatgggtcaacagcatgagtttgaggacctgctgtgaagatttctcctccaaaatacatctcatgggcaggattcttcctgctccatatctgtttcaattttaagaaagcaccacatacaagacacattcagaagtcattcctgagcattgctggtgtttgcacacttgccacctgcattaccaattctgtaaatttcaattcctggtggaaagtgaccactttgaccatggatttcccaaagaagagttcctttgcagaccataggtggaaaagtcaatgagcatctccttccttgccaaagcatgtcccaacatgtaacaaactctagggatcaaaagggttatattcagcatctgatgtcanatgtacagntccttcccttccatatataaaccccggtgtagaatctgcacgccctgctcttcggaaaccaaggaacaagccactgnt

SEQ ID NO: 2231 - DNA, 804 bp, Homo sapiens
  misc_feature (772)..(772): "n" may be a, t, c, g, other or unknown
  misc_feature (783)..(783): "n" may be a, t, c, g, other or unknown
  misc_feature (785)..(785): "n" may be a, t, c, g, other or unknown
cacacttggactcttttcaaacattaggttagtttgtaatgaaagcaaaaaatttgtgaatagagagcagtagaaacacatccagcaacagctcaccttttaacctaaaaggctcctccgagcagctccatggccggtctgagagcttcagcagcgaagacctgatccccagcagggacctggccactttgccccgggaagccagcacaccgggacgcaacgccctcggccgccacgagtaccccttgcctcggaacgggcctctcccacaggagggtgcccagaagaggggcacagcccctccctacgtcggagtgcggccctgctcggcctcccccagcagtgagatggtcaccttggaggagttcctggaggagagcaaccgcagctcccccacccatgacactcccagttgccgggatgacctgctgagtgactacttccgaaaggccagcgatcccccagccatcggaggccaaccaggaccacctgccaagaaagaaggggccaagatgcccaccaactttgtggcccccaccgtcaaaatggccgcccccacctcggaggggaggccgctgaagcccgggcagtacgtaaagccaaacttcagactgactgaggccgaggccccacccagcgtggccccgagacaggcccagccttcccagagcctgtctctgggcagaccccggcaggctccggtgcccccagcttcccatgcacctgccaagcccgcagtgccttcttgagcccggccttcagccttggcctnagctgaccttntncgggccaacgggccaaagg

SEQ ID NO: 2232 - DNA, 743 bp, Homo sapiens
  misc_feature (674)..(674): "n" may be a, t, c, g, other or unknown
  misc_feature (716)..(716): "n" may be a, t, c, g, other or unknown
  misc_feature (738)..(738): "n" may be a, t, c, g, other or unknown
ctgctccagttatgtaacccatgggcttccctttgcacagctcctcatgtgctcatctccatgctgatcaaaccaccccacctcattccttgccttctgcaaggggaagtgcctcaggctggagtttgtcctgtctacagactgaatatgcattttgcccagtggctggagatgtgctggtggtggaatgtgctggtgattgtttctggatggagagccacagccccccagtgttctgccatgactgactcctgaccttggcaaattgcctcctctctcccagcctcctccataacaggtggcgatgagtcccatttcctccctacctcacaggaaggcacgcattataaagggcacacttatcagatgtgcccagatgtggctggaacttttggagacagatacttggttcacaaccgcaaaggtgggctttcaccagagaagaaaatctctgggctgctgagttcagtgggctccttgcaggctggtccaggaagtctggtgttcctcctgaaggtggctgctatgtccagcaggtgatcaagctgacagtaccacaagaaccaagaaacagaatctgttcccaaggaatgaatgttctatctctctgacccaaaagcaagagcaagagagagctgtcaccatcatcaccctgctcccaacacaaacacagncccccaagtccatattgctgacaagggtatctgccttgtcanggtgaatcctctggacccccangccat

SEQ ID NO: 2233 - DNA, 829 bp, Homo sapiens
  misc_feature (686)..(686): "n" may be a, t, c, g, other or unknown
  misc_feature (736)..(736): "n" may be a, t, c, g, other or unknown
  misc_feature (787)..(787): "n" may be a, t, c, g, other or unknown
  misc_feature (810)..(810): "n" may be a, t, c, g, other or unknown
aattccctaccctcgacctgtcgatgccccgcggccccgcccgccctcttaagcctggctcagccctcagggcccgcccgaagtctaccgagcccgagtggcctaccgagcccgagtggccccgcagcgtccaggaggcgcccgctccgcggtggcgctcttggaggtggtgtcggagagccgccgagcgtgcggtcccgggatggctctaccccggccaagtgaggccgtgcctcaggacaaggtgtgctacccgccggagagcagcccgcagaacctggccgcgtactacacgcctttcccgtcctatggacactacagaaacagcctggccaccgtggaggaagacttccaacctttccggcagctggaggccgcagcgtctgctgcccccgccatgccccccttccccttccggatggcgcctcccttgctgagcccgggtctgggcctacagagggagcctctctacgatctgccctggtacagcaagctgccaccgtggtacccaattccccacgtccccagggaagtgccgccttcctgagcagcagccacgagtacgcgggtgccagcagtgaagatctgggccaccaaatcattggtggcgacaacgagagtggcccgtgttgtggacctgacactttaattcaccggcccctgcggatgcttctctggtacctgangggctgaggaccttccagttattaccttgctacccagcaagcagtcagangatggtcccaaacccttcaaccaagaagggaagtcccctgttcggttcagntcacggaggaggactgcatttgntctgtacggggtccttcca

SEQ ID NO: 2234 - DNA, 853 bp, Homo sapiens
  misc_feature (769)..(769): "n" may be a, t, c, g, other or unknown
  misc_feature (844)..(844): "n" may be a, t, c, g, other or unknown
gaaaacagtttactcctcctttgctaggcccgatgtcaccactgaaccctttggtccagataactgtttgcatttcaatatgactccaaactgccagtaccgtccccagagtgtacctccccatcacaataaattggagcagcaccaagtgtatggtgccaggtcagagccaccagcctccatgggtcttcgttataacacatatgtggccccaggaagaaacgcatctggacaccactccaagccatgcagccgggtcgagtatgtgtcttctttgagctcctctgtcaggaatacctgttaccccgaagacattccaccgtaccctaccatccggagagtgcagtctctccatgctccgccgtcttccatgattcgctctgttcccatttcacggacagaagttcccccagatgatgagccagcctactgcccaagacctctgtaccaatataagccatatcagtcctcccaggcccgctcagattatcatgtcactcagcttcagccttactttgagaatggccgggtccactacaggtatagcccatattccagttcttctagttcctattacagtccagatggggccctgtgtgatgtggatgcctatggcacagtccagttgagaccccttcaccggcttccaatcgagactttgctttctacaatcctaggctgcaaggaaagagcttgtacagttatgctggtttggcttcacgttcccgggccaacgtgactggctatttctctccaacgaccataatgnaatcagcatgccttcggctgctgatgtgaagcacacctacaccttatgggatcttgaggacatggaaaaatcccnatgcagtcc

SEQ ID NO: 2235 - DNA, 853 bp, Homo sapiens
  misc_feature (838)..(838): "n" may be a, t, c, g, other or unknown
agttgcacgctgagccgcggacaccatgcagtcggatgatgttatctgggatacactaggaaacaagcaattttgttccttcaaaataagaaccaagactcagagcttctgccgaaatgaatatagcctgactggactgtgtaatcggtcatcctgtcccctggcaaatagtcagtatgccactattaaagaagagaaaggacagtgctacttgtatatgaaggttatagaacgagcggcttttcctcggcgtctctgggaacgggtccggcttagtaaaaactatgagaaagcactggagcaaatagatgaaaatctgatttactggccccgtttcattcgacacaaatgtaagcagagattcaccaagatcacccaatacctaattcgaattagaaaacttacactaaagcgacagaggaaacttgttcctttgagtaagaaggtggagcgtagggagaaaagaagagaggaaaaggcattaatagctgctcagctggacaatgccattgagaaggaattactggagagactgaaacaagatacgtatggcgacatctacaacttccccattcatgccttcgacaaagccctggaacaacaggaggcagagagtgactctttagatactgaggaaaaagatgatgatgatgatgatgaggaagatgtggggaaaagagaatttgtcgaagatggtgaggtagatgagagtgacataagtgattttgaggatatggataaactggatgccacagtgatgaagatcaggatggtaaatcctccatgaggaggaggaagaaaaaggccttaatgcgaaacacaaggcaaatgccttganaggccctgcaaaaaa

SEQ ID NO: 2236 - DNA, 850 bp, Homo sapiens
  misc_feature (795)..(795): "n" may be a, t, c, g, other or unknown
  misc_feature (812)..(812): "n" may be a, t, c, g, other or unknown
  misc_feature (829)..(829): "n" may be a, t, c, g, other or unknown
agccgagccgcgaggagcgcgctccgtggccccgatggagcggtacaaagccctggaacagctgctgacagagttggatgacttcctcaagattcttgaccaggagaacctgagcagcacagcactggtgaagaagagctgcctggcggagctcctccggctttacaccaaaagcagcagctctgatgaggagtacatttatatgaacaaagtgaccatcaacaagcaacagaatgcagagtctcaaggcaaagcgcctgaggagcagggcctgctacccaatggggagcccagccagcactcctcggcccctcagaagagccttccagacctcccgccacccaagatgattccagaacggaaacagcttgccatcccaaagacggagtctccagagggctactatgaagaggctgagccatatgacacatccctcaatgaggacggagaggctgtgagcagctcctacgagtcctacgatgaagaggacggcagcaagggcaagtcggccccttaccagtggccctcgccggaggccggcatcgagctgatgcgtgacgcccgcatctgcgccttcctgtggcgcaagaagtggctgggacagtgggccaagcagctctgtgtcatcaaggacaacaggcttctgtgctacaaatccttcaaggaccacagccctcactggacgtgaacctactgggcagcaacgtcattcacaaggagaagcaagtgccggaagaaggacacaagctgaagatcacaccgatgaatgccgatgtgaatgtgctgggcctgcanagcaaggaccagcttancatgggctaaggtcatncaggaagtgagcggctgcttc

SEQ ID NO: 2237 - DNA, 839 bp, Homo sapiens
  misc_feature (756)..(756): "n" may be a, t, c, g, other or unknown
  misc_feature (807)..(807): "n" may be a, t, c, g, other or unknown
  misc_feature (815)..(815): "n" may be a, t, c, g, other or unknown
ttgcagtggacacagctgctgggccatatcagaatcacactgtggtttttctgggatcagagaagggaatcatcttgaagtttttggccagaataggaaatagtggttttctaaatgacagccttttcctggaggagatgagtgtttacaactctgaaaaatgcagctatgatggagtcgaagacaaaaggatcatgggcatgcagctggacagagcaagcagctctctgtatgttgcgttctctacctgtgtgataaaggttccccttggccggtgtgaacgacatgggaagtgtaaaaaaacctgtattgcctccagagacccatattgtggatggataaaggaaggtggtgcctgcagccatttatcacccaacagcagactgacttttgagcaggacatagagcgtggcaatacagatggtctgggggactgtcacaattcctttgtggcactgaatgggcattccagttccctcttgcccagcacaaccacatcagattcgacggctcaagaggggtatgagtctaggggaggaatgctggactggaagcatttgcttgactcacctgacagcacagaccctttgggggcagtgtcttcccataatcaccaagacaagaagggagtgattcgggaaagttacctcaaaggccacgaccagctggttcccgtcaccctcttggccattgcaagtcatcctggctttcgtcatgggggcccgtcttcttgggcatacccgctactgcgtctgngatcatcggcgcaaagacgtggctgtggtgcaacgcaaggagaaggagctnacccactnggcccggggcttcatgaacacgta

SEQ ID NO: 2238 - DNA, 822 bp, Homo sapiens
  misc_feature (767)..(767): "n" may be a, t, c, g, other or unknown
  misc_feature (801)..(801): "n" may be a, t, c, g, other or unknown
  misc_feature (821)..(821): "n" may be a, t, c, g, other or unknown
tataattatatgttaaataaggcacataaccagtttccaaggtcatcatggttgcttaaagtctttccccttctgtactccatggaaatattctcagtaaaccaaaaacaaaaatggaaaaataatcaccaacccccatcccgacacacacacacagtccaaagcaaaagtcagtgtgtattgaatttaacaagtaatgcagtttgggatgcttttgctacattttggtggcattttaactagttatctgaatatttattaatcgtacttcctcttgtaaagttaactacttacttttttgttgttgtttttttaacatcaggttctgtatctaataggagatgtaacactttatttcatggcaggtttttattgcagagacttgaagtcttagttttttaaactggcacataaaacactttttgctgttatttttatttatgtcaatactgcagagtatctttatgccttattcaagtggattctgagcctgtatgtcacaatgtaaacactggaggttcactcacctacgcactcacccaccacctctgaaagaaacagaaactgcagagaaagacagcatcttagctcattttgtttttaaatgaggttttagacgcttgccacttcctaagggaaatcctaaaacagagcaagtgatgctcccaggtatcactgtgaacttttttctttcaaagtgtgaatttttacactggctttttcatttttttaaagtaattgaagcttgtggctttacaacttaatgntttttgctatccagatacaggttcattggttaanaacccagtgacacttaatang

SEQ ID NO: 2239 - DNA, 854 bp, Homo sapiens
  misc_feature (816)..(816): "n" may be a, t, c, g, other or unknown
tgccagacccaaaaccgccagggccacctgtggcctcctcgtcctcggccactagcctgccgtggcccgtggtcatcggcatcccagccggcgctgtcttcatcctgggcaccctgctcctgtggctttgccaggcccagaagaagccgtgcacccccgcgcctgcccctcccctgcctgggcaccgcccgccggggacggcccgcgaccgcagcggagacaaggaccttccctcgttggccgccctcagcgctggccctggtgtggggctgtgtgaggagcatgggtctccggcagccccccagcacttactgggcccaggcccagttgctggccctaagttgtaccccaaactctacacagacatccacacacacacacacacacactctcacacacactcacacgtggagggcaaggtccaccagcacatccactatcagtgctagacggcaccgtatctgcagtgggcacgggggggccggccagacaggcagactgggaggatggaggacggagctgcagacgaaggcaggggacccatggcgaggaggaatggccagcaccccaggcagtctgtgtgtgaggcatagcccctggacacacacacacagacacacacactgcctggatgcatgtatgcacacacatgcgcgcacacgtgctccctgaaggcacacgtacgcacacacgcacatgcacagatatgccgcctgggcacacagataagctgccaaatgcacgcacacgcacagagacatgccagaacatacaaggacatgcttgctgaacatacacacgcacacccatgcgcanattgcttgctggaacacacacacacacggatatgttgt

SEQ ID NO: 2240 - DNA, 755 bp, Homo sapiens
  misc_feature (697)..(697): "n" may be a, t, c, g, other or unknown
  misc_feature (710)..(710): "n" may be a, t, c, g, other or unknown
  misc_feature (746)..(746): "n" may be a, t, c, g, other or unknown
ttcaagagcagcctggccaacatggtgaaaccctgtctctactaaaaatacaaaagttggcctgttgtggtggcgcgcacctgtaatcccagctactcgggtggctggggcaggagaatcgcttgaacccaggaggcggagggtgcagtgagccgggatcacgccactgcacttcagcctgggtgacagagtgtgactccatctcaagaaaaacgagggagattagaaacctatgatcaggcattggctgaaacaaatggtaaattcttttggcagccttgagcttccccaggcagggacccaaaggggcctgggttatccctgagacagggccttgagctgctagaaactatgctagtgtttgttcaagtctctccgtgtccggggtgagcaaaattgtttgtgctgaaaatcaatgatttgcagctctcaagattccagtgggcagtctgggtgcctgagtttctgctttttttttttctttatgtacagggtcttgctctgtcacctaggctagagtgtaattagtggccccagtcatggctcactgcagctgcaaactggctgcaagctgttctggctcagcctaccaggttactgggcttacaggtggatgccaccgtacccaacagattttatttttgtagggatgggggtctccctgtattgcccaggctggtctcaaactcctggcctnccaaggtgtttanattgcaggtgtaagccaccacacgtggccagccttntgcatttct

SEQ ID NO: 2241 - DNA, 814 bp, Homo sapiens
  misc_feature (635)..(635): "n" may be a, t, c, g, other or unknown
  misc_feature (672)..(672): "n" may be a, t, c, g, other or unknown
  misc_feature (692)..(692): "n" may be a, t, c, g, other or unknown
  misc_feature (800)..(800): "n" may be a, t, c, g, other or unknown
  misc_feature (803)..(803): "n" may be a, t, c, g, other or unknown
  misc_feature (814)..(814): "n" may be a, t, c, g, other or unknown
ctccgggcatggacccgatagcctcggctctgcgcacgcccatctccatcaccagctcctatgcggcgcccttcgccatgatgagccaccatgagatgaacggctccctcaccagtcctggcgcctacgccggcctccacaacatcccaccccagatgagcgccgccgccgctgctgcagccgctgcctatggccgatcgccaatggttggttttgaccctcaccccccgatgcgggccacaggcctcccctcaagcctggcctccattcctggaggaaaaccagcgtactcattccatgtgagtgctgatgggcagatgcagcccgtgcccttcccccacgacgccctggcaggccccggcatcccgaggcacgcccggcagatcaacacactcagccacggggaggtggtgtgtgccgtgaccatcagcaaccccacgaggcacgtctacacaggtggcaagggctgcgtgaagatctgggacatcagccagccaggcagcaagagccccatctcccagctggactgcctgaacagggacaattacatccgctcctgcaagctgctccctgatgggcgcacgctcatcgtgggcggcgaaggccagcacgctcaccatctgggacctggcctnggccacgccccgcatcaaggccgagctgacgtctcgnttccgctggtatgccctggncattagccctgacgccaaagtctgttctctgctgcagcgatgggaacatgctgctggacctgacaacagaccctggcagcagtcagggcaccaatgggcagttgatanctntccatgatggn

SEQ ID NO: 2242 - DNA, 845 bp, Homo sapiens
  misc_feature (672)..(672): "n" may be a, t, c, g, other or unknown
  misc_feature (675)..(675): "n" may be a, t, c, g, other or unknown
  misc_feature (761)..(761): "n" may be a, t, c, g, other or unknown
  misc_feature (802)..(802): "n" may be a, t, c, g, other or unknown
  misc_feature (804)..(804): "n" may be a, t, c, g, other or unknown
ttcaacttcgtggagctgcctgctgctgccctgcgcttcatgcccaagccggtgttcgtgccagacgtggccctcatcgccaaccgcttcaaccccgacaacctcatgcacgtctttcatgacgacctgctgccactcttctacaccctgcggcagtttcccggcctggcccacgaggcacggctcttcttcatggagggctggggcgagggtgcacacttcgacctctacaagctgctcagccccaagcagcctctcctgcgggcacagctgaagaccctgggccggctgctgtgcttctcccatgcttttgtgggcctctccaagatcactacctggtaccagtatggctttgtgcagccccagggcccgaaggccaacatcctcgtctcaggcaatgagatccggcagtttgcacggttcatgacagaaaagctgaacgtgagccacacaggagtccccctaggcgaggagtacattctggtctttagccgaacccagaacagactcattctgaatgaggcagagctgctgctggcactggcccaggagttccagatgaagacagtgacagtgtccctggaggaccacacctttgctgatgtcgtgcggctggtcagcaatgcctccatgctggtcagcatgcatggggcccaactggtcaccaccctnttnctgccccgtggggcaactgtggtagaactcttccatatgctgcaatcccgacactacacttcctataagacgcttggccatgctgnctggcatggaccttcagtatgtaacctgcggaacatgatgncngagacacagtcacacaccctgacggcctggataaggggcat

SEQ ID NO: 2243 - DNA, 843 bp, Homo sapiens
  misc_feature (240)..(240): "n" may be a, t, c, g, other or unknown
  misc_feature (404)..(404): "n" may be a, t, c, g, other or unknown
  misc_feature (636)..(636): "n" may be a, t, c, g, other or unknown
  misc_feature (810)..(810): "n" may be a, t, c, g, other or unknown
  misc_feature (816)..(816): "n" may be a, t, c, g, other or unknown
  misc_feature (835)..(835): "n" may be a, t, c, g, other or unknown
tgtcatacatattcgttctccattgatatatctggagaaatcaatgctacagcctatagctgtgaaaaaattctaccttatatttgcaggtgaagatttttctattagattatctacaaaaacaagctttcagtaaactaccaaaaaaaagtgggggtggaggaaaaaaggcaaaggcgccttctgagatcaaaaggaccagtgtattaatttgaggggttgggttattttaaccttggngaattgttgtgtgtactcagagtgtattttctttgtgtagagcagaatgtacacattatagcagctcgccattgtgtttgcattttttaagaagtacatctttaactttgtatacacaagaaatgtcatatttttgagttttgtaatggaagaaccaggcacanaaacagacagaaatgatactgtatgtgtgtgtatttatgtctgaagaaagtccccttgaattctgatatctctttgaatctaagagatcctgatagcttcatgtttaagagcattgacaggtggggcacctctgaggggagttcattgtttctcatgcatcatttgccatatactattaatcaaagtgcttgctttcagtcctttgaggggacagataatctgaaggcccanattagagatttcactgatattttgggacatacataagaaacatcattataattaataaaaagccgtaatagcatataaatgggtcttgacattttaaaagcctgggtatgatcagttgacactttgagtcccccctaaatagctggactttccttttatttcgaatttggactnatttgnagcggatactcatcttcanaagtttgg

SEQ ID NO: 2244 - DNA, 804 bp, Homo sapiens
  misc_feature (716)..(716): "n" may be a, t, c, g, other or unknown
  misc_feature (779)..(779): "n" may be a, t, c, g, other or unknown
  misc_feature (801)..(801): "n" may be a, t, c, g, other or unknown
ttattatgcttctggatccgaatttgatgagatgtttgtgggtgtgggagccagccgtatcagaaatctttttagggaagcaaaggcgaatgctccttgtgttatatttattgatgaattagattctgttggtgggaagagaattgaatctccaatgcatccatattcaaggcagaccataaatcaacttcttgctgaaatggatggttttaaacccaatgaaggagttatcataataggagccacaaacttcccagaggcattagataatgccttaatacgtcctggtcgttttgacttgcaagttacagttccaaggccagatgtaaaaggtcgaacagaaattttgaaatggtatctcaataaaataaagtttgatcaatccgttgatccagaaattatagctcgaggtactgttggcttttccggagcagagttggagaatcttgtgaaccaggctgcattaaaagcagctgttgatggaaaagaaatggttaccatgaaggagctggagttttccaaagacaaaattctaatggggcctgaaagaagaagtgtggaaattgataacaaaaacaaaaccatcacagcatatcatgaatctggtcatgccattattgcatattacacaaaagatgcaatgcctatcaacaaagctacaatcatgccacgggggccaacacttggacatgtgtccctggtacctgagaatgacngatggaatgaaatagaacccactgcttgcacaaatggatggtagtatgggaggaaaatggcanaaggagcttatatttggaccgncat

SEQ ID NO: 2245 - DNA, 880 bp, Homo sapiens
  misc_feature (687)..(687): "n" may be a, t, c, g, other or unknown
  misc_feature (699)..(699): "n" may be a, t, c, g, other or unknown
  misc_feature (807)..(807): "n" may be a, t, c, g, other or unknown
  misc_feature (850)..(850): "n" may be a, t, c, g, other or unknown
  misc_feature (867)..(867): "n" may be a, t, c, g, other or unknown
atgtcaatgtgtctgtccttcactcctccattgtctgccgccactgctgctgctgctgctgctgccgctgctgctgcacgaatcgccgcagcccccagccttgcgcgtcgtcgctacctcctcggacagaaattttatgaataagcatcagaagccagtgctaacaggccagcggttcaaaactcggaaaagggatgaaaaagagaaattcgaacccacagtcttcagggatacacttgtccaggggcttaatgaggctggtgatgaccttgaagctgtagccaaatttctggactctacaggctcaagattagattatcgtcgctatgcagacacactcttcgatatcctggtggctggcagtatgcttgcccctggaggaacgcgcatagatgatggtgacaagaccaagatgaccaaccactgtgtgttttcagcaaatgaagatcatgaaaccatccgaaactatgctcaggtcttcaataaactcatcaggagatataagtatttggagaaggcatttgaagatgaaatgaaaaagcttctcctcttccttaaagccttttccgaaacagagcagacaaagttggcgatgctgtcggggattctgctgggcaatggcaccctgcccgccaccatcctcaccagtctcttcaccgacagcttagtcaaagaaggcattgcggnctcatttgctgncaagcttttcaaagcatggatggcagaaaaagatgcccactctggtacctcggctttgagaagagcccacttagaccagaagcttgcttggaactcttttccaagttnacaggaccagaaatgggggatcaattttgggttaaataccttnactggaccccaaggtcnttaaaggagcctt

SEQ ID NO: 2246 - DNA, 853 bp, Homo sapiens
  misc_feature (674)..(674): "n" may be a, t, c, g, other or unknown
  misc_feature (747)..(747): "n" may be a, t, c, g, other or unknown
  misc_feature (826)..(826): "n" may be a, t, c, g, other or unknown
  misc_feature (850)..(850): "n" may be a, t, c, g, other or unknown
ttatttgctaattgcacagacgataacatctacatgtttaatatgactgggttgaagacttctccagtggctattttcaatggacaccagaactctaccttttatgtaaaatccagccttagtccagatgaccagtttttagtcagtggctcaagtgatgaagctgcctacatatggaaggtctccacaccctggcaacctcctactgtgctcctgggtcattctcaagaggtcacgtctgtgtgctggtgtccatctgacttcacaaagattgctacctgttctgatgacaatacactaaaaatctggcgcttgaatagaggcttagaggagaaaccaggaggtgataaactttccacggtgggttgggcctctcagaagaaaaaagagtcaagacctggcctagtaacagtaacgagtagccagagtactcctgccaaagcccccagggtaaagtgcaatccatccaattcttccccgtcatccgcagcttgtgccccaagctgtgctggagacctccctcttccttcaaatactcctacgttctctattaaaacctctcctgccaaggcccggtctcccatcaacagaagaggctctgtctcctccgtctctcccaagccaccttcatctttcaagatgtcgattagaaactgggtgacccgaacaccttnctcatcaccacccatcacttcacctgcttcggagaccaagatcatgtcttccgagaaaagcccttattcctgngagccagaagtcattccaagcagaagcttgctctgagtctagaaatagagtaagaggaggctagactcaactgctgganagtgtgaaacaaaagtgtgtgaanagt

SEQ ID NO: 2247 - DNA, 750 bp, Homo sapiens
  misc_feature (677)..(677): "n" may be a, t, c, g, other or unknown
  misc_feature (729)..(729): "n" may be a, t, c, g, other or unknown
  misc_feature (746)..(746): "n" may be a, t, c, g, other or unknown
aaaaaaaaaaaaaaaaactcagttgcctctggccagtgcagggctcagccagggatggcttctagctgacagtgggaggaattaattcatctgaccggaatattcttttctcttctgggctgttggtttttcaagtgcaacaaagattccatacagctccaaggaaggagccaagaaaaacattctgtgccaaagtgagatcctggaagtgaaaccccggaataaagctgaaaagcgggctccagttgggtgccaggaaatgcaggactggaatgtgacttgacttccggcagcgcgcaggtgctcccgggtcacctgctttgaggtccagcctcctgccctgcctcaggtgaccacatgaccactgtggactttgccctgaaaccttctgggaggagaagaggcctgaccttggcgctggggtccagtgggcattgctctggtccgaggctgctgctcttgacctctgctctgcggctgttttccattggagtagaggctcctcctgtcctgtcctgcctgtggagggaagcaaaccttcccctggaccagagagaggagaaagcggagacaggtagcaacgctgtggactggtgatgacaggctcttcagctccctgcaagtgaccgggcctggggaacagggcatggcacaggcacacaggaccccccacccanggctgccccaccagccccgtgtgttcaactggtctcctggaaatggcttcgnggtaaatccacttggtnttcg

SEQ ID NO: 2248 - DNA, 730 bp, Homo sapiens
  misc_feature (641)..(641): "n" may be a, t, c, g, other or unknown
  misc_feature (687)..(687): "n" may be a, t, c, g, other or unknown
  misc_feature (720)..(720): "n" may be a, t, c, g, other or unknown
tatacgctcagaaagtgaaaattggcgcatctttagagaggaacaaaatggagaagatgaagatggaggttggcgactagctggatcaaggagggatggagagaggtggcgacctcacagtcctgatggccctcgttctgcaggctggcgggaacacatggaacgacgtcggaggtttgagtttgattttcgagatagagatgatgaacggggttaccgaagggttcgctctggcagtgggagcatagatgatgacagggatagcttgcccgaatggtgcttagaggatgctgaagaagaaatgggtacatttgactcatctggagcattcctttctctaaaaaaagtacagaaagagcctattccagaagagcaggagatggacttccggcctgtggacgaaggggaggagtgctctgactctgagggtagccataatgaagaggccaaagaacccgataagacaaataagaaagaaggagagaaaacagatagagtaggagttgaagctagtgaggaaactccccagacctcatcatcatctgctagaccaggtactccttcagaccatcagtctcaggaagcatcacagtttgagaggaaagatgaaccaaaaactgagcaaacggaaaaagctgaanaggagactcggatggaaaatagtctaccagccaaagtgcccagcanaggggatgaaatgggttgcttgatgtccagcanccccttgtcg

SEQ ID NO: 2249 - DNA, 660 bp, Homo sapiens
  misc_feature (593)..(593): "n" may be a, t, c, g, other or unknown
  misc_feature (629)..(629): "n" may be a, t, c, g, other or unknown
  misc_feature (651)..(651): "n" may be a, t, c, g, other or unknown
ttttttttaaaggagtcagctctacaaagatgttgctttctttgatgcaatgcagagagcagagctttggacttggaatcaggagacccggactctgtcattaaatcaactgtgactctgggccagttactttccatttttgagtcttgatttcctacttataaaatgagggagcttatttggatgatctttaaggtctcttttggcactaataactcggtgtctcttttttttcaccttcaccatttcagttgatccaccaaacaaacctgagagatcaggattggcatccaagagttgtctcggccaactctgatgtcatgcttactctgtactagacatcgttccaagcattttacgtgcattaactcatttatcttcccaacatcttgttagggaggcactatagtgagcctcatttgaagatgaggaaacaaaggtacaaagaggttctagctggacctctaaagtcacataataagtaagtggtagagctggagttcacatccaggcagtaggctccaaggtctgtgctcttaaccacattctgggctgcatcttttatagacaaactatgatccagagagattacnagacttggatcacataccaagagagtgttaaagccncattaggattcaattccagggncatcaaatt

SEQ ID NO: 2250 - DNA, 843 bp, Homo sapiens
  misc_feature (627)..(627): "n" may be a, t, c, g, other or unknown
  misc_feature (728)..(728): "n" may be a, t, c, g, other or unknown
  misc_feature (735)..(735): "n" may be a, t, c, g, other or unknown
  misc_feature (807)..(807): "n" may be a, t, c, g, other or unknown
  misc_feature (836)..(837): "n" may be a, t, c, g, other or unknown
ttatgatattaaccagatcatttctacagctgtaatgacctatacgaagcactttgatgctcatggccgtatcaaggagattcaatatgagatattcaggtcgctcatgtactggattacaattcagtatgataacatgggtcgggtaaccaagagagagattaaaatagggccctttgccaacaccaccaaatatgcttatgaatatgatgttgatggacagctccaaacagtttacctcaatgaaaagataatgtggcggtacaactacgatctgaatggaaacctccatttactgaacccaagtaacagtgcgcgtctgacaccccttcgctatgacctgcgagacagaatcactcgactgggtgatgttcaatatcggttggatgaagatggtttcctacgtcaaaggggcacggaaatctttgaatatagctccaaggggcttctaactcgagtttacagtaaaggcagtggctggacagtgatctaccgttatgacggcctgggaaggcgtgtttctagcaaaaccagtctaggacagcacctgcagtttttttatgctgacttaacttatcccactaggattactcatgtctacaaccattcgagttcagaaattacctncctgtattatgatctccaaggacatctttttgccatggaaatcagcagtggggatgagttctatattgcatcggataacacagggacaccactggctgtgntcagtancaatgggcttatgctgaaacagattcagtcactgcatatggggaaatctatttgactctaatattggctttnactgggaattggatttcatgggggcctgnntgaacc

SEQ ID NO: 2251 - DNA, 774 bp, Homo sapiens
  misc_feature (684)..(684): "n" may be a, t, c, g, other or unknown
  misc_feature (733)..(733): "n" may be a, t, c, g, other or unknown
  misc_feature (742)..(742): "n" may be a, t, c, g, other or unknown
attctgcctcgaaggcatggaggagtcaggctctgagggcctagacgagctgatttttgcccggaaagacacattctttaaggatgtggactatgtctgcatttctgacaattactggctgggaaagaagaagccctgcatcacctacggcctcaggggcatttgctactttttcatcgaggtggagtgcagcaacaaagacctccattctggggtgtacgggggctcggtgcatgaggccatgactgatctcattttgctgatgggctctttggtggacaagagggggaacatcctgatccccggcattaacgaggccgtggccgccgtcacggaagaggagcacaagctgtacgacgacatcgactttgacatagaggagtttgccaaggatgtgggggcgcagatcctcctgcacagccacaagaaagacatcctcatgcaccgatggcggtacccgtctctgtccctccatggcatcgaaggcgccttctctgggtctggggccaagaccgtgattcccaggaaggtggtcggcaagttctccatcaggctcgtgccgaacatgactcctgaagtcgtcggcgagcaggtcacaagctacctaactaagaagtttgctgaactacgcagccccaatgagttcaaggtgtacatgggccacggtgggaagccctgggtctncgacttcagtcaccctcattacctggctgggagaaagccatgaaacagnttttggtgntgagccaacttgaccagggaaggcggcaagta

SEQ ID NO: 2252 - DNA, 819 bp, Homo sapiens
  misc_feature (725)..(725): "n" may be a, t, c, g, other or unknown
  misc_feature (768)..(768): "n" may be a, t, c, g, other or unknown
  misc_feature (802)..(802): "n" may be a, t, c, g, other or unknown
catggtcttgcaggtggaacaagatgtgcccttttcagaggttgtgaagttagctccaaatcccagactagctgctaccccaagcccgggagcttctcaggtctacgaggcccttctcccccagtatgccaaactcgagcagagaatcttgtctcagacccgggggcctccggagtgaacaggcatccctgttgcccctgcctgcccagatttactgaccccatttgtcgacatggccccagacaggagggatccacttctctgttctgaacagctcttcctgcccctactgactccttggagtgtccaggaccatcttaaagccgccctcagcacatctgcatgaagataggtaggcactcctgtccctgtgcccgtgtgccccagggcaggaaagcatctctcttttcctgtcttttatcccaggaggcaggacaacactgagactgggatatgtccaataaaaactatgacttttccccttgcagaggcagaattaaagctaatctagggactcaaatcagcagaatgggggagacaaagcccggtctcaccccctaacctcatcctatctctttctccaaccctgactgcccactcctccacaaaccgtgacccatagccggccccaccccataccttgatctaccatccatcctcttcccaatccaaaccccacagtctcttctctcccacaccctgccttcttggttcagctgtctgangtgcctcgcaaggcctctcttacttgccccatgctcccctttncatgctgtcccattctctcctttcaccatctctnctttcccctcctcatct

SEQ ID NO: 2253 - DNA, 680 bp, Homo sapiens
  misc_feature (432)..(432): "n" may be a, t, c, g, other or unknown
  misc_feature (606)..(606): "n" may be a, t, c, g, other or unknown
  misc_feature (620)..(620): "n" may be a, t, c, g, other or unknown
  misc_feature (667)..(667): "n" may be a, t, c, g, other or unknown
gactgggggaacatttgtacaaaactaacgatgaagttattcatggcatcttcaaagcttacattcagaggctgcttcacgccttggctcgacactgccagctggatcagaccatgagggggttcctgaggagactgatgactttggggagtttcgcatgagggtatcagacctggtaaaggacttgattttcttgatagggtctatggagtgttttgctcagttatattctactctgaaagaaggcaacccaccctgggaggtgacagaagcggttctctttatcatggctgctatagcaaagagtgttgatccggaaaacaatccaacacttgtggaagtcctagaaggagttgtccgcctcccggagaccgtacatacggctgtgcgatacatcagcattgaattggttggagagatgagtgaagtcgntgatcgaaatcctcagttccttgaccctgtgttgggctatttgatgaaaggcctgtgtgaaaagcccctggcttctgctgcagccaaagccattcataacatttgctctgtctgccgagatcacatggctcagcactttaatggactcctggagattgcccgctccctcgattncttctgttgctcanaagctgctgtggcttgctaaaagggacagcacttgtcctaacccgantacctttggataa

SEQ ID NO: 2254 - DNA, 699 bp, Homo sapiens
  misc_feature (631)..(631): "n" may be a, t, c, g, other or unknown
  misc_feature (697)..(698): "n" may be a, t, c, g, other or unknown
tttttttatgtgtttgtttaaagatacatattaagcttgtagaccatagggacatacggagagtccattgctaatatctcactcagtattgtgaaattctatctcaccaccgtgaaactcttcagttttctaattgctttatcagcagggggtataaaaggtcatgaaagcaatttccacatgctgtggctccaggtctctgggtgtgaagcagagcaagcctggtttgtcctcctcctgtctccacacagacggcttctgcaggtttggtaatctacagtacactccttgcagggaaaaggtgatgagtcatcatggacttatttgaccactttttatgcatgcttagaggaaaacagaatactgttaagagattcatctgctagttattaagtaaagaaatatcacaataggccgggcgcagtggctcacacctgtaatcccagcattttgggaggccaaggtgggcggatcacctgaggtcaggagttcgagaccagcctagccaacatggtgaaaccccgtctctactaaaattataaaaaattagccgggtgtagtggtacacgcctgtagtcccagttacttgggaggctgaggcatgagaattgcttgaacccaggaagtggangtggaggtgagccgaaattgtgccactgtacttcagcctgcaacagaatgagacactgtcacacanna

SEQ ID NO: 2255 - DNA, 739 bp, Homo sapiens
  misc_feature (701)..(701): "n" may be a, t, c, g, other or unknown
  misc_feature (704)..(704): "n" may be a, t, c, g, other or unknown
  misc_feature (733)..(733): "n" may be a, t, c, g, other or unknown
ctgtggatttcttggctggggacaggccccgggcagtgcctgctgctgttttcatggtcctcctgagctccctgtgtttgctgctccccgacgaggacgcattgcccttcctgactctcgcctcagcacccagccaagatgggaaaactgaggctccaagaggggcctggaagatactgggactgttctattatgctgccctctactaccctctggctgcctgtgccacggctggccacacagctgcacacctgctcggcagcacgctgtcctgggcccaccttggggtccaggtctggcagagggcagagtgtccccaggtgcccaagatctacaagtactactccctgctggcctccctgcctctcctgctgggcctcggattcctgagcctttggtaccctgtgcagctggtgagaagcttcagccgtaggacaggagcaggctccaaggggctgcagagcagctactctgaggaatatctgaggaacctcctttgcaggaagaagctgggaagcagctaccacacctccaagcatggcttcctgtcctgggcccgcgtctgcttgagacactgcatctacactccacagccaggattccatctcccgctgaaactggtgctttcagctacactgacagggacggccatttaccaggtggccctgctgctgctggtgggcgtggtacccactattcanaangtgaaggcaggggtcaccacggatgtctnctactg

SEQ ID NO: 2256 - DNA, 785 bp, Homo sapiens
  misc_feature (702)..(702): "n" may be a, t, c, g, other or unknown
  misc_feature (730)..(730): "n" may be a, t, c, g, other or unknown
  misc_feature (780)..(780): "n" may be a, t, c, g, other or unknown
agaccccgaattcacagcaagcatggaaagcaaaatctgccccttcaccatcgccattttcctaaagtacagtaatgatcccgtcgtcgcctcactggctcaggacatcttcaaggagctgtcccagattgaagcctgtcagggcccaatgcaaatgaggctgattcccactctggtcagcataatgcaggccccagcagacaagattcctgcagggctttgtgcgacagccattgatatcctgacaacagtagtacgaaatacaaagcctcccctttcccagcttctcatctgccaagctttccctgctgtggcacagtgtacccttcacacagatgacaatgccaccatgcagaatggcggagagtgcttgcgggcctatgtgtcagtgaccctggaacaagtagcccagtggcatgatgagcagggccacaatggactgtggtatgtgatgcaagtggtgagccagctcctggacccccgcacctcagagttcactgcggcctttgtgggccgccttgtttccaccctcatctccaaggcagggcgggaactcggggagaatctagaccagattcttcgtgccatcctcagtaagatgcagcaggcagagacgctcagtgtcatgcagtccctgatcatggtgttcgctcatctggtgcacactcagctagaacctctcttggagttctgtgtagcctnccaggacctactggcaaacctgctctanagttgtgatggctgaatggacaagccgacagcacctggtctatggacagnatgaa

SEQ ID NO: 2257 - DNA, 863 bp, Homo sapiens
  misc_feature (742)..(742): "n" may be a, t, c, g, other or unknown
  misc_feature (851)..(851): "n" may be a, t, c, g, other or unknown
  misc_feature (863)..(863): "n" may be a, t, c, g, other or unknown
cttccgggagcctggggcccaggactgcagcggcttcggaaggtgggctctgccagcgggaccatgctgctccgagccgcttggaggcgggcggcagtggcggtgacagcggctccagggccgaagcccgcggcgcccactcgggggctgcgcctgcgcgttggagaccgtgctcctcagtctgcggttcccgcagatacagccgctgccccggaggtggggccagtgctgcgacctctctatatggatgtgcaagctacaactcctctggacccccgggtgcttgatgccatgctcccttacctaatcaactactatgggaacccacactcccggacacatgcttatggctgggagagtgaggcagccatggaacgtgctcgtcagcaagtagcatctctgattggagctgatcctcgtgagatcatttttactagtggtgctactgaatccaacaacatagcaattaagggggtggcccgattctacaggtcacggaaaaagcacttgatcaccacccagacagaacacaaatgtgtcttggactcctgccgttcactggaagctgagggctttcaggtcacctacctcccagtgcagaagagtgggatcattgacctaaaggaactagaggctgctatccagccagatactagcctggtgtcagtcatgactgtgaacaatgagattggagtgaacagcctattgcagaaatagggcggatttgcagttccagaaaggnatatttccatactgatgcaacccaagcttgttggaaaaatccacttgatgtcaatgacctgaaaattgatctcatgagcattaatggtcacaaaatctacggtcccaangggttggtgccn

SEQ ID NO: 2258 - DNA, 781 bp, Homo sapiens
  misc_feature (753)..(753): "n" may be a, t, c, g, other or unknown
  misc_feature (764)..(764): "n" may be a, t, c, g, other or unknown
  misc_feature (772)..(772): "n" may be a, t, c, g, other or unknown
tgagcgaagctcctgcacctcatcctccacccaccagagagatgggaagttctgtgactgctgctactgtgagttcttcggccacaatgcgccacccgctgccccgacgagtcggaactataccgagatccgggagaagctccgctcgaggctgaccaggcggaaagaggagctgcccatgaaggggggcaccctgggcgggatccctggggagcccgccgtggaccaccgagatgtggatgagctgctggaattcatcaacagcacggagcccaaagtccccaacagcgccagggccgccaagcgggcccggcacaagctgaaaaagaaggaaaaggagaaggcccagttggcagcagaagctctaaagcaggcaaatcgtgtttctggaagccgggagccaaggcctgccagggagaggctcttggagtggcccgaccgggaactggatcgggtcaacagcttcctgagcagccgtctgcaggagatcaaaaacactgtcaaagactccatccgtgccagcttcagtgtgtgtgagctcagcatggacagcaatggcttctctaaggagggggctgctgagcctgagcctcagagtctacccccctcaaacctcagtggctcctcagagcagcagcctgacatcaaccttgacctgtcccctttgactttgggcttcccttcagaaccacacgttacaaagcttccagggcgaagccaagcccccaaccattggggcaggaaattgaaaanggccccccaanccaaccantgggaccag

SEQ ID NO: 2259 - DNA, 775 bp, Homo sapiens
  misc_feature (690)..(690): "n" may be a, t, c, g, other or unknown
  misc_feature (729)..(729): "n" may be a, t, c, g, other or unknown
  misc_feature (755)..(755): "n" may be a, t, c, g, other or unknown
cctactaaaaaaaatgcagagaagtattccggcattttggaaggtcctgtggaccgacccgtactcagcaactattcggacacaccatcaggactagtgaacggtcggaaaaatgaaagtgaaccctggcagccttccttgaattcagaagctgtttatcccatgaactgtgttccggatgttatcactgccagcaaagctggagtcagttcagccctccctccagcagatgtctctgcgagtataggaagctctcctggggtagccagcaacctgacagaacctagttattcaagtagtacctgtggaagccacactgtacccagtcttcatgcagggctcccatctcaggaatatgccccaggatacaacggatcatatttgcattctacttatagtagccagccagcacctgcacttccttcacctcatccgtctcctttgcatagctctgggctactacagcccccaccaccacctcctccgccaccagccttggtcccaggctacaatgggacttctaacctctccagttacagctatccgtctgctagctatcctcctcagactgctgtggggtctgggtacagccctgggggggcaccgcctccgccttcagcgtacctgccttcaggaattcctgctcccacccccctaccccccaccactgttcctggctacacctaccanggccatggtttgacacctattgcaccgtcggctctgacnaacagttcaacaagttctctcaaaanggaaagctttctacatggca

SEQ ID NO: 2260 - DNA, 769 bp, Homo sapiens
  misc_feature (734)..(734): "n" may be a, t, c, g, other or unknown
  misc_feature (738)..(738): "n" may be a, t, c, g, other or unknown
  misc_feature (758)..(758): "n" may be a, t, c, g, other or unknown
gtgccccggatgtgcccagctggctcctggccccacccctcgggcctttgggctggaccagccacctctgcctgagacctccggtcgccgcaagaagctggagaggatgtacagcgttgaccgtgtgtctgacgacatccctattcgtacctggttccccaaggaaaatcttttcagcttccagacagcaaccacaactatgcaagcggtgttcaggggctacgcggagaggaagcgccggaaacgggagaatgattccgcgtctgtaatccagaggaacttccgcaaacacctgcgcatggtcggcagccggagggtgaaggcccagacgttcgctgagcggcgcgagcggagcttcagccggtcctggagcgaccccacccccatgaaagccgacacttcccacgactcccgagacagcagtgacctgcagagctcccactgcacgctggacgaggccttcgaggacctggactgggacactgagaagggcctggaggctgtggcctgcgacaccgaaggcttcgtgccaccaaaggtcatgctcatttcctccaaggtgcccaaggctgagtacatccccactatcatccgccgggatgacccctccatcatccccatcctctacgaccatgagcacgcaaccttcgaggacatccttgaggagatagagaggaagctgaacgtctaccacaagggagccaagatctggaaaatgctgattttcttgccanggangtcctggacacctctatctncttaagaacaa

SEQ ID NO: 2261 - DNA, 858 bp, Homo sapiens
  misc_feature (752)..(752): "n" may be a, t, c, g, other or unknown
  misc_feature (805)..(805): "n" may be a, t, c, g, other or unknown
  misc_feature (825)..(825): "n" may be a, t, c, g, other or unknown
  misc_feature (858)..(858): "n" may be a, t, c, g, other or unknown
atgccgacggactgtgtccggcgatgggcacgggcatttcttcgtttatagctgtctgtttgcattctgattgggaacactgggatcattttcatcatgccgacagtggtggtaatggatgtatccctttccatgacccgacctgtgtctattgaggggtccgaggaataccagcgtaagcacctagcagcccatggtttaacgatgctgtttgagcacatggccacaaattacaagcttgaatttacagcacttgtggttttttcatcactttgggagttgatggtccccttcacgagagattataataccctacaggaagcactaagtaatatggatgattatgacaaaacctgcttggagtctgcattagttggtgtttgcaatatcgttcagcaagaatggggtggtgcaattccttgccaggttgtcctggtgacagacggctgtcttggcattggtagagggtcactgcgacattccctagccactcaaaatcaacgaagtgagagcaacaggtttccactaccttttcctttcccatctaagttatatatcatgtgcatggcgaatttggaggagctccagagcaccgattccttggaatgccttgaacgtctcatatatttaaacaatggtgaagggcagatttttactattgatggccccctgtgcttgaagaatgtacagtctatgtttggaaaactgatagattggcatatacgcctttccatgctggtctcaagtgtggncacctaactgctgatgtacaagtctttcccaggcccagaaccttttggtgganatgaagaaattgatcctatnccttaaagcatttaccccagatttgggaaatan

SEQ ID NO: 2262 - DNA, 833 bp, Homo sapiens
  misc_feature (816)..(817): "n" may be a, t, c, g, other or unknown
  misc_feature (826)..(826): "n" may be a, t, c, g, other or unknown
aaaaaaaaaaaaaaaaaaaacataacaagtatgaaaacaggtgagcttgagaaagaaacagcccctttgaggaaagatgcagatagttcaatatcagtcttagagatccatagtcaaaaagcacaaatagaggaacccgatcctccagaaatggaaacttctcttgattcttctgagatggcaaaagatctctcttcaaaaacagctttatcttccaccgagtcgtgtaccatgaaaggtgaagagaagtctcccaaaactaagaaggataagcgcccaccaatcctagaatgtcttgaaaagttagagaagtccaaaaagacttttcttgataaggacgcacaaagattgagtccaataccagaagaagttccaaagagtactctagagtcagaaaagcctggctctcctgaggcagctgaaacttctccaccatctaatatcattgaccactgtgagaaactagcctcagaaaaagaagtggtagaatgccagagtacaagtactgttggtggccagtctgtgaaaaaagtagacctagaaaccctaaaagaggattctgagttcacaaaggtagaaatggataatctggacaatgcccagacctctggcatagaggagccttctgagacaaagggttctatgcaaaaaagcaaattcaaatataagttggttcctgaagaagaaaccctgcctcagaaaatacagagataacctctgaaaggcagaaagagggcatcaaattaacaatcaggatatcaagtcggaaaaagaacccgattcttcccccaaagttctagaacccgaaaaccagcnngaagaagancggaaaa

SEQ ID NO: 2263 - DNA, 812 bp, Homo sapiens
  misc_feature (750)..(750): "n" may be a, t, c, g, other or unknown
  misc_feature (793)..(793): "n" may be a, t, c, g, other or unknown
  misc_feature (799)..(799): "n" may be a, t, c, g, other or unknown
gagcttgtccagacgaagcctcgcagggatgggttggagcctgggccgtgcttcgctcaggcagcgtttgaggcagacccagcagggtcctcctggggccttcctgcctttgaactgcggtggcgggcgggcgcacggtctcctgtacgccctagactaggggccgccatctccatggccacggccgtgagccggccctgcgccggcaggtcgcgggacatactgtggcgcgttttgggctggaggatagttgcaagtattgtttggtcagtgctatttctacccatctgcaccacagtatttataattttcagcaggattgatttgtttcatcctatacagtggctgtctgattctttcagtgacctgtatagttcctatgtaatcttttacttcctgctgctgtcagtggtaataataataataagtattttcaatgtggagttctatgcagttgtgccttctattccttgctccagactagctctgatagggaagatcattcatcctcagcaactcatgcactcatttattcatgctgcaatgggaatggtgatggcctggtgtgctgcagtgataacccagggccagtacagctttcttgtggtccctgcactggtactaacagctttggtagccctgctgcgcaaacctgcttaaatgaatatcatctttttttcctactgactggagcatttatgggctatagctatagcctcctggattttggtaacaacatgaactatcttncatttcccatcatacagcaatacaagtcttgcgtttaagaaanctctgntcttatagttaac

SEQ ID NO: 2264 - DNA, 757 bp, Homo sapiens
  misc_feature (717)..(717): "n" may be a, t, c, g, other or unknown
  misc_feature (755)..(755): "n" may be a, t, c, g, other or unknown
  misc_feature (757)..(757): "n" may be a, t, c, g, other or unknown
gttgcctagaatgcggtgagcgctgtgcacgggctgctgacctccgagcgcacaggcgcacgcatgctggccagaccctctacatctgcagtgagtgcggacaaagcttccgccacagcggccgtcttgacctacacttgggcgcacaccggcagcgatgccgcacttgcccctgccgcacatgcggccggcgcttcccgcacctcccggcgctgctgctacaccggcgccgccagcatctgccagagcggccccgccgctgcccgctgtgcgcccgcaccttccggcagagcgcgctgctcttccaccaggcgcgggcgcaccccttggggacaacctctgaccctgctgccccaccccaccgctgcgcgcagtgcccgcgagccttccgaagcggcgccgggctgcggagtcacgcgcgcatccacgtgtcccggagccccacgcgaccccgtgtctcagacgcccaccagtgtggcgtgtgcggcaagtgctttggcaagagctctacgctgacgcgacacctgcagacgcactcgggggagaaacccttcaagtgcccggagtgtggcaagggcttcctggagagcgccacgctggtgcgccaccagcgcacacacacgggcgagaagccgtacgcatgtggcgactgtggacgctgcttcagcgagagttcacgctgctgcgccatcggcgcagccatcagggcgaagcggncacatgcgtgcgccactttgcgggaaagggtttcgggnan

SEQ ID NO: 2265 - DNA, 851 bp, Homo sapiens
  misc_feature (720)..(720): "n" may be a, t, c, g, other or unknown
  misc_feature (783)..(783): "n" may be a, t, c, g, other or unknown
  misc_feature (789)..(789): "n" may be a, t, c, g, other or unknown
  misc_feature (833)..(833): "n" may be a, t, c, g, other or unknown
tacgttgtgcaatgccagttttaaatactaatataagtgcactgatctcatatgtggaatcacagaaattatgcaatttgtacttcatagcttatacatgcatatagattttgtttttaccagaaccacgctggtaaaaacagatgctgcacaaagtgaacttgcccgttttcatcgcactttacgtgcacgaattctacctctactctcgacctgggactcaccgatgcgtgaggaaggactgaaaagcaaaagaactatggactggccttttggcatgatcaggtgtctaatataaagaagtgcatgaataagaaaatatatgatatgagtgatggttaatactgactgtcaacttgattggattgaaggatgcaaagtattgatcctgggtgtgtctgtgagggtgttgccaaaggagattaacatttgagtcagtgggctgggaaagttcgacccactgttaatctagatggacaccatctaatcagatgccagtgcagctagaaatgtaaagcagacagaaaaatgcgaaaagagagactggcctagcctgccagcctacatctttctcccacgctggatgcttcctgccctcgaacatcagactccaagttcttcagtttgggacttggactggctctccttggtcctcagcttgaagactgcccattgtgggacttgtgatcatgtgctcaggaagtatgtgtggacttttgncatgggttgaatagtgtccctcgcaaagttcacgtccacatggaacccgtgaatgtgacccgntgtggnttgaatgcttctggcaaaacttaatccccatgcaccattccaangaaatagggtctttagga

SEQ ID NO: 2266 - DNA, 815 bp, Homo sapiens
  misc_feature (743)..(743): "n" may be a, t, c, g, other or unknown
  misc_feature (754)..(754): "n" may be a, t, c, g, other or unknown
  misc_feature (797)..(797): "n" may be a, t, c, g, other or unknown
agtcgctcctaacgctccctggcccggccggggccgcgcagttagggcatctgaggcggggagaagcggcggggagacgccggctgccagcatgtcgctgcctccggagaaagcctccgagctgaagcagctcatccaccagcagctgagcaagatggatgtccatggtagaataagagaaatccttgctgagactatacgggaagaattggcacctgatcaacagcatttatcaacagaagatttgatcaaagcccttagacgtcgaggaatcattgacgatgtgatgaaagaacttaattttgttactgacagtgttgagcaagaactcccttcctctccaaaacaacctatttgttttgatagacaatcgacattaaaaaaaactaatattgatccaacacggaggtatctttaccttcaggttttgggtggaaaagctttcttggaacatctgcaagaacctgagcctttacctggacaagtttgttcaacgtttactttatgtttacattatcgaaaccaacgttttcgttctaaacctgttccatgtgcctgtgaaccagattttcatgatggctttttacttgaagtacacagagaaagcttgggtgatggaactagaatggctgattcaacaacaatgttatcaataagtgatccaattcatatgggctaatcaaaacagacatatttggtgagacgactttagtagcatcatattttctggaatggcgatcggntttgggctcanaaaatggagtgccagtctgactgtggacttatgggtgtaggcncagaatcaaaagtttctg

SEQ ID NO: 2267 - DNA, 790 bp, Homo sapiens
  misc_feature (723)..(723): "n" may be a, t, c, g, other or unknown
  misc_feature (749)..(749): "n" may be a, t, c, g, other or unknown
  misc_feature (777)..(777): "n" may be a, t, c, g, other or unknown
atccgggcccttccagaagcaacccaggagccccgagacctgcagggatgtgtgcaccctgacccctgacgcatagccctgcacctgcagccagctggcctcgggcttgaaaacatggcgggtgcgctccaattcacggtggtttccaagcgcattctggaggagaaaacacatgagtgtgtggtcagggttctctgccgacagacctaccgtggggaagaaagagaagttctgaagatggatcatggccgtgactgcatgtcaaggagaatctccatgatgacacggaggcctacgtcgagatagagtaaatatggtccaattaaaaggtgacccgacaatcaacccctgaaaaaggcggtcataaaacccccaggagacgaagatgatggcacgtcgtgaccccaaacctggggcaaagagactggtgagagcccagaccctccagaagcagcggagggccccagttgggccaagggctcccccgcccgatgaagaagatcccaggctcaagtgcaaaaactgtgaggcctttggccacacggccagaagtaccaggtgccccatgaagtgctggaaggcagccctggttccaccgaactttggggaaaaggaagggaaggaaaacctgaaaccatggaagccccaggttgaagcgaaccctggcccttgaacaaggataagggagagaaggaagagagaccaaggccacaagacccgcanaggaaggctcttcttcacatattttncgggaaaccttcagagaacccgttgccnaatcaaaaaggat

SEQ ID NO: 2268 - DNA, 694 bp, Homo sapiens
  misc_feature (607)..(607): "n" may be a, t, c, g, other or unknown
  misc_feature (644)..(644): "n" may be a, t, c, g, other or unknown
  misc_feature (656)..(656): "n" may be a, t, c, g, other or unknown
tctctttaatgatggagggaagcaggcagacgcgagtgtctcggccatacaagatcagcgaatcatcaaaggtataccgctgggccgaccactcaagcacggtgctgcagcggctgaacgagcagcgtctccgcgggctcttctgcgacgtcgtcctggtggccgatgagcagcgtgtgccagcccatcgcaacctgctggccgtgtgcagcgactacttcaactccatgttcaccatcggcatgcgggaagctttccagaaggaggtggagctgatcggcgcctcctacattgggctcaaggccgtggtggacttcctgtacggcggggagctggtgctggatggcggcaacattgactacgtcctggagacggctcacctgctgcagatctggacggtggtagacttctgctgtgagtacctggagcaggaggtgagcgaggacaactacctgtacctgcaggagctggcctccatctacagcctcaagcggcttgatgccttcatcgatggcttcatcctgaaccacttcggcacgctgtcctttacgcccgacttcctgcagaacgtctccatgcagaagctgtgtgtctacctgagcagcancgaggtgcagcgggagtgtgagcacgaccttctgcangccgccctgcantggctgacgcaacagcccgagcgcgaggcccacgcccg

SEQ ID NO: 2269 - DNA, 776 bp, Homo sapiens
  misc_feature (744)..(744): "n" may be a, t, c, g, other or unknown
  misc_feature (755)..(755): "n" may be a, t, c, g, other or unknown
  misc_feature (763)..(763): "n" may be a, t, c, g, other or unknown
gtcaccaggacaacgggcgtcgccggcgccgtgtgacttcgggctgtgggctcgctcgcggctcttcggccatggttttctcaaacaatgatgaaggccttattaacaaaaagttacccaaagaacttctgttaagaatattttccttcttggatatagtaactttgtgccgatgtgcacagatttccaaggcttggaacatcttagccctggatggaagcaactggcaaagaatagatctttttaactttcaaacagatgtagagggtcgagtggtggaaaatatctcgaagcgatgcggtggattcctgaggaagctcagcttgcgaggctgcattggtgttggggattcctccttgaagacctttgcacagaactgccgaaacattgaacatttgaacctcaatggatgcacaaaaatcactgacagcacgtgttatagccttagcagattctgttccaagctgaaacatctggatctgacctcctgtgtgtctattacaaacagctccttgaaggggatcagtgagggctgccgaaacctggagtacctgaacctctcttggtgtgatcagatcacgaaggatggcatcgaggcactggtgcgaggttgtcgaggcctgaaagccctgcccctgaggggctgcacacagttagaagatgaagctctgaaacacattcagaattactggcatgagcttgtgagcctcaacttgcagtcctgctcacgtatcacggatgaangtgtggtgcanatatgcangggctggcaccgg

SEQ ID NO: 2270 - DNA, 796 bp, Homo sapiens
  misc_feature (726)..(726): "n" may be a, t, c, g, other or unknown
  misc_feature (775)..(775): "n" may be a, t, c, g, other or unknown
  misc_feature (785)..(785): "n" may be a, t, c, g, other or unknown
gacttcttcgggtggtccccgtccgccctcctcgtccctacccagtttcttgcttccctgccccatctccgccgctccccgcagcctccgccgagcgccatggctcctaggaagggcagtagtcgggtggccaagaccaactccttacggaggcggaagctcgcctcctttctgaaagacttcgaccgtgaagtggaaatacgaatcaagcaaattgagtcagacaggcagaacctcctcaaggaggtggataacctctacaacatcgagatcctgcggctccccaaggctctgcgcgagatgaactggcttgactacttcgcccttggaggaaacaaacaggccctggaagaggcggcaacagctgacctggatatcaccgaaataaacaaactaacagcagaagctattcagacacccctgaaatctgccaaaacacgaaaggtaatacaggtagatgaaatgatagtggaagaggaagaagaagaagaaaatgaacgtaagaatcttcaaactgcaagagtcaaaaggtgtcctccatccaagaagagaactcagtccatacaaggaaaaggaaaagggaaaaggtcaagccgtgctaacactgttaccccagccgtgggccgattggaggtgtccatggtcaaaccaactccaggcctgacacccaggtttgactcaagggtcttcaagacccctggcctgcgtactccagcagcaggagancggatttacaacatcttaagggaatggcaagcccttttgcttgacagcnaaagagatcnttccttaattg

SEQ ID NO: 2271 - DNA, 826 bp, Homo sapiens
  misc_feature (699)..(699): "n" may be a, t, c, g, other or unknown
  misc_feature (703)..(703): "n" may be a, t, c, g, other or unknown
  misc_feature (789)..(789): "n" may be a, t, c, g, other or unknown
  misc_feature (817)..(817): "n" may be a, t, c, g, other or unknown
  misc_feature (820)..(820): "n" may be a, t, c, g, other or unknown
attccgctactgcgcaaagatggtggaggaggagaacatccgcgtggttcgttgtggcggcagcgagttgaactttaggagagctgtgttctctgcagattctaagtatatcttctgtgtctctggagactttgttaaagtttacagcacagttacagaagagtgtgtacacatactgcatggacacagaaatctggtgactggaatccagcttaaccccaacaaccatctacagctgtattcttgttcccttgatggcacaattaaactgtgggactatatagatggcatcttaataaagactttcatagttggatgtaaacttcatgccctctttactcttgcccaagctgaggattctgtctttgttatagtgaataaagaaaaaccagatatatttcagctggtttcagtgaaactgccaaaatcctcaagccaggaagtagaagccaaggagctgtcctttgttttggattacataaaccagtcacccaagtgcattgcctttggaaacgagggagtatatgttgctgcagtacgggaattttacttgtctgtttattttttcaaaaagaaaacaacatcaaggtttactttatcatcatcaagaaataagaagcatgctaaaaacaattttacgtgtgtagcatgtcacccaacggaagactgcatcgcatctgggcacatggatggcaaaantcgnctttggaggaaattttatgatgatagaaatatacgtacccatgtttacattggcaccatgatatgggtatggatttggcttttcantgacaggcacaatcttcttaatggcggncgngaactg

SEQ ID NO: 2272 - DNA, 767 bp, Homo sapiens
  misc_feature (717)..(717): "n" may be a, t, c, g, other or unknown
  misc_feature (752)..(752): "n" may be a, t, c, g, other or unknown
  misc_feature (754)..(754): "n" may be a, t, c, g, other or unknown
agagctcggcatgggtgactccaccagccagtcccccccaattaagaggtcatgcccagatgtgcagatctcatggaaccaagggattgacttgtggtggcatgagctcatgcaagaggcaggggatgagtgtgagcccgagtggtgtgatgccgaggacccactcttcatcctgtacaccagtggctccacaggcaaacccaagggtgtggttcacacagttgggggctacatgctctatgtagccacaaccttcaagtatgtgtttgacttccatgcagaggatgtgttctggtgcacggcagacattggttggatcactggtcattcctacgtcacctatgggccactggccaatggtgccaccagtgttttgtttgaggggattcccacatatccggacgtgaaccgcctgtggagcattgtggacaaatacaaggtgaccaagttctacacagcacccacagccatccgtctgctcatgaagtttggagatgagcctgtcaccaagcatagccgggcatccttgcaggtgttaggcacagtgggtgaacccatcaaccctgaggcctggctatggtaccaccgggtggtaggtgcccagcgctgccccatcgtggacaccttctggcaaacagagacaggtggccacatgttgactccccttcctggtgccacacccatgaaacccggttctgctactttccattctttggngtagcttctgcaatcctgaatgaattccggggaanantttggaaggtgaa

SEQ ID NO: 2273 - DNA, 804 bp, Homo sapiens
  misc_feature (684)..(684): "n" may be a, t, c, g, other or unknown
  misc_feature (723)..(723): "n" may be a, t, c, g, other or unknown
  misc_feature (753)..(753): "n" may be a, t, c, g, other or unknown
  misc_feature (799)..(799): "n" may be a, t, c, g, other or unknown
tacgaagcgagcttgggaggagcagcggcctgcggggcagaggagcatcccgtctaccaggtcccaagcggcgtggcccgcgggtcatggccaaaggagaaggcgccgagagcggctccgcggcggggctgctacccaccagcatcctccaaagcactgaacgcccggcccaggtgaagaaagaaccgaaaaagaagaaacaacagttgtctgtttgcaacaagctttgctatgcacttgggggagccccctaccaggtgacgggctgtgccctgggtttcttccttcagatctacctattggatgtggctcaggtgggccctttctctgcctccatcatcctgtttgtgggccgagcctgggatgccatcacagaccccctggtgggcctctgcatcagcaaatccccctggacctgcctgggtcgccttatgccctggatcatcttctccacgcccctggccgtcattgcctacttcctcatctggttcgtgcccgacttctcacacggccagacctattggtacctgcttttctattgcctctttgaaacaatggtcacgtgtttccatgttccctactcggctctcaccatgttcatcagcaccgagcagactgagcgggattctgcaccgctatcggatgactgtggaagtgctgggcacagtgctgggcacggcgatncaaggacaaatcgtgggccaagcagacacgccttggttncaggacctcaatagctctacaggtagcttnacaaaatggccaaccatacacatgggaccacttacacaggggaacnccaaa

SEQ ID NO: 2274 - DNA, 755 bp, Homo sapiens
  misc_feature (712)..(712): "n" may be a, t, c, g, other or unknown
  misc_feature (720)..(720): "n" may be a, t, c, g, other or unknown
  misc_feature (725)..(725): "n" may be a, t, c, g, other or unknown
attggcgtccgagcgacttctaggagcctggggttcggcgctatggaggagctcgatggcgagccaacagtcactttgattccaggcgtgaattccaagaagaaccaaatgtattttgactggggtccaggggagatgctggtatgtgaaacctccttcaacaaaaaagaaaaatcagagatggtgccaagttgcccctttatctatatcatccgtaaggatgtagatgtttactctcaaatcttgagaaaactcttcaatgaatcccatggaatctttctgggcctccagagaattgacgaagagttgactggaaaatccagaaaatctcaattggttcgagtgagtaaaaactaccgatcagtcatcagagcatgtatggaggaaatgcaccaggttgcaattgctgctaaagatccagccaatggccgccagttcagcagccaggtctccattttgtcagcaatggagctcatctggaacctgtgtgagattctttttattgaagtggccccagctggccctctcctcctccatctccttgactgggtccggctccatgtgtgcgaggtggacagtttgtcggcagatgttctgggcagtgagaatccaagcaaacatgacagcttctggaacttggtgaccatcttggtgctgcagggccggctggatgaagcccgacagatgctcttcaaggaagcccgatgccagncccgcctntgcangcatatgccgaatcatgggggacctgatga

SEQ ID NO: 2275 - DNA, 727 bp, Homo sapiens
  misc_feature (700)..(700): "n" may be a, t, c, g, other or unknown
  misc_feature (710)..(710): "n" may be a, t, c, g, other or unknown
  misc_feature (712)..(712): "n" may be a, t, c, g, other or unknown
aagaatgccgactacttctccaactatgtcacagaggactttaccacctacattaacaggaagcggaaaaacaattgccatggcaaccacattgagatgcaggccatggcagagatgtacaaccgtcctgtggaggtgtaccagtacagcacaggtacttctgcagtggaacccatcaacacattccatgggatacatcaaaacgaggacgaacccattcgtgttagctaccatcggaatatccactataattcagtggtgaatcctaacaaggccaccattggtgtggggctgggcctgccatcattcaaaccagggtttgcagagcagtctctgatgaagaatgccataaaaacatcggaggagtcatggattgaacagcagatgctagaagacaagaaacgggccacagactgggaggccacaaatgaagccatcgaggagcaggtggctcgggaatcctacctgcagtggttgcgggatcaggagaaacaggctcgccaggtccgaggccccagccagccccggaaagccagcgccacatgcagttcggccacagcagcagcctccagtggcctggaggagtggactagccggtccccgcggcagcggagttcagcctcgtcacctgagcaccctgagctgcatgctgaattgggcatgaagccccctttcccaggcactggtttaactcttgccnaaccttcttngnccttgtgcgccaggt

SEQ ID NO: 2276 - DNA, 805 bp, Homo sapiens
  misc_feature (750)..(750): "n" may be a, t, c, g, other or unknown
  misc_feature (770)..(770): "n" may be a, t, c, g, other or unknown
  misc_feature (775)..(775): "n" may be a, t, c, g, other or unknown
atttttttgaaaacaagaacagtgatgaaatcaacatacctcgactcattgtcagtcaactaaaatggcttgacagagttgtggatggcaaggacctcaccaccaagatcatgcagctgatcagtattgctccagagaacctgcagcatgacatcatcaccagcctacctgagatcctaggggattcccagcacgctgatgtggggaaagaactcagtgacctactgatagagaatacttcactcactgtcccaatcctggatgtcctttcaagcctccgacttgacccagacttcctattgaaggttcgccagttggtgatggataagttgtcgtctattagattggaggatttacctgtgataataaagttcattcttcattccgtaacagccatggatacacttgaggtaatttctgagcttcgggagaagttggatctgcagcattgtgttttgccatcacggttacaggcttcccaagtaaagttgaaaagtaaaggacgagcaagttcctcaggaaatcaagaaagcagcggtcagagctgtattattctcctctttgatgtaataaagtcagctattagatatgagaaaaccatttcagaagcctggattaaggcaattgaaaacactgcctcagtatctgaacacaaggtgtttgacctggtgatgcttttcatcatctatagcaccaatactcagaccaagaagtacattgacagggtgctaagaaataagattcgatcangctgcattcaagacagctgnttcanaatcattctctggcattacttaattcttaa

SEQ ID NO: 2277 - DNA, 746 bp, Homo sapiens
  misc_feature (692)..(692): "n" may be a, t, c, g, other or unknown
  misc_feature (706)..(706): "n" may be a, t, c, g, other or unknown
  misc_feature (733)..(733): "n" may be a, t, c, g, other or unknown
gactaatgactgtccgaaacatcgcctccatctgtaatatgggcaccaatgcctctgctctggaaaaagacattggtccagagcagtttccaatcaatgaacactatttcggattggtcaattttggaaacacatgctactgtaactccgtgcttcaggcattgtacttctgccgtccattccgggagaatgtgttggcatacaaggcccagcaaaagaagaaggaaaacttgctgacgtgcctggcggaccttttccacagcattgccacacagaagaagaaggttggcgtcatcccaccaaagaagttcatttcaaggctgagaaaagagaatgatctctttgataactacatgcagcaggatgctcatgaatttttaaattatttgctaaacactattgcggacatccttcaggaggagaagaaacaggaaaaacaaaatggaaaattaaaaaatggcaacatgaacgaacctgcggaaaataataaaccagaactcacctgggtccatgagatttttcagggaacgcttaccaatgaaactcgatgcttgaactgtgaaactgttagtagcaaagatgaagattttcttgacctttctgttgatgtggagcagaatacatccattacccactgtctaagagacttcagcaacacagaaacactgtgtagtgaacaaaaatattattgngaaacatgctgcancaaacaagaagcccagaaaaggatganggtaaaaaagctg

SEQ ID NO: 2278 - DNA, 817 bp, Homo sapiens
  misc_feature (695)..(695): "n" may be a, t, c, g, other or unknown
  misc_feature (724)..(724): "n" may be a, t, c, g, other or unknown
  misc_feature (765)..(765): "n" may be a, t, c, g, other or unknown
  misc_feature (804)..(804): "n" may be a, t, c, g, other or unknown
atttgaacaaatcactaagactcatggaacaattattggcattacttcagggattgtcttggtccttctcattatttctattttagtacaagtgaaacagcctcgaaaaaaggtcatggcttgcaaaaccgcttttaataaaaccgggttccaagaagtgtttgatcctcctcattatgaactgttttcactaagggacaaagagatttctgcagacctggcagacttgtcggaagaattggacaactaccagaagatgcggcgctcctccaccgcctcccgctgcatccacgaccaccactgtgggtcgcaggcctccagcgtcaaacaaagcaggaccaacctcagttccatggaacttcctttccgaaatgactttgcacaaccacagccaatgaaaacatttaatagcaccttcaagaaaagtagttacactttcaaacagggacatgagtgccctgagcaggccctggaagaccgagtaatggaggagattccctgtgaaatttatgtcagggggcgagaagattctgcacaagcatccatatccattgacttctaatcttctgctaatggtgatgtgaattcttagggtgtgtacgtacgcagccttcagggcaccatactgtttccagcagccaacccttttctcccatcacaactacgaagaccttgatttaccggtaacctattgnatggggatggttttattctctcaggcagnctatatatggtaaacccatcaaggaacttactctattcagnggaaaccataatcatctctattgcttgggggcatttatnggaagccctggcc

SEQ ID NO: 2279 - DNA, 718 bp, Homo sapiens
  misc_feature (683)..(683): "n" may be a, t, c, g, other or unknown
  misc_feature (692)..(692): "n" may be a, t, c, g, other or unknown
  misc_feature (711)..(711): "n" may be a, t, c, g, other or unknown
gttaaactcgtcatttcctccagctagaggagctcaactgatctgttttctttcgcccagccaaaatcacagaatgaaggcggtgaagagcgaacgggagcgagggagccggcgaagacaccgggacggggacgtggtgctgccggcgggggtggtagtgaagcaggagcgtctcagcccagaagtcgcacctcccgcccaccgccgtccggaccactccggtggtagcccgtctccgccgaccagcgagccggcccgctcgggccaccgcgggaaccgagcccgaggagttagccggtccccacccaaaaagaaaaacaaggcctcagggagaagaagcaagtctcctcgcagtaagagaaaccgaagtcctcaccactcaacagtcaaagtgaagcaggagcgtgaggatcatccccggagaggacgggaggatcggcagcacagggaaccatcagaacaggaacacaggagagctaggaacagtgaccgggacagacaccggggccattcccaccaaaggagaacgtctaacgagaggcctgggagtgggcagggtcagggacgggatcgagacactcagaacctgcaggctcaggaagaagagcgggagttttataatgccaggcgacgggagcatcgccagaggaatgacgttggtggtggccggcagtgagtctcangagtttggntccttgggccttggtgggnaccaacc

SEQ ID NO: 2280 - DNA, 741 bp, Homo sapiens
  misc_feature (659)..(659): "n" may be a, t, c, g, other or unknown
  misc_feature (727)..(727): "n" may be a, t, c, g, other or unknown
  misc_feature (737)..(737): "n" may be a, t, c, g, other or unknown
ccacagcaagaagtccaaggccgagcagagcccagtctcgtccgatgtggaggtgtcttccccgaagcggcagcggctctcagcaagcgccaactccatctccaatggggagtatccttgcaatcaatgcgacctcaagttctccaactttgagagcttccagacccacctgaagctgcacctggagctgctgctgcggaagcaagcgtgcccccagtgcaaagaggactttgactcccaggagtccctcctgcagcacctgacagtgcattacatgaccacgtcgacccactatgtgtgcgagagctgcgacaagcaattttcctcggtggatgacctgcagaagcacctgctggacatgcacacctttgtgttgtaccactgcaccctgtgtcaggaggtcttcgactccaaggtgtccatccaggtgcacctggcggtgaagcacagcaatgagaagaagatgtaccgctgcacggcctgcaactgggacttccgcaaggaggctgacctgcaggtgcacgtcaaacacagccacctgggcaacccggccaaggctcacaagtgcatcttctgtggggagaccttcagcaccgaggtggagctgcagtgccacataccacacacagcaagaagtataactgtaagttctgcacaanggccttcacgccatcatcctgctggagaagcaccttgcgggagaagcactgtgtgttgatgctgcgancgagaacggnacgg

SEQ ID NO: 2281 - DNA, 799 bp, Homo sapiens
  misc_feature (543)..(543): "n" may be a, t, c, g, other or unknown
  misc_feature (670)..(670): "n" may be a, t, c, g, other or unknown
  misc_feature (768)..(768): "n" may be a, t, c, g, other or unknown
  misc_feature (786)..(787): "n" may be a, t, c, g, other or unknown
gagtgggtttcagactttctctcaggatttccgctggcttcaggttccggtcaggcgtcgggacagagcctgatccaggcttcggcggccggtggcagctctcgatcagctctcgcagtcggagaggcggctaaggaaaggtgccacagcagagacgcgaaggagaggccctagaaccttttcaaagaagaatggaagaaaccatgaagcttgctacgatggaagacacagtggagtactgcctgttcctgataccagatgagtcaagggactcagataaacataaagagattcttcagaagtacattgagagaataatcactcggtttgcacctatgctggtcccctacatctggcagaatcagcctttcaatcttaaatataaacctgggaaaggaggtgttcctgctcatatgtttggcgtgacaaagtttggggataacattgaggatgaatggtttattgtttatgtaataaagcagatcacaaaggaatttccagagttagtagcaaggattgaagacaatgatggtgaattcttgntaatagaagctgctgactttctccctaaatggctggatcctgaaaatagcaccaatagggtatttttctgccatggggaattgggtattatccctgcaccaagaaaatctggagcagaatcttgggntacccaccacacccccacaatttcacaagcattgaatataatcacagcacattcagaaaaaatcttgcttcagaatctataccaactgctgtgaatangcgcatcagaggttcccnngaaaaattcagg

SEQ ID NO: 2282 - DNA, 775 bp, Homo sapiens
  misc_feature (5)..(5): "n" may be a, t, c, g, other or unknown
  misc_feature (74)..(74): "n" may be a, t, c, g, other or unknown
  misc_feature (100)..(100): "n" may be a, t, c, g, other or unknown
  misc_feature (529)..(529): "n" may be a, t, c, g, other or unknown
  misc_feature (677)..(677): "n" may be a, t, c, g, other or unknown
  misc_feature (708)..(708): "n" may be a, t, c, g, other or unknown
  misc_feature (759)..(759): "n" may be a, t, c, g, other or unknown
gcagngactctgggaaatccttcattaatcattcacaccttcagggacatttaagaactcacaatggagaaagnctccatgaatggaaggaatgtggganaggctttattcactccacagaccttgctgtgcgtatacaaactcacaggtcacaaaaaccctacaaatgtaaggaatgtggaaaaggatttagatattctgcataccttaatattcacatgggaacccacactggagacaatccctatgagtgtaaggagtgtgggaaagccttcaccaggtcttgtcaacttactcagcacagaaaaactcacactggagagaaaccttataaatgtaaggattgtgggagagccttcactgtttcctcttgcttaagtcaacatatgaaaatccatgtgggtgagaagccttatgaatgcaaggaatgtgggatagccttcactagatcttctcaacttactgaacatttaaaaactcacactgcaaaggatccctttgaatgtaagatatgtggaaaatcctttanaaattcctcatgcctcagtgatcactttcgaattcacactggaataaaaccctataaatgtaaggattgtgggaaagccttcactcagaactcagaccttactaagcatgcacgaactcacagtggagagaggccctatgaatgtaangaatgtggaaaggcctttgccagatcctctngccttaatgaacatacaaggactcacacttggagagaagccttttgaatgngtcaaatgtgggaaag

SEQ ID NO: 2283 - DNA, 748 bp, Homo sapiens
  misc_feature (597)..(597): "n" may be a, t, c, g, other or unknown
  misc_feature (714)..(714): "n" may be a, t, c, g, other or unknown
  misc_feature (724)..(724): "n" may be a, t, c, g, other or unknown
  misc_feature (736)..(736): "n" may be a, t, c, g, other or unknown
aaaggaccatctctttaggatatatttttaaattctttgaaacacataaccaaaatggtttgattcactgactgactttgaagctgcatctgccagttacaccccaaatggctttaatcccctctcgggtctggttgccttttgcagtttgggttgtggactcagctcctgtgaggggtctggttaggagagagccatttttaaggacagggagttttatagcccttttctactttcctcccctcctcccagtccttatcaatcttttttcctttttcctgaccccctccttctggaggcagttgggagctatccttgtttatgcctcactattggcagaaaagaccccatttaaaacccagagaacactggagggggatgctctagttggttctgtgtccattttcctctgtgccaaagacagacagacagaggctgagagaggctgttcctgaatcaaagcaatagccagctttcgacacatacctggctgtctgaggaggaaggcctcctggaaactgggagctaagggcgaggcccttcccttcagaggctcctgggggattagggtgtggtgtttgccaagccaaggggtanggagccgagaaattggtctgtcggctcctggttgcactttggggaaggagaggaagtttggggctccaggtagctccctgttgtgggactgctctgtcccctgcccctactggaganatagcactgnccagttcccttnagcctggcagac

SEQ ID NO: 2284 - DNA, 874 bp, Homo sapiens
  misc_feature (860)..(860): "n" may be a, t, c, g, other or unknown
aaaatcatggattcagaataaacgtgaacagattaagaatttcttgtcaaaacgggtgctgataatgtattttttcagtaagcacccagaggcctccattcaggctgttttttcagatgcccaaatgcatatttgggcattagaaggtctgtcgcacttagtagcagcatcatttacagaggatagatttggagttgtccagacgacactaccagctatccttaatactttgttgacactgcaagaggcagtcgacaagtactttaagcttcctcatgcttccagtaaaccaccccggatttcaggaagccttgtggacacttcatataaaacattaagatttgcattcagagcatcactgaaaactgccatctatcgaataactactacatttggtgaacatctgaatgctgtgcaagcatctgcagaacatcagaaaagacttcaacagttcttggagttcaaagaatagtcaagtaatataaactgtgttcattacactgctgatacaactacagatgggacagtaaatgttcagcattcttggatcagaagaaaacggactaattagatgcttcctttgtcgtggtggttgctttgaaaactatactttaatgggagaaatcatggaaagaaattctcaacagaataactgaaaactgccttttctgtaccgattgctttttgtgtgtgtggtataataaaatctttattcaattttacagaagcattgatggcagtcgaaatgtctctagctcatataacttaatagtaataactaaaaaacttttagaatttacttttgaaaggagggaagccagtctgaaatgagtatagggtgatttcatagtcttcttaantaagagttagcttt

SEQ ID NO: 2285 - DNA, 807 bp, Homo sapiens
  misc_feature (611)..(611): "n" may be a, t, c, g, other or unknown
  misc_feature (765)..(765): "n" may be a, t, c, g, other or unknown
  misc_feature (800)..(800): "n" may be a, t, c, g, other or unknown
  misc_feature (802)..(802): "n" may be a, t, c, g, other or unknown
tgcgtgtcactgaggtggccaccatgctggcctgcggcatgtgcagggagctgaggctgtttccaggtgatgctgctgtgtggagaaggttctgagatgcagtgagggaagaaaggatcctgctggggattccattgtaagcacctataatcgggaattttcatgtaacagctttgacatttaaacattctgagtttggtgccagctcagatttgattatattttattttggatgggtgtaattcacagcacagttctaatctcccaaatctttctgctttttagaatgaagtataaaatacttttctcacctgaataccaagggttggccctttagttggatcattgtcatatgacttggtagatccttgtcctcagcacctcacgtgagagaagggagtcagccagccggccccctgcttggtgctcgtgaccagctcgcaccccttctgtccacccttctctcctctcctccccactctccccaccctcctcactctccccaccctcccctcctctcctcctcactcttcccaccctccccatccccaccctccccatcctcctcttccctttccccttgccttctcctctctcccttctcttctcangcagggaggaggccatcccaagccgagattaacaggacttgacataagccattagtttgtactttgacaagtaattatgaattttggtgcttattttgcaaaggatgcttttaagatcaaaataataaccctacctaaagtctaacttcactgntatgggtcatactctttaaccttccaacagggcananagaga

SEQ ID NO: 2286 - DNA, 857 bp, Homo sapiens
  misc_feature (794)..(794): "n" may be a, t, c, g, other or unknown
  misc_feature (821)..(821): "n" may be a, t, c, g, other or unknown
  misc_feature (827)..(827): "n" may be a, t, c, g, other or unknown
accagctcccaggactgtgtctggctgatcaccgtgcccattggccatggcgtccgcctcaacctcagcctgctgcagacagagccctctggagatttcatcaccatctgggatgggccacagcaaacagcaccacggctcggcgtcttcacccggagcatggccaagaaaacagtgcagagttcatccaaccaggtcctgctcaagttccaccgtgatgcagccacaggggggatcttcgccatagctttctccggtcagtatggaagcctggcctggtgggaagggccaggctttcaagtcaaggctgagcttgactcccgtctccaccatttgcggatcatgtgaccttgagtgagttgtataacctcttggagcctcagtgtcttcagagttatgagaattaaatgtattagcctatgtgagagctctcagtgcagggttctgtaaatgcaagttttcctcctattccacactgccagggcagagaggcacagaagcccaaaccttggtgccaagtccactcattcacatcaactcactggctggatcatccctatacctgtgccccagcttatcccttagcactttctagcgggttctccttctccaaagggatctagggcttctgctgacctctcaaggagcactgtgtttttgtgcacaaatgaagatattgtgattttgagtaggaagagtatgaacaattcagagtaggtatgcctttattggcagctggtttcttctacaagtcccaagttagggatctggatatttcctcattttaatatagngggaattgctaaaaaaacttattgaanggtctntggggacttggcctatctatggaatgatgc

SEQ ID NO: 2287 - DNA, 782 bp, Homo sapiens
  misc_feature (698)..(698): "n" may be a, t, c, g, other or unknown
  misc_feature (745)..(745): "n" may be a, t, c, g, other or unknown
  misc_feature (764)..(764): "n" may be a, t, c, g, other or unknown
gaagaagaacctgcgagccgacaacgccttcatgctgctcacgcaggcgcgactcttcgatgaaccgcagctggccagcctgtgcctggagaacatcgacaaaaacactgcagacgccatcaccgcggagggcttcaccgacattgacctggacacgctggtggctgtcctggagcgcgacacactgggcatccgtgaggtgcggctgttcaatgccgttgtccgctggtccgaggccgagtgtcagcggcagcagctgcaggtgacgccagagaacaggcggaaggttctgggcaaggccctgggcctcattcgcttcccgctcatgaccatcgaggagttcgctgcaggtcccgcacagtcgggcatcctggtggaccgcgaggtggtcagcctcttcctgcacttcaccgtcaaccccaagccacgagtggagttcattgaccggccccgctgctgcctgcgtgggaaggagtgcagcatcaaccgcttccagcaggtggagagtcgctggggctacagcgggaccagtgaccgcatcaggttctcagtcaacaagcgcatcttcgtggtgggatttgggctgtatggatccatccacgggcccaccgactaccaagtgaacatccagattattcacaccgatagcaacaccgtcttgggccagaacgacacgggcttcagctgcgacggctcanccagcacctttcgcgtcatgttcaaggaacccggtggaagtgcttgnccaacgtcaactacacggncttgtggccacgcttcaa

SEQ ID NO: 2288 - DNA, 856 bp, Homo sapiens
  misc_feature (817)..(817): "n" may be a, t, c, g, other or unknown
  misc_feature (826)..(826): "n" may be a, t, c, g, other or unknown
  misc_feature (847)..(847): "n" may be a, t, c, g, other or unknown
gaggagaatgtgggagcctttggcggggaccccaagagagtgaccatctttggctcgggggctggggcctcctgtgtcagcctgttgaccctgtcccactactcagaaggtctcttccagaaggccatcattcagagcggcaccgccctgtccagctgggcagtgaactaccagccggccaagtacactcggatattggcagacaaggtcggctgcaacatgctggacaccacggacatggtagaatgcctgcggaacaagaactacaaggagctcatccagcagaccatcaccccggccacctaccacatagccttcgggccggtgatcgacggcgacgtcatcccagacgacccccagatcctgatggagcaaggcgagttcctcaactacgacatcatgctgggcgtcaaccaaggggaaggcctgaagttcgtggacggcatcgtggataacgaggacggtgtgacgcccaacgactttgacttctccgtgtccaacttcgtggacaacctttacggctaccctgaagggaaagacactttgcgggagactatcaagttcatgtacacagactgggccgataaggaaaacccggagacgcggcggaaaaccctggtggctctctttactgaccaccagtgggtggcccccgccgtggccaccggcgacctgcacgcgcagtacgggtcccccacctacttctatgccttctatcatcactgccaaagcgaaatgaagcccaactgggcagattcggcccatggtgatgaggtccctatgtcttcgggattcccatgatcggtccaccgagctntttagttgnaacttttccaagaacgacgtnatgcttaaa

SEQ ID NO: 2289 - DNA, 835 bp, Homo sapiens
  misc_feature (636)..(636): "n" may be a, t, c, g, other or unknown
  misc_feature (778)..(778): "n" may be a, t, c, g, other or unknown
  misc_feature (784)..(784): "n" may be a, t, c, g, other or unknown
  misc_feature (825)..(825): "n" may be a, t, c, g, other or unknown
ccaagtgttcaaggactatatttctaaaatggacccagcctctaccctgggactaagcactgagtccatccatggctacagcatcagccacgtgaaacgagtgttggatgcagagccccccgagatgcctccttgccgtcgaggtgtcaataacatatcagtctccctcaaaggtctgaaggagaaatgcgtcgacagcctggtgttcgagacgctgatccccaagccgatgatgcagcactacataagcctcctgctgaagcaccggcgcctcgtcctctcgggccccagcggcacgggcaagacctacctgaccaatcgcttggccgagtacctggtggagcgctctggccgtgaggtcacagagggcatcgtcagcaccttcaacatgcaccagcagtcttgcaaggatctgcaactgtatctttccaacctagccaaccagatagaccgggaaacaggaattggggatgtgcccctggtgattctattggatgacctgagtgaagcaggctccatcagtgagttggtcaatggggccctcacctgcaagtatcataaatgtccctatattataggtaccaccaatcagcctgtaaaaatgacacccaaccatggcttgcacttgagcttcangatgttgaccttctccaacaacgtggagccagccaatggcttcctggttcgttacctgaggaggaactggtagagtcagacagcgacatcaatgccaacaaggaaaactgcttcggtgctcgactgggtacccaactggggnatcatntcacaccttcttggaaccagaccttaacttctatggccttnttttttgcgg

SEQ ID NO: 2290 - DNA, 819 bp, Homo sapiens
  misc_feature (741)..(741): "n" may be a, t, c, g, other or unknown
  misc_feature (753)..(753): "n" may be a, t, c, g, other or unknown
  misc_feature (800)..(800): "n" may be a, t, c, g, other or unknown
gaagacgcgctacctgtctggatctgggcgtgaaagagaagggagcctgaagggccacacattggcaggagaagagttcatgggccttggcctcggtaatttggtgagtggcggagtggataaaagacagatggccagcttccaagaatcggttggtgagaccagctcgcagagtgtggttgtagctgtggacaggatttttactgggtctaccagactggatggaaatgcaatagttgactttgtccgctggctgtgtgctgtgtccatggatgaactggcttccccccaccatcctcgcatgttcagcttgcagaagattgtggagatatcatactacaacatgaatcggatccgaccacagtggtctcgaatatggcatgtgattggagatcacttcaataaggttggctgcaaccctaatgaagatgtggctatctttgctgttgactcattaaggcaactctccatgaagtttcttgagaagggtgaattagccaacttccgtttccagaaagattttctgaggccctttgagcatattatgaagaaaaacaggtctcccaccatccgggacatggcgatccgctgcattgcccagatggtgaactcccaggcggccaacatccgctcaggttggaagaacatctttgccgtgttccaccagcagcctctgatcatgatgggaacattgtggagctggcctttcagaccacttgccacattgtcacaactattttncacaccattttnctgcaccatcgattcctttcaaggatgcttgtgaaagtgcttatcanagttcgcctgcaacgcccg

SEQ ID NO: 2291 - DNA, 733 bp, Homo sapiens
  misc_feature (668)..(668): "n" may be a, t, c, g, other or unknown
  misc_feature (687)..(687): "n" may be a, t, c, g, other or unknown
  misc_feature (717)..(717): "n" may be a, t, c, g, other or unknown
gcactcatcagtagaagatgccacgacagccatggagctctaccggctggtggaggtgcagtgggaacagcaggaggcccgcagcctctggacctgccccgaggacagagaacctgacagcagcacagacatggaacagtacatggaggaccagtactggcccgatgacctggcccacggcagcagaggaggagccagggaggcacaggacagaaggaattgagaagggggcggggctccctggctgggcttccggtgtggccggtaggaagtgggggccaggagagcagcgggcactccttcctgggcagggtggggcaggatgcagtgagccagccccagggctagaggagttggggtcatctgttaccttgacaccctctgcacacagcatagccctctctctctccagggctgttggttctttctcctgactcctgtggttttgctaatggcactttacagactccatggagatgtcaggtggaccatcttctagggcccagcaggagtagggaatgtgccaacagactgcccaggttgccgtggccttccccaccccccagatctcctgagtcatcatgctgtgctaatgaaagggatcatatcatcctctctggggatggtgggtgggggtgtcaatatcctggagctccttaccccaactnaatgacttgggggtaaagntctcttccttttggtgcctacctcttcctncactcatttgggttca

SEQ ID NO: 2292 - DNA, 845 bp, Homo sapiens
  misc_feature (784)..(784): "n" may be a, t, c, g, other or unknown
  misc_feature (816)..(816): "n" may be a, t, c, g, other or unknown
  misc_feature (821)..(821): "n" may be a, t, c, g, other or unknown
taaattaaataattaaatagatgatttttacatactgtagagctatagagaaaatatagctggatgggtgatagtgacttggggatgggggtggctactctggatagggtagtttaaggtgacatctctgtgcagatgtagaatgggctagtgctttctaagaactgaaagatcagtgaagaaggggagcatagtgactgaggagtagtgtggcattagatggggtctgagagttacacaggaacatgtggagcctgtaggccatggtaaagcctttttctactcttctggtgatttaaagccattgtaaagttttgagcttgggagtaggtagcaaaataagatttatatttttatggggttactctggctgttgagaggagaaaaagacatgaatctgggaggccacttgggaagcaaggccatcagtgaagagaaagagtgggagaaaaaggtttgaggagagaaggtataggactttcactaaccttggaccatatatttgccaggaagaatgtaagttctccaacatcttcaaataaagaagtggttatgaggaatgatcagaataatggagatatgaaaccattccagaatttcacaacaataccaatcacacaggctctcaactacaatctgagcaaagaagggcatttagaaaaagaaccttggaatgcattcagccatcatggcccagttaatgtctccatcaatggaattccttgcattctcttctgggccaaaagaataatgattaaatttaagaatcaaacctgctggaccntacagacaaccatttgtcaaaagtactgtggncctgncactcaaatgcatggaagaagtct

SEQ ID NO: 2293 - DNA, 860 bp, Homo sapiens
  misc_feature (834)..(834): "n" may be a, t, c, g, other or unknown
  misc_feature (843)..(843): "n" may be a, t, c, g, other or unknown
  misc_feature (849)..(849): "n" may be a, t, c, g, other or unknown
aactttacgacaggcgggattgttttgtggctgtcagctttccccgtggtctgagtttgtggctgcatttttatctctggtggctctgctacggcggcgcagaaatgaggcagaagcggaaaggagatctcagccctgctgagctgatgatgctgactataggagatgttattaaacaactgattgaagcccacgagcaggggaaagacatcgatctaaataaggtgaaaaccaagacagctgccaaatatggcctttctgcccagccccgcctggtggatatcattgctgccgtccctcctcagtatcgcaaggtcttgatgcccaagttaaaggcgaaacccatcagaactgctagtgggattgctgtcgtggctgtgatgtgcaaaccccacagatgtccacacatcagttttacaggaaatatatgtgtatactgccctggtggacctgattctgattttgagtattccacccagtcttacactggctatgagccaacctccatgagagctatccgtgccagatatgaccctttcctacagacaagacaccgaatagaacagttaaaacaacttggtcatagtgtggataaagtggagtttattgtgatgggtggaacgtttatggcccttccagaagaatacagagattattttattcgaaatttacatgatgccttatcaggacatacttccaacaatatttacgagcaagtcaagtattctgagagaagcctcacaaagtgtattggaattactattgaaaccagaccagattactgcatgaacgacctttaagtgacatgttgacctatggctgccaaggctgganaatggggtnccaaanggttattaaga

SEQ ID NO: 2294 - DNA, 854 bp, Homo sapiens
  misc_feature (724)..(724): "n" may be a, t, c, g, other or unknown
  misc_feature (741)..(741): "n" may be a, t, c, g, other or unknown
  misc_feature (779)..(779): "n" may be a, t, c, g, other or unknown
  misc_feature (838)..(838): "n" may be a, t, c, g, other or unknown
  misc_feature (848)..(848): "n" may be a, t, c, g, other or unknown
tttgggccgagccaaccgcttcctcagcacagcggctgtgagcctcatgaccccacggcggcctctgagcacctcggagaaagtgaaggtccgcacgctgagcgtggagcagaggacccgtgaggacattgaaggcagccactggaatgagggcttgctgctggggcggccccccgaggagcctgagcagcccctcaccgagaactcgctgctggaagtcctggatggggcggtcatgatgtacaacctcagcgtacaccagcagctgggcaagatggtgggtgtctccgatgatgtcaatgaatacgctatggctctgagggacacagaggacaagctccgccggtgccccaagaggaggaaggacatccttgcagagttgaccaagagccagagggttttctcagaaaagctggaccacctgagccgccgtcttgcctgggtccatgccactgtctactcccaggagaagatgctggacatctactggctgctgcgcgtctgcctgcggaccattgagcacggtgatcacacagggtctctctttgccttcatgcccgagttctacctgagcgtggccatcaacagctacagtgctctcaagaattactttggtcccgtgcacagcatggaggagctcccaggctatgaagagaccctgacccgcctggctgccattctcgccaaacactttgccgacgcacgcattgtgggcactgacatncgagattactgatgcangccctggccagctacgtgtgctacccacacttccttgnggctgtggaaccaattcccgaggaacaacgtattcgccatggtgaaggaaccttctggngccctatgancaacgg

SEQ ID NO: 2295 - DNA, 786 bp, Homo sapiens
  misc_feature (750)..(750): "n" may be a, t, c, g, other or unknown
  misc_feature (762)..(762): "n" may be a, t, c, g, other or unknown
  misc_feature (781)..(781): "n" may be a, t, c, g, other or unknown
taacaaatggtctctcgcccggttctgtcccttatttttagattgttttcctgcatcttacaatttccttttttttcaaagttcctttctccaggcctgtttttcagtgctcaggacacggttttcatcacatacttactgtttttttggttgggttttgatacgaaaagctgctacgtttggtgaccagagggagggtttggaatctgtgctttgcaggggatctcggtgggtaccgtggcccctcgcagggtggcgagtggggtccgttcctcgagaagggggcccttacccacaccgtgcggcttgaattctgtcggagttgaatctgtggaaaggattgtcccattagagctgctgcgtcctttcctctgtcctccctgtcacccaaaccccgaagtcacagctgcttagaagaatgggattttggggatacaaccacacacatttccctctggactgaaattttaaaaacagacccatttcactgacttctttagggaaaatagtttcagtcttgggttgtcttgtgagcccacgggcatgggaccctgtctctgctgggcttttccggccccgtcccagctcctcctcaggcagaggctgcagccctcagttctgctgctggatggaacatttcaaccccctccgggaaggtgggcagggtggagggcccagggctaggcctgccatgcaccatgagcaggggtgctacctgggtgtgtgaagttgggctggcttttcctggangtgggtgagaangctcttccggccaaatcanaaagg

SEQ ID NO: 2296 - DNA, 760 bp, Homo sapiens
  misc_feature (706)..(706): "n" may be a, t, c, g, other or unknown
  misc_feature (729)..(729): "n" may be a, t, c, g, other or unknown
  misc_feature (751)..(751): "n" may be a, t, c, g, other or unknown
gcggcgcttcttctgccgttgcgccttcttcagagcgctgagagccaccttggcggcctcccggaagacgtcctccacattctcccgaaacttggcggaacattccaggtagagagcagctcggatctgttcgcaggcgctcaggccctgggtggggggaggagccagcattaggtgaggggcccctggaggtctcctagcaccacctggtgggtttgggactggctctgaggactctgcagggatggaggccttggtttgggcctgtctgtctcctccatcctggctgcccctcacagtgtgtgggtggaatggagggccagggcagtgcagcccgcaggttggaagaagccctgtccaggcccccaccctggcctctctccagctccgggcagggaggggctgaatcctgagacccggggttggttcccccaggtgtgtctcccaggcctgtgagaagagttggaggcctcaagacagaaaggacttccagccacctctctcccttctctgaaagtaccatttaggcaaattaatttgcccttttatttatttatttttgggatggagttttgctcttgttacccgggctggagtgcagtggcgcgatcttggttcatcgcgacctctgcacccgggttcgggcgattctcctgcctcggctcccgagtggctgggattgcaggcatgcgccaccatgcccggntagtgttgtgtttttggtggaanaatggggttctctcatgttggncaaggctgg

SEQ ID NO: 2297 - DNA, 803 bp, Homo sapiens
  misc_feature (679)..(679): "n" may be a, t, c, g, other or unknown
  misc_feature (743)..(743): "n" may be a, t, c, g, other or unknown
  misc_feature (768)..(768): "n" may be a, t, c, g, other or unknown
  misc_feature (786)..(786): "n" may be a, t, c, g, other or unknown
gttccaagttgcatgtgcttgaaatagatttaattcttattccccacagtttaggtatttttcattagtacatcaatttgacacactgaatgcaagactattaatcccactgcttctcgcaggaactcaacaatagtgctacgcacagactcagagaagcgctcactggcagaaagtgggctgagctggtttagtgaatcagaggagaaagcccctaaaaaactggagtacgacagtggtagcctgaagatggaacctgggacttctaagtggcggagggagcggcctgagagccgtgatgattcatccaagggtggagaactgaaaaagcccatcagcctgggccaccctggttccctgaagaagggcaagaccccacctgtggctgtaacttcccccatcactcacacagcccagagtgccctcaaagtcgcaggcaaacctgagggcaaagctacggacaagggtaagcttgcagtgaagaatactgggctccaacgctcctcctctgatgctggtcgggaccgcctgagtgatgctaagaagcccccctcgggcattgctcgcccctccacttcgggatcctttggctacaagaagcctcctcctgccacaggcacagccactgtcatgcaaactggtggttcagccactctcagcaagatccagaagtcctcangcatcctgtcaagccagtaaatgggcgcaagactagcttagatgtttccaacagtgcagagccnggattcctggcttctggaaccccgntctaacatccagtaccgnaacctggccccggccaa

SEQ ID NO: 2298 - DNA, 874 bp, Homo sapiens
  misc_feature (733)..(733): "n" may be a, t, c, g, other or unknown
  misc_feature (739)..(739): "n" may be a, t, c, g, other or unknown
  misc_feature (771)..(771): "n" may be a, t, c, g, other or unknown
ccgtatgtggatgaggaggggaatctggtaaagccgctaaaaccgaacgggataaagatggagaagtttgtgtttgatgtgttccggtttgctaagaactttgctgccttggaagtgctgcgggaggaggaattttccccactgaagaacgcagagccagccgacagggacagtccccgcaccgctcgccaggccctgctcacccagcactaccggtgggctctgcgggccggggcccgcttcctggatgcccatggggcctggctcccagagctgcccagcttgcccccaaatggagaccctccggccatctgtgagatatcgcccttggtgtcttactctggagagggtttagaagtgtacctgcaaggccgggagttccagtccccgctcatcctggatgaagaccaggccagggagccgcagctgcaggagtcctgacccgcccagactgcccccagactcccccgagacctgccagccccggcatcctggaagtcccgactccccccagacctgccagccccggcgtcctggagctgggggctacagcccagcctgagctctgggtgggaaagcagcctgccccatgcttccagcctgcagaacacagaatgaaacatgctggtagactccacgagggcagggcctctcctgtcgcctctggacacaagtggcgacagcctgctgggggctctgtggctccattcctgctgtggggtctagtcaagangcaganggacttgggacctgggagaatggggctgaaangaagcttcgggtttggggccccaagggaagtgtggtgtcatcttggggaagaacaaggaaggcattgtcccttttgggaaccccgcctttggggaatcccccc

SEQ ID NO: 2299 - DNA, 858 bp, Homo sapiens
  misc_feature (718)..(718): "n" may be a, t, c, g, other or unknown
  misc_feature (770)..(770): "n" may be a, t, c, g, other or unknown
  misc_feature (784)..(784): "n" may be a, t, c, g, other or unknown
  misc_feature (831)..(831): "n" may be a, t, c, g, other or unknown
agaacgtgctgtgtggatgcggcgaaacgctgaggcgcggccttcgttgtgtggtggggactcacaagaccgacgtcaagatgatgctttcaagggccaaacctgctgtaggcagaggcgtacagcacactgacaaaagaaagaagaaaggtaggaagattccaaaactagaggagctactttcaaaaagagatttcactggagctattaccctgttggagttcaaacgtcatgttggggaagaagaagaggatactaatttgtggattggatattgtgcctttcacctgggtgactacaagagagctctggaggaatacgaaaatgctacagaagaggaaaattgtaattctgaagtctgggtgaacctagcttgcacctacttctttcttgggatgtataaacaagctgaagcagctggatttaaagcttcaaaaagccgactccaaaaccgcctcctcttccacttggctcacaagtttaatgatgagaaaaaattgatgagctttcatcaaaatcttcaggatgtcacagaagatcaactcagtttggcctcaatccactatatgcgatctcactaccaagaagctatagatatatataagcgaatactgctagataacagggaataccttgcccttaatggttatgtggccctctgctctacaagttggattactatgatgtggctcaagaagttttggctggttaccttcancaaattcctgatagtccatcggacttaatcttaaagcctggaccattttcgnctttataatggcanaaccactgaggccgaactcaaaagctttgatgggccaatgcttcttnatccctttgaatttgcttaaagaactt

SEQ ID NO: 2300 - DNA, 851 bp, Homo sapiens
  misc_feature (663)..(663): "n" may be a, t, c, g, other or unknown
  misc_feature (695)..(695): "n" may be a, t, c, g, other or unknown
  misc_feature (719)..(719): "n" may be a, t, c, g, other or unknown
  misc_feature (806)..(806): "n" may be a, t, c, g, other or unknown
  misc_feature (821)..(821): "n" may be a, t, c, g, other or unknown
  misc_feature (836)..(836): "n" may be a, t, c, g, other or unknown
agaaattgaagcacggatcagattatcatttgcacaggtgtatcaaggtcagaagaagtcaaaagaagctttgtcccactatcaagcagctttggaatatgttgagatcagtaaaggtgaaacaagtcgtgagtgtgtacccatattgagagaattagcaggtgtagagcaagccctgggactccacgatgtatccatcaaccacttcctccaggcacatctcatcatcctgagtagaagcccctctcaagtggaggcagcagactcggcacacatcgtcgcccatgctgctgtcgcttcagggagacacgagcaccatgatgtagctgagcagtattttcaagagagcatggctcatcttaaggattctgaagggatgggaagaaccaaatttctttcaattcaagatgaattttgccattttctacaaatgactggacaaaaagagagagcaacctcgatcctgagagagtccctggaagccaaagtggaagcatttggcgatttcagtcccgaggtggcagagacataccggctcctgggaggagcagacctggcgcaggggaaccacagtggggcccgcaagaaactgaagaagtgtctccagatccagaccctcttatatggacccgcaggacaaaaggactcttggccacccagcangccatgggcatgctgtccacgggccccaaggntgcttcgaaaccaaggcaggcatnaaaagcccaagtggccttctgcaccagcattcctttaggacacccttgcttgggaaaggcccggcccgggacaaccagcagactganggcccccaaccttgnaaaagcctaggacanttctgggcactggca

SEQ ID NO: 2301 - DNA, 755 bp, Homo sapiens
  misc_feature (607)..(607): "n" may be a, t, c, g, other or unknown
  misc_feature (622)..(622): "n" may be a, t, c, g, other or unknown
  misc_feature (683)..(683): "n" may be a, t, c, g, other or unknown
  misc_feature (725)..(725): "n" may be a, t, c, g, other or unknown
  misc_feature (748)..(748): "n" may be a, t, c, g, other or unknown
tatgcttgcttctctagggaagaatcccactgatgcataccttgatgccatgatgaatgaggccccagggccgattggtcttttttgacagggtgctgattggtgcatttacaatccctgagctagacactgagtgctgattggtgtatttataaaccttgagctagacacagagtgctgattggtgtgtttacaaaccattagctagacacaagagtgctgattggtgtatttacagtcccttagctagacataaatgttctccaagtccccatcagattagctaaatacagagcactaaatgttgtatttacaaaccttgagctagacacagagtgctgattggtgtatttacaaaccttagctagacacagagtgctgattggagtatttacaaccccttagctagagataaatgttctccaagtcctcactagactcaggagcccaactggcttcacctagtggatcctgcaccagggccgcaggcggagctgcctgccagtcgtgcaccgtgagcccacactcctcagcctttgggcggtcaatgggactgggcgccgcggagcagggggcggcgcttgtcggggaggctcaagccgcgcangagcccatggcgaangggaggctcaagcatggtgggctgcagatcccgcgccctggcccatggggaggcagctgangcccacaagaatttgagcgcaatgctggtgggctggcactgntgggggaaccgggacaccttcgnactgtgg

SEQ ID NO: 2302 - DNA, 807 bp, Homo sapiens
  misc_feature (767)..(767): "n" may be a, t, c, g, other or unknown
  misc_feature (775)..(775): "n" may be a, t, c, g, other or unknown
  misc_feature (788)..(788): "n" may be a, t, c, g, other or unknown
attttagccagagctcagcccatatagtacatcagaaaacacaagctggagataaatttggtgaacataatgaatgtacagatgccctctaccagaaattagactttacagcacatcagagaattcacacagaagataaattctacctttctgatgaacatgggaaatgcagaaaatccttttaccggaaagcacacctcattcagcatcagaggccccactcaggagagaaaacttaccaatatgaggaatgtgcaaaatccttttgctcaagttcacatcctattcagcatcctggaacttatgtgggattcaaactttatgaatgtaatgaatgtgggaaagctttctgtcagaattcaaacctcagtaaacatctgagaattcacacaaaagagaaaccttgtgataacaatggctgtgggagatcttacaagtcacccctcataggacaccagaaaacagatgcagagatggaactctgtggtggcagtgaatatgggaagacatcacatctcaaaggacatcagagaattctcatgggggagaaaccctatgaatgtattgaatgtgggaaaactttctccaagacatcacatctcagagcacatcagagaattcacacaggtgaaaaaccctatgaatgtgttgaatgtgagaaaactttctctcacaagacacacctcagtgtcatcagagagttcacacaggggagaaccctatgaatgtaatgctgtgggaaatcttttacctatactcagcctganagcacatnaagaattcacccngtgaaaagcctatgaatgc

SEQ ID NO: 2303 - DNA, 802 bp, Homo sapiens
  misc_feature (719)..(719): "n" may be a, t, c, g, other or unknown
  misc_feature (755)..(755): "n" may be a, t, c, g, other or unknown
  misc_feature (775)..(775): "n" may be a, t, c, g, other or unknown
tgatgtatcacgaagctacagcttgccatgtgactggagatttagtagaacttctgtcaatatttctttcggttttgaagtctacacgcccttatcttcagagaaaagatgtgaaacaagcattaatccagtggcaggagcgaattgaatttgcccataaactgttaactcttcttaattcctatagtcctccagaacttagaaatgcctgtatagatgtcctcaaggaacttgtacttttgagtccccatgattttcttcatactctggttccctttctacaacacaaccattgtacttaccatcacagtaatataccaatgtctcttggaccttatttcccttgtcgagaaaatatcaagctaataggagggaaaagcaatattcggcctccgcgccctgaactcaatatgtgcctcttgcccacaatggtggaaaccagtaagggcaaagatgacgtttatgatcgtatgctgctagactacttcttttcttatcatcagttcatccatctattatgccgagttgcaatcaactgtgaaaaatttactgaaacattagttaagctgagtgtcctagttgcctatgaaggtttgccacttcatcttgcactgttccccaaactttggactgagctatgccagactcagtctgctatgtcaaaaaactgcatcaagcttttgtgtgaagatcctggtttcgcagaatatattaaatgnatcctaatggatgaaagacttttttaaacaacaccntggctacacgttcatggacncatttccttcttaaaggtcaaggccaa

SEQ ID NO: 2304 - DNA, 584 bp, Homo sapiens
  misc_feature (565)..(565): "n" may be a, t, c, g, other or unknown
  misc_feature (567)..(567): "n" may be a, t, c, g, other or unknown
  misc_feature (580)..(580): "n" may be a, t, c, g, other or unknown
ttttttcaaaatccgaaatcatttgcgagccgcaatcgtcgtctgcctgtgtgggggggcccagggcctgccttgcacgttgcagcctctctggccattgcagagctgctggcctcctgcccaggtggagggtcctggggacggcagaggataaagccccctcctcacatccctctattgcggatccacagtggccttactcttaacttggatgagagcaaaaacctgggagaatgatgtgcttctgtagtcggtgacaaaggaagaggcattgctactttatttggtgcacttttggtttctaggaaggtctttgggtcattttaacttctcggcaactcccagactctcagagtgtggggctggggcctggcggctgggctggtgcagggagtgtgctggttagtctccagaccctcacagcagccacgcccccaggcccaccgtgcatggtgtgggcgggacagccggaagcttccggggtggcctccacctcctggctggggcacttttgctcccagagcctttggtgccaggtttgtgggatgggggttagcgtctatgngnggaaggccaccantcta

SEQ ID NO: 2305 - DNA, 803 bp, Homo sapiens
  misc_feature (721)..(721): "n" may be a, t, c, g, other or unknown
  misc_feature (727)..(727): "n" may be a, t, c, g, other or unknown
  misc_feature (734)..(734): "n" may be a, t, c, g, other or unknown
attgctccaagatggcggcggcggcggcagcgggagcgcagctcagctgggctggaactgccctcctggaactcccccagcctacaacctaggaggtgcagggactgaggctcaggccaaatcgcaactcagacccagtgaacccaaggcctgaagagaatttggattcatttaccttgttttgtggggactggagagacaagtaaactctcagagtaactgtcccctctgactaccatttctaaggatgccccggaggcccagctagccccagacttcggccccatgcggctcacccgctgccaggctgccctggcggccgccatcaccctcaaccttctggtcctcttctatgtctcgtggctgcagcaccagcctaggaattcccgggcccgggggccccgtcgtgcctctgctgccggcccccgtgtcaccgtcctggtgcgggagttcgaggcatttgacaacgcggtgcccgagctggtagactccttcctgcagcaagacccagcccagcccgtggtggtggcagccgacacgctcccctacccgcccctggccctgccccgcatccccaacgtgcgtctggcgctgctccagcccgccctggaccggccagccgcagcctcgcgcccggagacctacgtggccaccgagtttgtggcctagtacctgatggggcgcgggctgaggcacctgcctgctggagcgcatggtggangcgctncgcgcangaagcgcacgtctggtggcccgccccggttgccacgggcaacccttgcaagtgcctggcccttgaacgt

SEQ ID NO: 2306 - DNA, 822 bp, Homo sapiens
  misc_feature (764)..(764): "n" may be a, t, c, g, other or unknown
  misc_feature (812)..(812): "n" may be a, t, c, g, other or unknown
  misc_feature (817)..(817): "n" may be a, t, c, g, other or unknown
tttagtaaatcacacaaaaatccagcagaaattgtgaaaatcctgaaagacaatttggccattttggaaaagcaagacaaaaagacagacaaggcttcagaagaagtgtctaaatcactgcaagcaatgaaagaaattctgtgtggtacaaacgagaaagaacccccaacagaagcagtggctcagctagcacaagaactctacagcagtggcctgctggtgacactgatagctgacctgcagctgatagactttgagggaaaaaaagatgtgacccagatatttaacaacatcttgagaagacagataggcactcggagtcctactgtggagtatattagtgctcatcctcatatcctgtttatgctcctcaaaggatatgaagccccacagattgccttacgttgtgggattatgctgagagaatgtattcgacatgaaccacttgtcaaaatcatcctcttttctaatcaattcagagatttctttaagtacgtggagttgtcaacatttgatattgcttcagatgcctttgctactttcaaggatttactaaccagacataaagtgttggtagcagacttcttagaacaaaattacgacactatttttgaagactatgagaaattgcttcagtctgagaattatgttactaagagacagtctttaaagctgctaggggagctgatcctggaccgtcacaactttgccatcatgacaaagtatatcagcaagccggagaacctgaactcatgatgaacctncttcgggataaagtcccaacatccagtttgagccttctggttttaagngttgngccag

SEQ ID NO: 2307 - DNA, 868 bp, Homo sapiens
  misc_feature (712)..(712): "n" may be a, t, c, g, other or unknown
  misc_feature (775)..(775): "n" may be a, t, c, g, other or unknown
  misc_feature (779)..(779): "n" may be a, t, c, g, other or unknown
aaaaccgaggcccgagccgcgggagtcgagcgaaggcagcgccgaggccgcggtttccccctgggcctccccagcagcagccatgggcatcaaatttttagaagttatcaaaccattctgtgcagttccaccagaaattcagaaaccggaaaggaaaatccagtttagagagaaggttctgtggactgctataacgctcttcattttcttagtgtgttgtcagatcccactgtttggaatcatgtcatcagattctgcagatcctttctactggatgagagttattctggcttccaatagaggaactttaatggaattgggtatctccccaattgtaacatctggtttgattatgcagttgttagctggagccaaaatcattgaagttggagatacaccgaaagatagagctttattcaatggagcccagaaactgtttggtatgatcattaccattgggcaagccattgtgtatgtcattacggggatgtatggggaccctgcagaaatgggtgctggaatctgtctcctgatcatcattcagttgtttgttgctggtttgattgtgctgctgttagatgagctgctacagaagggttacggcttggggtctgggatttccctctttattgccaccaacatctgtgagaccattgtctggaaggcctttagtcccactaccattaacactggcagaggtactgagtttgangggtgcagtcatagctctggtccatttggtggccaccaggacggacaaagtccgagctttacnggangctttttatcggcagaaacttacccaatcttatgaacctcattgctacagtttttgggttgctggtggtatatatttccaaggatttcc

SEQ ID NO: 2308 - DNA, 844 bp, Homo sapiens
  misc_feature (748)..(748): "n" may be a, t, c, g, other or unknown
  misc_feature (812)..(812): "n" may be a, t, c, g, other or unknown
  misc_feature (827)..(827): "n" may be a, t, c, g, other or unknown
tctaaaatggatcgccagagtgttctccatgtactgggcatattgaaaaactccaaatttctcaaagtctgcctgcctgcttatgtggtagggatgatcactgaacccatccctgacatccgaaaccagtatccagagcacataagcaacatcatctccctcctccaggaccttgtaagtgtcttccctgccagttctgtgcaggaaacttccatgctggtttccctcctgccaacctctcttaatgctctgagagcctctggtgttgacatagaagaggaaacggagaagaacctggaaaaggtacagactatcattgaacatctgcaggaaaagaggcgagagggcactttgagagtggatacctacactctagtgcagcctgaggcagaagaccatgttgagagctaccgaaccatgcccatttaccctacctacaatgaagtgcacttggatgagaggcccttccttcgccccaatatcatttctggaaaatacgacagcactgctatctatctggatacccacttccggctcctgcgagaagatttcgtcagacctttacgggaaggtattttggaacttctccaaagctttgaagaccagggcctgaggaagagaaagtttgatgacatccgaatctactttgacaccaggattatcacccccatgtgttcatcatcaggcatagtctacaaggtgcagtttgacacaaaaccactgaagtttggtcgctggcagaattccnaacgattgctctatgggtctttgggatgcatgtccaaggacaactttgagacatttctttttgncaccgtatctaacanggaaccaggaagatctt

SEQ ID NO: 2309 - DNA, 721 bp, Homo sapiens
  misc_feature (621)..(621): "n" may be a, t, c, g, other or unknown
  misc_feature (699)..(699): "n" may be a, t, c, g, other or unknown
  misc_feature (718)..(718): "n" may be a, t, c, g, other or unknown
  misc_feature (721)..(721): "n" may be a, t, c, g, other or unknown
gagagaaaatggcggcggagccgaacaagaccgaaatccagactctttttaagaggcttcgcgcagttccaaccaacaaggcctgtttcgactgcggcgccaagaatccgagttgggccagcatcatgtacggtgttttcttgtgcattgactgttccggggtgcaccgctccctgggcgtccatctgagcttcatcaggtccacagagttggattccaactggaactggttccagctgaggtgtatgcaggtcggcgggaatgccaatgcgacggctttttttcgccaacatggatgcacagccaatgatgccaacaccaaatatagtagccgagctgcccagatgtaccgggagaagatccggcagctggggagtgcggccctggctaggcatggcactgatctttggatagacaacatgagtagtgccgttcctaatcactccccagagaagaaggactctgatttcttcacagaacacactcaaccccctgcctgggatgcgccagccactgagccttcagggacccagcagccagccccgtctacagagagcagtggcctggcacagccggagcatggccccaacacagacctgcttggcacctacccaaagcctnactggaactgaaaagcttcatcattggcaagaagaaccacagcagctaaaaaagggctgggtgccaagaaaggcctangggcccagaaggtgaacanccn

SEQ ID NO: 2310 - DNA, 755 bp, Homo sapiens
  misc_feature (684)..(684): "n" may be a, t, c, g, other or unknown
  misc_feature (720)..(720): "n" may be a, t, c, g, other or unknown
  misc_feature (725)..(725): "n" may be a, t, c, g, other or unknown
aaacattacccaggagcaaaatatgatcgtgacaggtggcttagcctggtggaatgattttatggtccttgcgtgttataacataaatgaccgtcaagaagagcttagagtatacttgcgaacatcaaatctggacaatgcctttgctcatgtcaccaaagcacaagcagaaacattactgcttagtgtcttccaggacatggtaatagtatttagagcagactgttcaatatgcctttacagtattgaaagaaaatctgatggtccaaatactactgctggtattcaagttcttcaggaggtttccatgtcacgctacattcctcaccctttcctggtggtatctgtcactctgacatcagtgagtacagagaatggaatcaccttgaaaatgccacagcaggctcgtggtgcagagagcattatgttaaacctggcaggacagctcatcatgatgcagagggacaggtcaggcccacagatccgggagaaggacagtaaccctaataaccaaaggaaacttctgccattctgtcctcctgttgtactagcccagtctgttgaaaatgtctggacaacgtgtcgagcaaataaacagaaacgtcaccttctggaggccctctggctgagctgtggtggtgcagggatgaaagtttggctccctctcttcctagggatcaccgnaagccccattccttcttgtcccacggatcatgctgnctttncacatcaacatttacccgctagctggtctg

SEQ ID NO: 2311 - DNA, 746 bp, Homo sapiens
  misc_feature (701)..(701): "n" may be a, t, c, g, other or unknown
  misc_feature (720)..(720): "n" may be a, t, c, g, other or unknown
  misc_feature (725)..(725): "n" may be a, t, c, g, other or unknown
attataaatctagagactccaggattttaacgttctgctggactgagctggttgcctcatgttattatgcaggcaactcactttatcccaatttcttgatacttttccttctggaggtcctatttctctaacatcttccagaaaagtcttaaagctgccttaaccttttttccagtccacctcttaaattttttcctcctcttcctctatactaacatgagtgtggatccagcttgtccccaaagcttgccttgctttgaagcatccgactgtaaagaatcttcacctatgcctgtgatttgtgggcctgaagaaaactatccatccttgcaaatgtcttctgctgagatgcctcacacggagactgtctctcctcttccctcctccatggatctgcttattcaggacagccctgattcttccaccagtcccaaaggcaaacaacccacttctgcagagaatagtgtcgcaaaaaaggaagacaaggtcccagtcaagaaacagaagaccagaactgtgttctcttccacccagctgtgtgtactcaatgatagatttcagagacagaaatacctcagcctccagcagatgcaagaactctccaacatcctgaacctcagctacaaacaggtgaagacctggttccagaaccagagaatgaaatctaagaggtggcagaaaaacaactggccgaagaatancaatggtgtgacgcaaaangcctnagcacctacctaccccagcct

SEQ ID NO: 2312 - DNA, 818 bp, Homo sapiens
  misc_feature (615)..(615): "n" may be a, t, c, g, other or unknown
  misc_feature (678)..(678): "n" may be a, t, c, g, other or unknown
  misc_feature (723)..(723): "n" may be a, t, c, g, other or unknown
  misc_feature (769)..(769): "n" may be a, t, c, g, other or unknown
  misc_feature (783)..(783): "n" may be a, t, c, g, other or unknown
atcgccgtcgcccgtgcccctcccagaccgcaccggccgcatggagcccccggagggcgccggcaccggagagatcgttaaggaggctgaggtgccgcaggctgcgctgggcgtctcagcccaggggacaggggacaatggccacacgcctgtggaggaggaggtcgggggcatcccagtaccagcaccggggctcctgcaggtcacggagaggaggcagcctctgagcagcgtctcctctctggaggtccacttcgacctcctggacctcactgagctcaccgacatgtcggaccaggagctggccgaggtctttgctgactcggacgacgagaacctcaacaccgagtccccagcaggtctgcacccgctgccccgggccggctacctgcgctccccttcctggacgaggacaagggctgagcagagccacgagaagcagcccctaggcgaccccgagcggcaggccacagtcctggacacgtttctcactgtggagaggccccaggaggactagaccatctccacctgccccagctcctgcagggatggggtccgaacacgatggcagatctgggcagtgctgacccagcagacacacttacccgccacgangcttcagccgtcacttctgacacacaccctgggggcaagctctctgccagccccgagaccggncttgtctgcttgggcacgggtcttcgtctcactttggagaccaanccggcttttcctggggggacaacacggggcccccgggattgccttntgggaacccccaanacaaagcacaagccccaatgggccttacgtccaag

SEQ ID NO: 2313 - DNA, 767 bp, Homo sapiens
  misc_feature (650)..(650): "n" may be a, t, c, g, other or unknown
  misc_feature (697)..(697): "n" may be a, t, c, g, other or unknown
  misc_feature (733)..(733): "n" may be a, t, c, g, other or unknown
  misc_feature (754)..(754): "n" may be a, t, c, g, other or unknown
gtcgcgacgggggttcagggaatatttactgggcctctccgctccctctgctcttggaggtgccatgaggtcagttagctacgtgcagcgcgtggcgctggagttcagcgggagcctcttcccgcacgcaatctgcctcggagacgttgataacgatacgttaaatgaactggtggtgggagacaccagcgggaaggtgtctgtgtataaaaatgatgacagtcggccatggctcacctgttcctgccagggaatgctgacttgcgctggggttggagacgtgtgtaataaaggaaagaacctgttggtggcagtgagtgctgaaggctggtttcatttgtttgacctgacacctgccaaggtgttggatgcttctgggcaccacgagacactaatcggagaggagcagcgtccagtcttcaagcagcacatccctgccaacaccaaggtcatgctgatcagcgacatcgatggagatgggtgtcgtgagctggtggtgggctacacagaccgtgtggtgcgagctttccgctgggaggagctaggtgagggtcctgaacatctgacagggcagctggtgtccctcaagaaatggatgctggagggtcaggtggacagcctctcaatgactctggggccactgggtcttnctgaactgatggtgtctcaccaggttgtgcgtatgcaattctactgngtacctggaaaaaggacactgggtcccttctgcctntgaagggcccacggatggtantagggagacccca

SEQ ID NO: 2314 - DNA, 768 bp, Homo sapiens
  misc_feature (747)..(747): "n" may be a, t, c, g, other or unknown
  misc_feature (757)..(757): "n" may be a, t, c, g, other or unknown
  misc_feature (767)..(767): "n" may be a, t, c, g, other or unknown
ttttctacctaacaattactgagcattcaactctgtgctgcgtgtgtgctaacccttcacacacaccacctcactaatcctcacagtccttgaaggtggggactagtgtcacacgtggccattgggaacatcacacagatcaaaggctgggctcaaggtcacattgcctaaacacacattcatgtgacgtgagaaccttaactcttgccctcccagtgacacttccttctctgggtttccattccgccttgcagagagcattctgacttactgtagccttctgtgtgtgtgtctcccctctctactgtgagcccctcgagagcagggcccatgccttccccatccctgtcccagaagctaactggaaacagtggagacatgcagcagattgttgactgaagaaggtgctgcgtccatggtcatccctcatatcctttataaatttcttacacatttcattcctttgtgggaattgcatcttgaagctttgtttatagccatctgcgtgggtcccttaggctatgtggctgactttaatgctacagatatttttccgtttctggcatgtagcagtgctgggcttagcattgcagagattataaaagagaagacatggcccctgcccttcaattgcagagatgagaccatatggaacacaattagccattaaagacaatacatttcagtatttgcatggagtatttgattatatagcacatgcaaattctttggaatgacatacaaggncctgcaaganctgattctang

SEQ ID NO: 2315 - DNA, 775 bp, Homo sapiens
  misc_feature (712)..(712): "n" may be a, t, c, g, other or unknown
  misc_feature (753)..(753): "n" may be a, t, c, g, other or unknown
  misc_feature (766)..(766): "n" may be a, t, c, g, other or unknown
caaaataaaaggaaaaccactgtgtaaaacagtaggcggatctttcagagactccaaatcattgacaattcagaaggatcttgtcgctgcatttgacaacggagaccagaaggtgttcttcgatctgtgggaggagcacatttcaagttccatccgagatggggactcctttgcccagaagctggaattctatctccacatccattttgccatctatcttttgaagtactctgtggggagaccggacaaagaggagctggatgaaaagatttcctacttcaaaacctacctggagaccaaaggggcagccttgagccagaccacagagtttcttcctttctatgcccttccttttgttcccaaccctatggtgcacccctcatttaaagaactcttccaggattcctggactccagagttaaagttgaagttggaaaagtttctagctttaatatctaaagccagcaacacgccaaagcttttaacaatatataaggagaatggacaaagtaacaaagaaatcttgcagcagctccaccagcagctggttgaagctgaacgtaggtcagtgacatacctcaaacggtacaataagatccaggccgactaccacaatctcattggagtcacagcagaactggtggattctctagaggccacagtcagcggcaagatgatcacccctgagtaccttcagagcgtctgtgtccgnctgttcagtaaccagatgccgcagaacctggcgcatagtgnggctttacgaagnctgggacgg

SEQ ID NO: 2316 - DNA, 738 bp, Homo sapiens
  misc_feature (703)..(703): "n" may be a, t, c, g, other or unknown
  misc_feature (723)..(723): "n" may be a, t, c, g, other or unknown
  misc_feature (734)..(734): "n" may be a, t, c, g, other or unknown
atctctgcaaggacaaaagtcagaaatggcttccctggggactgagagcccatagttctcttcccactgctgcttctacccttttgttttgcttggctctctaaaattgtctcagctccagctcttctcacagacagttttatcatcttatcatttttggcacaaaacaaactatgttttattcagtttaccaagaagatggagtcttctgatgtaaacaaaagactggaaaaactctcagccttggattataagattttctattatgaaatacccggcccaataaacaagacaacagagcgacatctagctatcaactgtgttcatgatagagttgtttgctggtggccactggtcaacgatgatgcttggccttgggcccccatttcttctgagaaggacagagccaatctactcctcctgagttatgctcaaggaagactagaggttctgagttctgtccgcacagaatgggacccactggatgttcgctttggcaccaaacagccttatcaggtgttcacagtggagcactccgtaagtgtagacaaagagcccatggctgacagctgcatctatgaatgcattcggaataaaatccagtgtgtgtcagtcaccagaataccactaaagtcaaaggccatcaactgctgcaggaatgttactgaagacaaactgattctgggctgtgaaaatcttcctnattctttatgaactcaccgnaaagggctctnttac

SEQ ID NO: 2317 - DNA, 841 bp, Homo sapiens
  misc_feature (693)..(693): "n" may be a, t, c, g, other or unknown
  misc_feature (790)..(790): "n" may be a, t, c, g, other or unknown
  misc_feature (792)..(792): "n" may be a, t, c, g, other or unknown
  misc_feature (813)..(813): "n" may be a, t, c, g, other or unknown
tcattttacctctcttggtcatcagaaaataatgaaaagaggcaagaaatcgtatgaaggtaagaattttgagaacatctttactctgagctcatcgcttaatgaaaaccagagaaatctccctggagagaaacaatatagatgtactgaatgtggcaaatgcttcaaacggaactcttctcttgttttgcatcaccgaactcacaccggagagaagccttatacttgtaatgagtgtggaaagtccttctccaagaactacaacctgattgtgcatcaaagaatccacacaggagagaagccctatgaatgcagtaaatgtgggaaagctttcagtgatggctcagctctgacacagcaccagagaattcacacaggcgagaaaccttatgaatgcctagagtgtggaaaaaccttcaaccgaaattcatccttaattttgcaccaaagaactcatacaggggaaaaaccatatagatgtaacgaatgtgggaaacccttcactgacatctcccaccttacagtgcatctcagaatccacaccggtgagaagccctatgagtgtagcaaatgtggaaaggctttccgggacggctcgtacctcacccagcatgagaggactcacactggagaaaagccctttgagtgtgcagagtgcgggaaatccttcaacagaaactctcacctcattgngcatcaaaagatccattctggggagaaccctatgaatgtaaaggaatgtggcaaggactttcatcggagaggtgccgtaccttcatcaggccttcananggattcaatacttgggcgaanaaagcccctatgggcttgcaaacccaag

SEQ ID NO: 2318 - DNA, 707 bp, Homo sapiens
  misc_feature (626)..(626): "n" may be a, t, c, g, other or unknown
  misc_feature (668)..(668): "n" may be a, t, c, g, other or unknown
  misc_feature (702)..(702): "n" may be a, t, c, g, other or unknown
aaactaaaactgctgcaactctatgagtctgtcagtcaattaaattcccttgattttcatttagacacaccattctctgataatgacttggctctgttactaaggcttgatgaaaaagaactgcttaagctccaggcattactagagaaatataagcaagagaacaccaggacaaatgttcgattttctgatgataaagatggtgtgttgcctgtaaaaacattcttggaatatttagaatatgaaaaggatgtgctcaacataaagaaaataagtgaagaggaatatgtggctttaggtagtttctttttttggaagtgtttgcatggagaaagctccactgaggatatgtgtcacactttggagtcggctggtcttagccctcagctgttgttgtctctgctcctgagtgtttggctttcaaaggaaaaggatattttggataaaccacagtcaatctactgtcttcataccatgctgtccctcctgagcaagatgaaagtggccatcgatgagacctgggattctcagtctgtgtccccatggtggcagcagatgcgcacagcctgtattcagtctgagaacaatggagccgctctgttgtctgcgcatgttgggcattctgntgctgcacagatatcaaacaacatgacagagaaaaaattttnccaaacagttttgggtgctgattcaaaagccctnactga

SEQ ID NO: 2319 - DNA, 773 bp, Homo sapiens
  misc_feature (582)..(582): "n" may be a, t, c, g, other or unknown
  misc_feature (731)..(731): "n" may be a, t, c, g, other or unknown
  misc_feature (747)..(747): "n" may be a, t, c, g, other or unknown
  misc_feature (749)..(749): "n" may be a, t, c, g, other or unknown
gttgctgaatctgttgcctgctgctggtgaactccaggagtctggcctggccttgtgtcctgaggtccaagatcttcttgaaggttgtgaactgcctgacctcccctctagccttctgctcccagaggacatggctcttcgtaacctgcccccgctccgagctgcccacagacgctttaactttgacacggatcggcccctgctcagcaccttagaggagtcagtggtgcgcatctgctgcatccgcagctttggtcatttcatcgcccgcctgcaaggcagcatcctgcagttcaacccagaggttggcatcttcgtcagcattgcccagtctgagcaggagagcctgctgcagcaggcccaggcacagttccgaatggcacaggaggaagctcgtcggaacaggctcatgagagacatggctcagctacgacttcagctcgaagtgtctcagctggagggcagcctgcagcagcccaaggcccagtcagccatgtctccctacctcgtccctgacacccaggccctctgccaccatctccctgtcatccgccaactggccaccagtggccgcttcattgncatcatcccaaggacaatgatcgatggcctggatttgctgaagaaggaacacccaggggcccgggatgggattcggtacctggaggcagaagtttaaaaaaggaaacaggtacattcgctgccagaaagaagtgggaaagagcttttanccggcattaactgaanangcaggatgcaaatcctggactctt

SEQ ID NO: 2320 - DNA, 717 bp, Homo sapiens
  misc_feature (677)..(677): "n" may be a, t, c, g, other or unknown
  misc_feature (698)..(699): "n" may be a, t, c, g, other or unknown
agctgcagttccacgatgtgcgggatgctgccgccgagttcctggagaagaaccttttcccctccaactgcctgggcatgatgctgctctcggacgcccaccagtgccgccggctgtatgagttctcctggcgcatgtgcctggtgcactttgagacggtgaggcagagcgaggacttcaacagcctgtccaaggacacactgctggacctcatctcgagtgatgagctggagaccgaggacgagcgggtggtcttcgagaccatcctccagtgggtgaagcacgacctggagccacggaaggtccacttgcccgagctcctccgcagcgtgcgtctggccttgctgccgtccgactgcctgcaggaggccatctccagcgaggccctcctcatggcagacgagcgcaccaagcttatcatggatgaggccctgcgctgcaagaccaggatcctgcagaatgatggcgtggtcaccagcccctgtgcccggccacgcaaggcgggccacacgctactcatcctggggggccagaccttcatgtgtgacaagatctaccaggtggaccacaaggccaaggagatcatccccaaggccgacctgcccagcccccggaaggagttcagcgccttagcgatcggctgcaaggtctatgtgacggggggcaggggcttcganaacggggtcttccaaggatgnnctgggtgtaccgacaccg

SEQ ID NO: 2321 - DNA, 740 bp, Homo sapiens
  misc_feature (711)..(711): "n" may be a, t, c, g, other or unknown
  misc_feature (732)..(732): "n" may be a, t, c, g, other or unknown
  misc_feature (735)..(735): "n" may be a, t, c, g, other or unknown
attgaggaacatggcgttgctggtgcgagtccttaggaaccagactagcatttctcagtgggttccagtatgcagccgattgatacctgtgtctcctacccaaggacagggggacagggctctgtctcgcacttcccagtggccccagatgagccagtcccaagcatgtggtggatcagaacagattcctggaatagacatacagctgaataggaagtatcacaccacacgtaagctttctactaccaaagattccccacagcctgttgaggagaaggttggtgctttcacaaagataatagaagccatgggattcacgggacctttgaaatacagtaaatggaagattaagattgcggccctgcgcatgtatactagctgtgtggagaaaactgacttcgaggaattctttctaaggtgtcagatgcctgatacattcaattcatggtttcttataaccctactccacgtctggatgtgtctagtccgaatgaagcaggaaggccggagtgggaagtacatgtgtcgtatcatagttcattttatgtgggaggatgttcagcagcgcggcagagtcatgggggggatcctttcagatgatcatgggctggccgctgcctctggagaaccttcttcaaccggaaatgttaagaccctcgacatcttgaattgtggtagagtatgtgaggaaacagatccgtacctggactncatgaacgggggaggatctgnttntgacc

SEQ ID NO: 2322 - DNA, 824 bp, Homo sapiens
  misc_feature (809)..(809): "n" may be a, t, c, g, other or unknown
  misc_feature (813)..(813): "n" may be a, t, c, g, other or unknown
  misc_feature (823)..(823): "n" may be a, t, c, g, other or unknown
aagagcttttctctggtgaagatgccgtccctgcagcccgtggtgatgtgcgtcatgaagcacctgcccaaggttccggagaaaaaactgaagctggttatggctgacaaggagctgtatcgagcctgcgccgtggaggtgaagcggcagatctggcaagacaaccaggccttcttcggggacgaggtttccccactcctgaagcagtacatcctggagaaggagagcgctctcttcagtacagagctctctgtcctgcacaactttttcagtccttcccccaagaccaggcgccagggcgaggtggtgcagcggctgacgcggatggtggggaagaacgtgaagctgtacgacatggtgctgcagtttctgcgcacgctcttcctgcgcacgcggaatgtgcactactgcacgctgcgggctgagctgctcatgtccctgcacgacctggacgtgggtgaaatctgcaccgtggacccgtgccacaagttcacctggtgcctggacgcctgcatccgagagcggttcgtggacagcaagagggcgcgggagctgcaggggtttctcgatggcgtcaagaagggccaggagcaggtgctgggggacctgtccatgatcctgtgtgaccccttcgccatcaacacgctggcactgagcacagtcaggcacctgcaggaactggtcggccaggagacactgcccagggacagccccgaccttctgctgctgcttccggcttgctggcgctgggccagggagcctgggacatgatcgacaagccaggtctttcaaggagcccaagaatggangtangagcttaatna

SEQ ID NO: 2323 - DNA, 787 bp, Homo sapiens
  misc_feature (741)..(741): "n" may be a, t, c, g, other or unknown
  misc_feature (754)..(754): "n" may be a, t, c, g, other or unknown
  misc_feature (777)..(777): "n" may be a, t, c, g, other or unknown
gcttcatgggaaagggcctgctgtaccacggaaattgtgaccgcttcagaggcaaggcttgccacttgggtctgggtggaatcagaacgtgcaggtctcccaggatgtacactcactgcgccctttctgctgcttggtgttcttctggaggagcgtgagttctcagcggagcgcttctcggcacttctgatgtgcctcccatggagggagccgggcccttgctgctcaggaggtgcagactgccccgtgctctgggccttgcagctctgtcgctagacggttgttagaggggcagctctaggctggggcttgcgctgggccgtggtgggaggcacagtgtttacaggctctggtggcagagcagttggcacacctgtgggtgaatctgcctgatcccctggcatttggtcagagtacctcagagcaccccactgctcaggggctccttctggctgcagtaagctccctggatggtcacagtgccgccccatccccaggctgtgtgctcaaagcggacaaaactcaggccagagccacagctgggagacctgcactgtccctgcgaaatactaagaacacctagggtgtgctcactgtgggggccagtttctcctcggaacatgacaatgaagctcttttagagaaaagacctttgtagattcaacaattatgataggatttttacagacacctattttgggctcaattttcattattaccattaaatgcattggatagaangggactggtcttnacacatcatattataggaagacntattccagtg

SEQ ID NO: 2324 - DNA, 661 bp, Homo sapiens
  misc_feature (626)..(626): "n" may be a, t, c, g, other or unknown
  misc_feature (631)..(631): "n" may be a, t, c, g, other or unknown
  misc_feature (637)..(637): "n" may be a, t, c, g, other or unknown
ttatatttaagcatggagatgatttacgtcaagatcaacttattcttcaaatcatttcactcatggacaagctgttacggaaagaaaatctggacttgaaattgacaccttataaggtgttagccaccagtacaaaacatggcttcatgcagtttatccagtcagttcctgtggctgaagttcttgatacagagggaagcattcagaacttttttagaaaatatgcaccaagtgagaatgggccaaatgggattagtgctgaggtcatggacacttacgttaaaagctgtgctggatattgcgtgatcacctatatacttggagttggagacaggcacctggataaccttttgctaacaaaaacaggtaacaattaatgactaccagtagacatacattgtatatgtccatggtttttacccctgaatctatgtactaacaagataagttgcggcctggcgcggtggctcacgcccgtaatcccagcactttgggaggccaagacgggtggatcacctgaggttgggagttcgagaccagcctgaccaacatggagaaaccccgtctctactaaacacacaaaatttgccgggcgtggtggtacatgcctgtaatcccaactactnaggangctgangcaggagaatcgcttgacccggga

SEQ ID NO: 2325 - DNA, 863 bp, Homo sapiens
  misc_feature (799)..(799): "n" may be a, t, c, g, other or unknown
  misc_feature (840)..(840): "n" may be a, t, c, g, other or unknown
  misc_feature (851)..(851): "n" may be a, t, c, g, other or unknown
attgtgcaacctctggcagaaactggactacaactctccaaacgaactttcagtactgtactaccacagattgatactactggacagttgtttgtacagactcggaaaggtcaggaagttcttattaaggtgaagcatttcatgaaacaacacattcttccagctgaaaaggaggtaactgagttctatgttcaaaatgaaaattcagtggacaagtggggaaaacctttagtgattgataaactcaaggaaatggccaaagtcgagggtctctggaacttgtttttgccagctgtcagcggactcagccacgtggactatgccttgattgctgaagaaacaggaaaatgcttttttgctccagatgtctttaactgccaagcaccagacacagggaatatggaggttctgcacctgtatggaagtgaggaacagaagaaacagtggcttgagcctcttcttcaagggaacattacctcttgcttctgtatgacagaacctgatgtagcttcaagtgatgccacgaatattgaatgcagcatccaacgagatgaagatagctatgtaattaacggcaaaaaatggtggagcagtggagctgggaatcccaagtgcaaagttgcaattgttttgggaagaactcaaaatacttctctctccagacacaaacagcacagcatgattcttggtcccatgaacacacctggagtaaaaataataaggcctttgtcagtttttggctacacagataattttcatggaggacattttgagatccattttaatcaagtgcgagttnctggcacaaatctaatactaggtggaaggtaggggatttgnaaatttccaanggccgccttgga

SEQ ID NO: 2326 - DNA, 747 bp, Homo sapiens
  misc_feature (698)..(698): "n" may be a, t, c, g, other or unknown
  misc_feature (701)..(701): "n" may be a, t, c, g, other or unknown
  misc_feature (741)..(741): "n" may be a, t, c, g, other or unknown
aagcaaaaagttctttatagagttggaagcaagacatcagaataatatcttcatagatgacataagtgacattgtggaaaaacacacagcatccacatttgacccatatgtgaaatactgcacaaatgaagtctaccaacaacgaacactacaaaaattgttagctaccaatccatcctttaaggaagtattgtcaaggattgagtcccatgaagactgtaggaacttacccatgatctcttttctcattctccccatgcagagggtgacccgccttcccctgctgatggatactatctgtcaaaaaacacctaaggactctccgaagtatgaagtctgcaaaagagccttgaaggaagttagcaagttggttcgactatgcaatgagggcgcccggaagatggaaaggactgagatgatgtacacaattaactcccagctggaatttaaaattaagccttttcctttagtctcctcttcccggtggttggtaaaaagaggtgaattgacagcctatgttgaagacactgtgcttttctcaagaaggacatccaaacagcaagtctacttctttctctttaacgatgtgctcattatcaccaagaagaagagtgaagaaagttacaacgtcaatgattattccttaagagatcagctattggtggaatcttgtgacaatgaagagcttaattcttctncanggaagaacagcttcacaatgctctattcaagacagaactntggcag

SEQ ID NO: 2327 - DNA, 781 bp, Homo sapiens
  misc_feature (690)..(690): "n" may be a, t, c, g, other or unknown
  misc_feature (723)..(723): "n" may be a, t, c, g, other or unknown
  misc_feature (781)..(781): "n" may be a, t, c, g, other or unknown
aaaacgagttcagggctcctgggcggccgccttttccagttccaggtgtgcagaggtgtcctctccccacgcgcggcgtgctgcacttggtcgctggctccgagatcgcgcggggccgccggaagcccaagacggtaccgggggccgcagccgcagccggcgccgccctccgccctccccaacagcaggccgagtcccgtagcatccggtagggaaatggtcgtgctttcggtccccgccgaagtcaccgtgatcctgttagatatcgaaggtaccacaaccccgattgctttcgtgaaggacattttatttccttacatcgaagaaaatgttaaagagtatctgcagacacattgggaagaagaggagtgccagcaggatgtcagtcttttgaggaaacaggctgaagaggacgcccacctggatggggctgttcctatccctgcagcatctgggaatggagtggatgatctgcaacagatgatccaggccgtggtagataatgtgtgctggcagatgtccctggatcgaaagaccactgcactcaaacagctgcagggccacatgtggagggcggcattcacagctgggcgcatgaaagcagagttctttgcagatgtagttccagcagtcaggaagtggagagaggccggaatgaaggtgtacatctattcctcaaggagtgtggangcacagaaactggtattcgggcattctacgganggagatattctttgagcttggtgatggcactttgatactaagaatggacacaaaagtn

SEQ ID NO: 2328 - DNA, 850 bp, Homo sapiens
  misc_feature (767)..(767): "n" may be a, t, c, g, other or unknown
  misc_feature (824)..(824): "n" may be a, t, c, g, other or unknown
  misc_feature (840)..(840): "n" may be a, t, c, g, other or unknown
caaaaatgaaaagccaggtaaagtttccaagggctgtaagaagcctgcaaaacaaaatgggaagaaagcaacctccaaagtgccctctgctcctcagtttgttcactccaatgatcatgccaatcgagaggctgaaataaagaagagggttgaggagatgagggagaagcagcaagctgcccaggagcaagaaagacaaaaacgcaggtctatcaagagctactgtgaggatatcctaagacgccaggaggagtttcagtgtaaggaagaagttttgcaggaattaaatatgtttcctcagctggatgacgaggccactatgaaggcttattacaaggagtccgtgaggtggtagaatactctgatgtgattctggaagtcctggatgccagagacccattaggctgctgctgctgcttccaaatgggggaggctatcctatgggcagaaggcaacaagaagctggtcctggtcttgaaaaagattgacctggaccccaaggaggttgtgaagtggctggattaccttcggaatgagttgccaactgtggctttcaaggccaggacccagcatcaggtcagctttggagctgaaaacctcatgagggttctggggaactattgctgccttggtgaaatgcgcacccacatccatatggacattgtaggccttccaatattgggaaaagcagcctgattaaaagcctgaagcacagccatgcatgcagtgtgggagccattcctggggtcacgaaattcatgcaggangtctacctggacaagttcatccggcttctggatgcttccagccattggttccagggnccaacttcaaaaggtngggcaccctt

SEQ ID NO: 2329 - DNA, 849 bp, Homo sapiens
  misc_feature (751)..(751): "n" may be a, t, c, g, other or unknown
  misc_feature (798)..(798): "n" may be a, t, c, g, other or unknown
  misc_feature (825)..(825): "n" may be a, t, c, g, other or unknown
ctgacgattagaacacagaagtttaaagcaatgttgtggatgtgtgaagagtttcccctctctctggtggagcaggtcattcccatcattgacctaatggctcgaacgagtgctcattttgcaagactgagagatttcatcaaattggaattcccacctggatttcctgtcaaaatagaaattcccttgtttcatgtcttaaatgcacggattacatttggaaatgttaatggctgtagcactgccgaagaatctgtatctcaaaatgtggaagggacccaggctgattcagcttcccacatcacaaactttgaggttgatcaatctgtgtttgaaattcccgaatcttactatgttcaagacaatggcagaaatgtgcatttgcaagatgaagattacgagataatgcagtttgccatccagcaaagtctgctggagtccagcaggagccaggaactttcaggaccagcttcgaatggagggatcagccagacaaacacctatgacgcccagtatgagagggccatccaggagagcctcctcaccagcacagaaggcctgtgccccagcgccctgagcgagacaagccgttttgataatgacttgcagctagccatggagctctctgccaaagagctagaggaatgggagctccggctccaggaggaagaggctgagctccagcaagtcttacagctgcactcactgacaaatagacctttcagcctgtgagcctctgcacaaagcagangctgtgggctgcacagatgctgtgtcaaccagggccctaaggctaanggcctggaccttgcgtgcatgcagcangcaacaactggcccttctttatgc

SEQ ID NO: 2330 - DNA, 908 bp, Homo sapiens
  misc_feature (745)..(745): "n" may be a, t, c, g, other or unknown
  misc_feature (813)..(813): "n" may be a, t, c, g, other or unknown
  misc_feature (837)..(837): "n" may be a, t, c, g, other or unknown
  misc_feature (896)..(896): "n" may be a, t, c, g, other or unknown
attttcttgccctattgaggaagatctaatgaagctcatcatcaaatatggcatgactgtagtgcaacattgtgtgagctgtcttggagctgttgtaaataaagtgacacaaaattttaaatttgtgtgggcttgtttcaatagatactatggtgccatttcaaaattaaaaagtcaacaccaagaggacccaaataacacttcacttctaacaaacaaaccagcacttcttagatcccttttcaccgttggagcactatgtcggcattttgattttgatctggaagattttaaaggcaacagcaaggttaacataaaagataaagtacttgaactattgatgtattttacaaaacactcagatgaagaagtacaaacaaacgctatcattggtctaggatttgcctttattcagcatccaagtctaatgttcgagcaagaagtgaagaatctatataataatattttatctgataagaactcctcagtcaatttaaaaatacaagtgttaaaaaaacctccagacctacctacaagaagaagatacacgtatgcagcaggcagatagagactggaagaaagttgcaaaacaggaagacttaaaagaagtgggtgatgtttcctcagggatgagtagttccatcatgcagctttatctcaaacaggtgcttgaggcattttttcacacccagtcaagtgtcgccactttgccctaaatgtcattgcattgactctaaatcaaggncttattcatccagttcaatgtgtgccatatttaattgctatgggcacagacccagaacctgctatgcngaacaaggctgatcagcaacttgngggaaatggccaaaaatatgctgggattcattcatatgaaaccatggctggtattgaanagtcttaccagg

SEQ ID NO: 2331 - DNA, 805 bp, Homo sapiens
  misc_feature (740)..(740): "n" may be a, t, c, g, other or unknown
  misc_feature (794)..(794): "n" may be a, t, c, g, other or unknown
  misc_feature (797)..(797): "n" may be a, t, c, g, other or unknown
aaaaaaaaaaaaaaaaaaatataatccacacctactactcaataccttagaaaatcttcgcttccctaataatgttgaaccagttacaaatcgttttattacacagtggcttaatgatgttgactgtttcttggggcttcatgacagaaagatgtgtgttctcggactctgtgctcttattgatatggaacagataccccaagttttaaatcaggtttctggacagattttgccggcttttatccttttatttaacggattgaaaagagcatatgcctgccatgcagaacatgagaatgacagtgatgatgatgatgaagctgaagatgatgatgaaaccgaggaactggggagtgatgaagatgatattgatgaagatgggcaagaatatttggagattctggctaagcaggctggtgaagatggagatgatgaagattgggaagaagatgatgctgaagagactgctctggaaggctattccacaatcattgatgatgaagataaccctgttgatgagtatcagatatttaaagctatctttcaaactattcaaaatcgtaatcctgtgtggtatcaggcactgactcacggtcttaatgaagaacaaagaaaacagttacaggacatagcaactctggctgatcaaagaagagcagcccatgaatccaaaatgattgagaagcatggaggatacaaattcagtgctccagttgtgccaagttctttcaattttggangcccacaccagggatgaattgagtatctctttctttcctgctgggggcctggantgnaaaacttg

SEQ ID NO: 2332 - DNA, 761 bp, Homo sapiens
  misc_feature (670)..(670): "n" may be a, t, c, g, other or unknown
  misc_feature (691)..(691): "n" may be a, t, c, g, other or unknown
  misc_feature (713)..(713): "n" may be a, t, c, g, other or unknown
acgtattttagaaacttgaaaaagaaactgacccagaacaagctcatcttgaagggggagttgataaccttactacatttgtgtgagtctcgggaccatgtggaactggctaaaaatgtcatttacaggtaccatgcagagaacaaaaatttcactttgggggagtataaatttggaccgctttttgtgaggttgtgttacgagttggatctcgaggaatctgcagtggagctcatgaaagaccagcatttacgaggtttcttctcagactccacatcattcaatattttgatggatatgttatttatcaaaggcaaatataaaagtgctttgcaagtattgatagagatgaaaaacctagatgtgaagttcaccaaagatacctatgttcttgcttttgcaatttgctacaaactgaatagccctgagtctttcaaaatctgtactacattaagagaagaagctctactcaaaggagaaattctctccaggagagcatcctgtttcgctgtggcattagctctgaatcagaatgagatggcaaaagctgtgtccattttttctcaaatcatgaatccagaaagcatagcctgcattaatttaaatattataatccatatccagtcaaatatgttggaaaacctgataaagactctaaaaaatgctgcanaaggaaattatcaaaatttgngaaaagacatgtgttctcggangaagtgctggccaaagtgagggaaaaagtgaaggatgtgcctgccttt

SEQ ID NO: 2333 - DNA, 843 bp, Homo sapiens
  misc_feature (688)..(688): "n" may be a, t, c, g, other or unknown
  misc_feature (705)..(705): "n" may be a, t, c, g, other or unknown
  misc_feature (761)..(761): "n" may be a, t, c, g, other or unknown
  misc_feature (808)..(808): "n" may be a, t, c, g, other or unknown
  misc_feature (823)..(823): "n" may be a, t, c, g, other or unknown
ttataagatgctactgagccttcctgaaaaggtcgtgtccccacctgaacctgagaaggaggaggcggccaaggaagaagccaccaaggaggaagaagccatcaaagaggaggtggtcaaggagcccaaggatgaggcacagaatgagggcccggctacagagtcagaggccccgctgaaggaggatgggcttttgcccaaaccactctcttctgggggagaggaagaagaaaaaccccggggcgaggcttctgaggacctgtgtgagatggccctggacccagaactgttgcttctgagggatgatggagaggaggagtttgcaggagcaaagctggaggattcggaggtccggtccgttgcctcaaaccagtcagagatggagttctcttcacttcaggacatgcccaaggagctggatccctctgctgtgctccccttagactgtctgcttgcttttgtgttctttgatgccaactggtgtggctacttgcaccggcgagacttagagaggatcctccttacccttgggatccggctcagtgcagagcaggccaagcagctggtcagcagggtggtgacccagaacatctgccagtaccggagccttcagtacagccgccaggagggcctggatggtggccttcccgaggaggtgctcttcggaaacctggacctgctgcccctnctgggaaaagcacgaanccaggtgctgcccccacagaacacaaagccctggtgtcccacaatggcagcctgantaacgtggggagcctgcttcacgcgcggacacaggacacggccggtntactaagacagatcnccctggactgaacttgagga

SEQ ID NO: 2334 - DNA, 784 bp, Homo sapiens
  misc_feature (696)..(696): "n" may be a, t, c, g, other or unknown
  misc_feature (720)..(720): "n" may be a, t, c, g, other or unknown
  misc_feature (777)..(777): "n" may be a, t, c, g, other or unknown
gtcaggccccccagtcttaggtggaaacagcaactccaactcctctggcggggctgggaccgttggtaggggactggtcagtgatggaacgtcccctggggaaagatggactcaccgttttgagaggctgagactcagtcggggagggggcgccttgaaggatggagcagggatggtgcagagggaagagctgctgagtttcatgggggctgaggaggcagcccctgacccagccggagtgggccggggaggaggggtggctgggcctccttcagggggaggagggcagcctcagtggcagaagtgtcgcctgctgcttcgaagtgaaggagaaggaggaggaggaagtcgcctggagttctttgtaccacccaaggcctctcggccccgactcagcatcccctgctcttctatcacagacgtccggacaaccacagccctggagatgcctgaccgggagaacacgtttgtggttaaggtggaaggtccatccgagtatatcatggagacagtggatgcccagcatgtgaaggcctgggtgtctgacatccaagaatgcctgagcccaggaccctgccctgctaccagtccccgccccatgaccctccctctggcccctgggacctcattccttacaagggagaacacagacagcctggagctgtcctgcctgaatcactcggagagtctacccanccaggacctgctgcttggacccancgagaagcaatgacccgcctgtccaagggggcatatggggggcctttttaaaaccgncccttgg

SEQ ID NO: 2335 - DNA, 843 bp, Homo sapiens
  misc_feature (704)..(704): "n" may be a, t, c, g, other or unknown
  misc_feature (755)..(755): "n" may be a, t, c, g, other or unknown
  misc_feature (765)..(765): "n" may be a, t, c, g, other or unknown
  misc_feature (836)..(836): "n" may be a, t, c, g, other or unknown
agaagtgtttgcatcatggaagcagcagtgcctgaaccgtggcaagcaagacatcagcgagaggctcatcagtgcctcattatttctccgttttctgtgtccagccattatgtctcccagtcttttcaaccttatgcaggagtatcctgatgaccgcacatctcggactctaactcttattgccaaggtcattcagaacctggccaactttgccaagtttggtaacaaagaggaatacatggcattcatgaatgattttttagaacatgaatggggtggaatgaagcgctttcttttggagatctctaatccagacaccatctcaaacaccccaggctttgatggttacattgatctgggccgagagctttcagttttgcattccttactgtgggaagtagtttcccaacttgataagggtgaaaattccttcctacaggcgaccgtggcaaaattggggcctctccctcgtgttcttgctgatattaccaagtcattgactaatcctacgccaatacaacagcaactgagacgcttcactgaacataactccagtccaaatgtcagtggaagcctctcctctgggctgcagaaaatatttgaagaccccactgacagtgatttgcataaactaaaatctccaagccaggacaacacagacagctacttcagagggaaaacattattgctggtcagcaagcctnctctcagagcatgacttattctgaaaaggatgaaaggggaaagtagccttnctaatgggcngacgtcttccttatggaccttcaggacactcatgctggtcaagtggagcatgcatctggcatgcctgatgngcctatc

SEQ ID NO: 2336 - DNA, 755 bp, Homo sapiens
  misc_feature (692)..(692): "n" may be a, t, c, g, other or unknown
  misc_feature (718)..(718): "n" may be a, t, c, g, other or unknown
  misc_feature (748)..(748): "n" may be a, t, c, g, other or unknown
attttatttgtaggagaggctcctgagcgctaggtccgcactgtggtgactgaacccagaagtcggggagcagttgtcctccgctgcacagaggctactctggagctctgtgacggcgcccagcgtgacccactcctgggccaggatacggaccgtcgtgcccatatctcctggctggtcgccctatcctcccgactctgcttaaaaccacgtggttcgatggctgccgcggctacgctgaggctctccgctcagggcacagtgacttttgaagatgtggctgtgaactttacctgggaggaatggaatctccttagtgaggctcagagatgcctgtaccgtgatgtgacgctggagaacctggcacttatatcctccctggtctatgcaacaaggtccagccagatgaagcctgtagccaggtagaactgtggtaatatcacctcctgactttgatccgttttatctctaagcatttcacaacctggtagcaaatcctgggttaatcttacaagggtgtttacattggttgacagaaatgggaatacctccatataacctgtcatggacttggtatcctggcttcagagattctccagggtcctcggatcaaaggactgaaaaaaatggcacttaagagtcccaggacaccacaagctagagaacctgtagatggcgtcaggaccaatganggaatggaacacccttcacttcctgngtgggttcctaagtgcttctgcaccaggantgcctga

SEQ ID NO: 2337 - DNA, 828 bp, Homo sapiens
  misc_feature (643)..(643): "n" may be a, t, c, g, other or unknown
  misc_feature (673)..(673): "n" may be a, t, c, g, other or unknown
  misc_feature (714)..(714): "n" may be a, t, c, g, other or unknown
  misc_feature (802)..(802): "n" may be a, t, c, g, other or unknown
  misc_feature (804)..(804): "n" may be a, t, c, g, other or unknown
  misc_feature (814)..(814): "n" may be a, t, c, g, other or unknown
atccatgttaagttcagcatcctgcattttgttcatgaatcacattttaaaaggagaaaagctcctaagtttttttaaacagtgatttcaaagagaagataggcctttcataattgctaattatacatataggattaatagtcataaattatagtaaataaaacttgtacctattccttttataaatatgaattggctaggcacagtggctcacagctgtggtcccggcactttgggaggctgaggcgggcagatcgcaaggtcaggtgtttgagactagcctggccaacatggcaaaaccctgtgtctactaaaaatacaaaaattagccaggcgtggtggcaggcacctgtaattccagctactcaggaagctggggcacgagaatcacttgaaccctggtggcagagtttgcagtgagctgagattgttccactgcattcctgggcactgcctgggtgacagaatgagactctgcctcaaaaaaaaaaaaagttattaaaaatagatatttaagattccaaaatgtagttgatccagtttgtttccctgtagcaagtagtgggatttgggtttcatgacatataattaaaatgttaatcacataactataatgccaacaattttctttatacatttttgnttaattatgttgacatatactttgtgttgnaccttatttcatgttactaaattttacataaagatgctggnctatttttatttaatcatatactggtatgggttgaatatagttggtcctaccaaaactcatggtgaaattagattccccatgggctangntgggaggcanaacctaatggaagg

SEQ ID NO: 2338 - DNA, 594 bp, Homo sapiens
  misc_feature (276)..(276): "n" may be a, t, c, g, other or unknown
  misc_feature (350)..(350): "n" may be a, t, c, g, other or unknown
  misc_feature (391)..(391): "n" may be a, t, c, g, other or unknown
  misc_feature (453)..(453): "n" may be a, t, c, g, other or unknown
  misc_feature (529)..(529): "n" may be a, t, c, g, other or unknown
  misc_feature (564)..(564): "n" may be a, t, c, g, other or unknown
  misc_feature (585)..(585): "n" may be a, t, c, g, other or unknown
ataaagatgcttcagactgcaaagaatttgttgaaagaggagaaattggtgcatagctatccgtatgactggaggaccaagaaacctgtggttattcgtgccagcaagcagtggtttataaacatcacggatattaagactgcagccaaggaattgttaaaaaaggtgaaatttattcctggatcagcactgaatggcatggttgaaatgatggacaggcggccatattggtgtatatcaaggcaaagagtttggggtgttccaattcctgtgttncatcataagaccaaggatgaatacttgatcaacagccaaaccactgagcatattgttaaactagtggaacaacncggcagtgatatctggtggactcttccccctgaacaacttnttccaaaagaagtcttatctgaggttggtggccctgatgccttggaatatgtgccaggtcangatattttggacatctggtttgatagcggaacttcatggtcttatgttcttccaggtcctgaccaaagagcagatntgtacttggaaggaaaagaccagctcgggggttgntttcagtcatccttattaacnagtgtggca

SEQ ID NO: 2339 - DNA, 736 bp, Homo sapiens
  misc_feature (723)..(723): "n" may be a, t, c, g, other or unknown
  misc_feature (731)..(731): "n" may be a, t, c, g, other or unknown
  misc_feature (734)..(734): "n" may be a, t, c, g, other or unknown
aagtcattctgtgcaattcctcagagctctgtgggagaagacccaggcagggggtgctcacagctttgaaactgccatgatggagtccacgtttccacagcagaaggatctggaccaggtacagctccatctggaagaagtgaggttctttgacgtgtttggcttcagtgaaacagcaggagcatggcaatgcttcatgtgcaacaatcctgagaaagcaactgttgtaaatcaagatggccagcctctcatagaaggaaaacttaaagagaagcaagtcagatggaagttcatcaaaaggtggaaaacacgctattttacactggctggaaatcaacttctgtttcaaaaaggaaagtctaaagatgaccctgacgactgcccaatagaactcagcaaagtacagagtgtgaaggctgtggccaagaaacgcagggaccgctctctcccccgggctttcgaaatcttcacagacaataaaacctatgtctttaaggccaaggatgagaagaatgcagaagaatggctccagtgcatcaacgtggcagttgcccaagccaaagaaagggaaagtagagaagtaaccacatatctgtagggatttataagtcagccatgacaattatacaccacaggcattgtattatcattgccaatgtcaagaaaaagagctaaatttaccaagccatgttggtttttactaaataccaatggaattggtgncctttaanaanaa

SEQ ID NO: 2340 - DNA, 840 bp, Homo sapiens
  misc_feature (699)..(699): "n" may be a, t, c, g, other or unknown
  misc_feature (823)..(823): "n" may be a, t, c, g, other or unknown
  misc_feature (825)..(825): "n" may be a, t, c, g, other or unknown
  misc_feature (837)..(837): "n" may be a, t, c, g, other or unknown
ttaaagcttccagaaccttcagcctcattgccaaatcctccatcaaagctcctctgcagctggtatgtttatctcctagatccagagaatggagaagccaatcataaaccacacctgactgcaaattgcagcgttccttcagcccaggccagatcccagatgagttaaactctgctccaagacagggaaataaacatgtgcaccagcttgtcagtgaggtcatttcttcagccagcaaagtaacggatgccttgagaatgtaaaatggacatattgtggatgttacaaactttccttctcccttgcattgttttcttggccttcaaggtagctaaaatgctcataattttttatgtcattccctgtataaaggtggtggtggctccaaagacattgtccttagaaaaggacagaaaattgaaagtacagcagtgtttgtttgggcctatgttcagcatgttgtcaaaaaaaaatgcatgttttactctcttggagaatagcactgggcagaagtctgttgctgtaagatctaaggactgctctaggccagacccatgcgtctttcattccggtagttaatctctgacagtagctctagaggacctagagaggcacagttgtcttgctgaaactaagagggtaggttctcagcgtgcttcttatttttcttcatccaaaaatgaagcagatttttttctnccaaatatctatcttccttagtaacttagagatcattcatggaattgatctaaacctattcttggaagctttaaccttgggatccttttggagtaatatggttcataactttaatcttctctgntnccggattctggnttc

SEQ ID NO: 2341 - DNA, 720 bp, Homo sapiens
  misc_feature (632)..(632): "n" may be a, t, c, g, other or unknown
  misc_feature (700)..(701): "n" may be a, t, c, g, other or unknown
gttagtctccgctgctagttcttggctctgggaggcccaggtggctctgcagcagcctctgccaccctgtgacctgcgagtattgggacatccctagctgacgccaggacacccgggaagccgaggaatggtgagtggactgcgcctggcttcccgaagtggagaagagggctggttgaaacctgctgtggcgcgactcgggcctccacgccatcggctccggaacctgcggaccgagtcgccgtggcgtagccggggctcagtcctcttctgttcagggccgggccgggcggggcgggcagcggaacccctgcatcctgtctgtacctgcgggcgccacttccgccggccggatccctgtcgggaacccctcgcctcccctatccaggactcggtggcttttgaggatgtggctgtgaactttacccaggaggaatgggctttgctagattcttctcagaagaatctctacagagaagtgatgcaggaaacctgtaggaacctggcttctgtaggaagccaatggaaagaccagaatattgaagatcacttcgaaaaacctgggaaagatataagaaatcatatcgtacagagactgtgtgaaagtaaagaagatggtcagtatggagaanttgtcagccaaattcaaatcttgatctgaacgagaacatttctactggattaaaaccatgtgaatgcnnatttggggaaaagtctttg

SEQ ID NO: 2342 - DNA, 724 bp, Homo sapiens
  misc_feature (683)..(683): "n" may be a, t, c, g, other or unknown
  misc_feature (686)..(686): "n" may be a, t, c, g, other or unknown
  misc_feature (707)..(707): "n" may be a, t, c, g, other or unknown
cttactgctggacttgttctttaagtacacctggaataactttttgcacttccaagtggaactatgcatagccgctattctctcccacgctgcccgtgaggagaggacagaagccagcggatccgagagcagggtggagcctccgcatgagaacgggaaccggagcctggagactccccagccggccgccagcctccctgacaacacaatggtgacccacctgttccagaagtgctgcctggtgcagaggatcctggaggcctgggaagccaacgaccacacgcaggcagcgggtggcatgagacgtgggaacatgggccacctcacacggatcgccaacgcggtggtgcagaacctggagcggggccctgtgcagacgcacatcagcgaggtcatccgagggctccctgcggactgccgtggccgctgggagagcttcgtggaggagacgctgacggagacgaaccgcaggaacactgtggacctggccttctctgactaccagatccagcagatgacagccaacttcgtggatcagtttggcttcaatgatgaggagtttgccgaccaggacgacaacatcaatgcctcgtttgacaggatcgcagagatcaacttcaacatcgacgctgacgaggacagtcccagcgcagctctgtttgaggcctgctgcagtgacccgnatncagccctttgatgatgatgangaccaggacatctggga

SEQ ID NO: 2343 - DNA, 667 bp, Homo sapiens
  misc_feature (582)..(582): "n" may be a, t, c, g, other or unknown
  misc_feature (655)..(655): "n" may be a, t, c, g, other or unknown
  misc_feature (663)..(663): "n" may be a, t, c, g, other or unknown
ttaattcaataaagtataatatgggtaaagtcatagagaaataattataaaagtgtatttatttctacctgtttgtctaactattcatacatcccctatctagcatttgtatatatgcacaagaacatgaagtagtgtttacttcatattaatgattggttttcccggatgatggggtttagactcatattgtctttcgccattttggtacttttcttcactgcttaaatgctttataatgtactttttttctttctgccaaaacaatttagtgagggtgtttttttaaacaaagatgttttcctcatattattaaagaggatttttctcagagaaatattaaaaagtaaattagttgatatttaaatgactaccttagttgatgtgctttccaccaaaagcctgaaccataagatgtgtgtacggtgtagcaggcataacaactgcatcccgtctcccagcactaggatagcaagtccccgtcgccccaccaagcaattcaatgggtgagtccaaggcattttgcatatttccagtttcagttgttgggggctgggtgtcagggcagtaaaaataatatgnctgctctcttttcagccacatggcttgaagaaacaattctcagatccgaaggtgctctttcctgaaaaattangcatgaanagaa

SEQ ID NO: 2344 - DNA, 779 bp, Homo sapiens
  misc_feature (640)..(640): "n" may be a, t, c, g, other or unknown
  misc_feature (683)..(683): "n" may be a, t, c, g, other or unknown
  misc_feature (753)..(753): "n" may be a, t, c, g, other or unknown
  misc_feature (770)..(770): "n" may be a, t, c, g, other or unknown
agaaagacaaaaggctgaaatggctttgcttatgatggatgaggacgaggacagtaagaaacacttcaattacaacaagattgtggagcaccagaatctgagcaaaaagaagaaaaagcagctcatgaaaaagaaggaattaatagaggatgactttgaggtaaatgttaacgatgcacggtttcaggcaatgtacacttcccacttgttcaatttggacccctcagatcccaatttcaagaaaacaaaagctatggaaaaaatccttgaggagaaggcccggcaaagagaacgaaaagaacaagaacttactcaggcaataaagaaaaaagagagtgagattgaaaaggaatcacaaaggaagtccattgatcctgctttgccaatgttgattaaatctataaaaaccaaaacagagcagtttcaagcaagaaaaaagcaaaaagtcaaataactggatgttacttatttttgaactgaatacatcttttcctaaaatgtacaaaaatagtaggagggaatatttattgggaacaaagctatctttcaagaacatgaataaaatctttttctggacatagtaaaatttttctccataaataattgtcttaattgtggatgactgacaaatttttattgnatattcctacagatcagtcataattaaattacctgcattatanggtttataaaatttttatattttacaatggtcagttctaactagtggaaagtactctagctttttaaaangctggttacaattctgngtaaaaatt

SEQ ID NO: 2345 - DNA, 850 bp, Homo sapiens
  misc_feature (724)..(724): "n" may be a, t, c, g, other or unknown
  misc_feature (793)..(793): "n" may be a, t, c, g, other or unknown
  misc_feature (810)..(810): "n" may be a, t, c, g, other or unknown
  misc_feature (842)..(842): "n" may be a, t, c, g, other or unknown
ttttcaagagcttgggatgttcttcttgaccatatacagtcagcagcactcagcaaaaacaatgaagtatctctggctgctctgaaaagcttccaggaaattttacagattgtgtcccctgtcagagactcagataagcctgagacaccacctgtagttaatgtacctgtgcctgttcttatagggcccatatcaggcatgagcaggccatttgtaagaacagattccattggagaaaaactagggagatatagtagctctgagccacccattgttactgatgagcttgaagatttgaatctatggtgggctgcgtggaatacctggtatagaattggatctgaaagtactaagcctcctattacttttgataaactaacttttattcctagccagccttttcttacagctttaattcagatatttccagctctctaccaacacataaaaactggtttcaatatggatgacttgcaaaagttgggagtcatattgcacagtgctatttcagtcccaataagttcagatgcatccccttttattcttccatcttataccgaagcagttttgacaagtttacaggaagctgtacttacagctttagatgttctccaaaaggccatttgtgtaggaccagaaaacatgcagataatgtatccagctatatttgaccagttgttggcatttgtagagttttcctgtaaaccttcacagtatggacagntggaaacaaagcacgttgcaaatgccaaatataatcaggcggaatgggtagccttgaattatgtgccgnttgctgaaaggctttanaagtagttggggattatccaaaaacaggtgtncaaacatg

SEQ ID NO: 2346 - DNA, 859 bp, Homo sapiens
  misc_feature (735)..(735): "n" may be a, t, c, g, other or unknown
  misc_feature (758)..(758): "n" may be a, t, c, g, other or unknown
  misc_feature (834)..(834): "n" may be a, t, c, g, other or unknown
  misc_feature (858)..(859): "n" may be a, t, c, g, other or unknown
actctaggcctttcggttcgcgcgagcgggcaggaaagcgtgcgtgcggctaagagagtgggcgctctcgcggccgctgacgatggaagaactggagcaaggcctgttgatgcagccatgggcgtggctacagcttgcagagaactccctcttggccaaggtttttatcaccaagcagggctatgccttgttggtttcagatcttcaacaggtgtggcatgaacaggtggacactagtgtggtcagccagcgagccaaggagctgaacaagcggctcactgctcctcctgcagctttcctctgtcatttggataatctccttcgcccattgttgaaggacgctgctcaccctagcgaagctaccttctcctgtgattgtgtggcagatgcactgattctacgggtgcgaagtgagctctctggcctccccttctattggaatttccactgcatgctagctagtccttccctggtctcccaacatttgattcgtcctctgatgggcatgagtctggcattacagtgccaggtgagggagctagcaacgttacttcatatgaaagacctagagatccaagactaccaggagagtggggctacgctgattcgagatcgattgaagacagaaccatttgaagaaaattccttcttggaacaatttatgatagagaaactgccagaggcatgcagcattggtgatggaaaagccctttgtcatgaatctgcaggatctgnatatggcagtcaccacacaagangtccaagtgggacagaagcatcaaggcgcttgagatcctcataccttaaaacaagtgctttccttgcaaggaatcnatagcccaatgggtaaaccagccnn

SEQ ID NO: 2347 - DNA, 832 bp, Homo sapiens
  misc_feature (761)..(761): "n" may be a, t, c, g, other or unknown
  misc_feature (793)..(793): "n" may be a, t, c, g, other or unknown
  misc_feature (828)..(828): "n" may be a, t, c, g, other or unknown
agacacaaggagaggcttggagagagcagacgccttctggattcaagaagacgaggcccattcccctcaggctcacctgttactcggcctcccagaaagatggataggagaaatgactacggatatagggtgcctctatttcagggccctctgcctcccccggggagcctggggcttcccttccctccagatatacagactgagaccacagaagaggacagtgtcctgctgatgcataccctgttggcggcaaccaaggactccctggccatggacccaccagttgtcaaccggcctaagaaaagcaagaccaagaaggcccctataaagactattactaaggctgcacctgctgcccctccagtcccagctgccaatgagattgccaccaacaagcccaaaataacttggcaggctttaaacctgccagtcattacccagatcagccaggctttacctaccactgaggtaaccaatactcaggcttcttcagtcactgctcagcctaagaaagccaacaagatgaagagagttactgccaaggcagcccaaggctcccaatccccaactggccatgagggtggcactatacagctgaagtcacccttgcaggtcctaaagctaccagtcatctcacagaatattcacgctccaattgccaatgagtcagccagttcccaagccttgataacctctatcaagcctaagaaagcttccaaggctaagaaggctgcaaataaggccatactagtgccaccgangtctcgctggctgcaactggcacccatacagnttccacccaaggccaaattaccaatgagacaagcngtat

SEQ ID NO: 2348 - DNA, 890 bp, Homo sapiens
  misc_feature (761)..(761): "n" may be a, t, c, g, other or unknown
  misc_feature (801)..(801): "n" may be a, t, c, g, other or unknown
  misc_feature (860)..(860): "n" may be a, t, c, g, other or unknown
  misc_feature (862)..(862): "n" may be a, t, c, g, other or unknown
atggacttttctcattggcctcatgtgctgcccttggagccagggggctgcatagactttcagacagagaacagctcccggcactgtcttgtgacctacaggcctgataaaaatcacaccaccatacgaagtgtgctgatggaaatgtcctaccgactggatgacactggaaatccaatctgctcctgccagcctgtacatacattttttggaggacctacttgcaaactattgaccaaaaatgccattttccaaagcccagagaatgatggcaacatcctggtgtgtactggggatgaagcagcaaattctgccctgctgtgggatgctgccagtggctcgttgctccaggacctacggaccgatcagcctgtgttggacatctgcccatttgaggtgaaccgtaacagctacttggctaccttaacagagaagatggtccacatctataagtgggagtgactgtggtctcgaaaccttgaaggcatgctgctggttagatgttgtttgctagcgcctagcagccccaagcaagatccctgtttattgtctgcagtctagaacattgggaatcatggtttgtttgcattagtatgattctaggaccctaggtcactgagacactacagattgtgtatctggtatgtccactaaaagagtaattgatgggtactttatctacattatccatttcttgggtttaaaagccttcattaaccattattggatgttggaaattcttaatttcttaatttctgggngactttctgggccttaaaaaagtggcctctcatcatctangatgtaatgggcattaagcattttctggggaatatgacatcccatctgagttggcctgncncttaagtatccttgaagggctaaccctc

SEQ ID NO: 2349 - DNA, 745 bp, Homo sapiens
  misc_feature (671)..(671): "n" may be a, t, c, g, other or unknown
  misc_feature (712)..(712): "n" may be a, t, c, g, other or unknown
  misc_feature (738)..(738): "n" may be a, t, c, g, other or unknown
ggggtgatcatggacgcttgacaacctgcgggcaggcgccgggaggccgagccagcgactaagaggaccgagaggtggcgtggacagatttcaaggccagagaatggcaggggaacagaaaccctcaagtaatctcctggagcagtttattttactagccaaaggtaccagtggctcagccctcactgctctcataagccaggtcttagaggctcccggagtgtatgtctttggagaacttctggagctggccaacgtgcaggagcttgcggaaggagctaatgctgcttatttgcagttgttgaacctgtttgcctatgggacatacccagattacatagccaacaaggagagcctgccagaactgagcacagctcagcagaacaagctgaagcatcttaccatcgtgagcttggcatcaagaatgaagtgtatcccctactccgtgttgctgaaagacctggagatgcggaatctccgggaactagaagaccttatcattgaggctgtctacactgacatcatccagggcaagctggaccagcgaaaccagctgctggaagtggatttctgcattggccgtgacatccgaaagaaggatatcaataatattgtcaagaccctgcatgaatggtgtgatggcttgtgaagcagttctactgggcatcgancaacaagttcttgagagccaaccagtacaaaagagaacccncaacccgaacttcaacaaccaggtanaaaaccc

SEQ ID NO: 2350 - DNA, 891 bp, Homo sapiens
  misc_feature (777)..(777): "n" may be a, t, c, g, other or unknown
  misc_feature (821)..(821): "n" may be a, t, c, g, other or unknown
  misc_feature (843)..(843): "n" may be a, t, c, g, other or unknown
  misc_feature (884)..(884): "n" may be a, t, c, g, other or unknown
attacgcgctcttaaggtttctccgtggtgttttggaaggtcccggcacggctaccgtcgccccacgctaggaaatttttttttattttcaacctttgttacatagcactgaggctacaagatcatagttcatttaaagcccccatccctgcaaggtggtgctttctaccaatatgaatcttttcaacctggaccgttttcgctttgagaaaaggaataagattgaggaagcgcccgaagcaacccctcaaccttcccagcctggcccttcttcaccaatttctcttagtgctgaagaggagaatgctgaaggggaagttagcagggcaaacactcctgattcagatataactgaaaaaacagaagattctagtgttccagaaactccagataatgaaagaaaagcaagtatatcatatttcaaaaatcaaagaggaatacagtatattgatttgtcttctgatagtgaagatgtcgtttccccaaattgctccaatacagttcaagagaaaacattcaacaaagatacagtgattatagtttctgagccatctgaagatgaagagtcccaaggccttcctaccatggcacgtagaaatgatgatatttcagaactggaagacctttcggaattggaagaccttaaagatgctaaacttcagactttgaaggaactttttccacaaagaagtgacaatgatttacttaagttgattgaatcaacaagcactatggatggagcaattgctgctgccttgctgatgtttggtgatgcangtggtgggcccaggaaaagaaaattatcttcttcttcagagccntatgaggaagatgaatttaaangatgatcaatctattaaaaaggaccagactggatcatgganaggaatc

SEQ ID NO: 2351 - DNA, 664 bp, Homo sapiens
  misc_feature (582)..(582): "n" may be a, t, c, g, other or unknown
  misc_feature (587)..(587): "n" may be a, t, c, g, other or unknown
  misc_feature (626)..(626): "n" may be a, t, c, g, other or unknown
acgatgcctgagatcagagtcacgcccttgggggccggccaggacgtgggccgaagctgcatcctggtctccattgcgggcaagaatgtcatgctggactgtggaatgcacatgggcttcaatgacgacgtgagtcccttgggcaggaggcccagaggctgggagagccggccatccacagctggaccctgggcctcagagccgggacagtggggtggtgggcagcagtggttgtgcttggatggctgcaccctgtggggagcagggatgggtgggcctggccgaggtgagcccctgcatggtggggtccccctgtgctggcgctgagccccagccccggggtcctgtaggctggactccgtgagaccctgggctcagcttccagctcacatctgtcagtgaggttgggggtaacctcggcccctccggatgctgtgagcagccaggggtcctggtgccacctgcgggatgggagtgcccagcctgagtctgcacatagaaccccccttcctgggggcccctccctggggcatgggtggccccagatgctgcctggagaccactgtgcaacctgaaaccccnacatncttctagcgacgcttccctgacttctctacatcacccanaacggccgctaacagacttctggactgtgtgatcatta

SEQ ID NO: 2352 - DNA, 800 bp, Homo sapiens
  misc_feature (714)..(714): "n" may be a, t, c, g, other or unknown
  misc_feature (780)..(780): "n" may be a, t, c, g, other or unknown
  misc_feature (793)..(793): "n" may be a, t, c, g, other or unknown
aaagggaccgaaacccttcagggaagtcattgcagggcccttgcttagaaacaatgggcagtctctggagagcagcagcctggaggggtctcacgtgggcgtctatttctccgcacattggtgtccgccctgccgaagcctcacccgggtcctggtggaatcctaccggaagatcaaggaggcaggccagaacttcgagatcatcttcgttagtgcagacaggtcggaggagtccttcaaacagtacttcagtgagatgccctggctcgccgtcccctacacggatgaggcccggcggtcgcgcctcaaccggctgtacggaatccaaggcatccccacgctcatcatgctggacccgcagggcgaggtgatcacgcggcaggggcgggtggaggtgctgaacgacgaggactgccgggagttcccctggcaccccaagcccgtgctggagctctccgactccaacgccgcgcagcttaacgagggcccctgcctcgtcctttttgtagattctgaggatgacggagagtccgaggcggccaagcagctgattcagccgatagctgagaaaatcattgccaagtacaaagccaaagaggaggaggcaccccttctgttcttcgtagcccggggaggatgacatgactgactccctgcgagattacaccaacctgcctgaggctgcccctttgctcaccatcctggacatgtcancccgggccaaataccttgatggacgtggaaggagatcacccccggcattcgtgggaggccttttgnggaaatgactttncttaacc

SEQ ID NO: 2353 - DNA, 751 bp, Homo sapiens
  misc_feature (708)..(708): "n" may be a, t, c, g, other or unknown
  misc_feature (737)..(737): "n" may be a, t, c, g, other or unknown
  misc_feature (749)..(749): "n" may be a, t, c, g, other or unknown
caaaccaattgtccaaatagcagtgatagaaaattctgaatcactggactgtcagttattggctgtcacacatgcaggtgttaggttatattttagcacttgtccattcagacagccattagcacggcctaatacactgacgctggttcatgtccgcttacctcctggattctcagcatcttcaaccgtggaaaagccttcaaaagtacatagagctctttatagtaaaggtattctattgatggcagcctcagaaaatgaggataatgatattttatggtgtgtcaaccatgatacttttcctttccaaaagccaatgatggaaacccagatggcagctggtgttgatggtcattcctgggctctttctgcgatagatgaattgaaagtagataaaataattacacctttaaacaaggatcatattccaataactgattcaccagttgttgtacagcagcacatgttacctccgaagaaatttgttctcctctcagcacaggggagccttatgtttcataaacttagacctgtagatcaactgaggcatctacttgtgagtaatgtgggaggagatggagaagagattgaaagattctttaaattacatcaggaagaccaggcttgtgcaacttgccttattcttgcttgctccactgctgcctgtgatagagaagtatctgcctgggctactcgggctttctttangtatggtggtgaagcacagatgagatttncaaccactcttncg

SEQ ID NO: 2354 - DNA, 784 bp, Homo sapiens
  misc_feature (694)..(694): "n" may be a, t, c, g, other or unknown
  misc_feature (758)..(758): "n" may be a, t, c, g, other or unknown
  misc_feature (769)..(769): "n" may be a, t, c, g, other or unknown
atttgggagcggccccgagacgcgcctggcgcggatcctaaatcccgacagctttatagagcccaggcctggcaggctcccagaacttgaagccaccagaccccacatggaaccaaaggcctcctgtccagctgctgcacccttgatggagagaaaattccatgttcttgtgggtgtcacggggagtgtcgcagccctgaagttgcctcttctggtgtcaaagcttttggacattcctgggctggaagtatcagtggtcacaactgagagagccaaacatttctacagcccccaggacattcctgtcaccctctacagcgacgctgatgaatgggagatgtggaagagccgctctgacccagttctgcacattgacctgcggaggtgggcagacctcctgctggtggctcctcttgatgccaacactctggggaaggtggccagtggcatctgtgacaacttgcttacctgcgtcatgcgggcctgggaccgcagcaagcccctgctcttctgcccggccatgaacaccgccatgtgggagcacccgatcacagcgcagcaggtagaccagctcaaggcctttggctatgtcgagatcccctgtgtggccaagaagctggtgtgcggagatgaaggtctcggggccatggctgaagtggggaccatcgtggacaaagtgaaagaagtcctcttncagcacagtggctttcagcagagttgacctgggatttctgtcatgggtgtccctctgtactcanaatgggttcangcccaagtcggtgaa

SEQ ID NO: 2355 - DNA, 777 bp, Homo sapiens
  misc_feature (642)..(642): "n" may be a, t, c, g, other or unknown
  misc_feature (761)..(761): "n" may be a, t, c, g, other or unknown
  misc_feature (766)..(766): "n" may be a, t, c, g, other or unknown
  misc_feature (769)..(769): "n" may be a, t, c, g, other or unknown
aaaacaaaataaggatttccagaatgcatttaagatacacaatgccatcacagtacacatgaacaaggccagtcctccatttcctcttatctccaacgcacaagatcttgctcaagaggtacaaactgttttgaagccagttcatcataaggaaggacaagaactaactgctttgctgaatactccacatattcaggcacttttactggcccacgataaggttgctgagcaggaaatgcagctagagcccattacagatgagagagtttatgaaagtattggccagtatggaggagaaactgtaaaaatagttcgtatagaaaaggctcgtgatattccgttgggtgctacagttcgtaatgaaatggactctgtcatcattagccggatagtaaaagggggtgctgcagagaaaagtggtctgttgcatgaaggagatgaagttctagagattaatggcattgaaattcgggggaaagatgtcaatgaggtttttgacttgttgtctgatatgcatggtactttgacttttgtcctgattcccagtcaacagatcaagccgcctcctgccaaggaaacagtaatccatgtaaaagctcattttgactatgacccctcagatgacccttatgttccatgtcnagagttaggtctgtcttttcaaaaaggtgatatacttcatgtgatcagtcaagaagatccaactggtggcaggcctacagggaaagggaccaagataatcaacctctacccgggcttgntccanggnaaagcttt

SEQ ID NO: 2356 - DNA, 812 bp, Homo sapiens
  misc_feature (722)..(722): "n" may be a, t, c, g, other or unknown
  misc_feature (762)..(762): "n" may be a, t, c, g, other or unknown
  misc_feature (808)..(808): "n" may be a, t, c, g, other or unknown
ttatttacctttttactttttaaaaaattcttgtgaagttactttgtgagttttccaggatgtgtgtaaactacacacatcagccacctaggtagttttgagttgctttgaagttcagctgttgttgacttcaaaggcagcagcttatgaaagttggagaaatagaacattttccagtccctattcaggggttggtgacctccgtggcccccagcctcgtggctttgggctttggaaggctggtgtctggtctcactgatggctacaggctggactcacccccaccatctctgtcctcaccaaccctgtccccagccccctggctcatccccagtatcctctacaaacctgctcctactcgggtccagggcaggaggctgagcactgtgggccatcctgggagcctcaggctgcacaggttgctgaccttggactgtaagggctgggtacgaaggcagaaggtggggattctcaggcaatgcagcaggcctgcgagagactctggggaggagcaacagggctctctaaattgccacctgcaagtggctgcgtcctcctaccatggggcacccaggacccagctcaggcttgcacctgggttcttccttgttgaacctgtggcaaagcaaggaggagacttggtctactccctcctgggcagcctctgctgactgccctataggtgctgggcactgtgtctgggacacaagagactgtgaaangcctcctcttccacaagtggaaaactgccagcagcatgangaaggccgggttcatgccagggtcccttggcaaggccctgaagggnccaa

SEQ ID NO: 2357 - DNA, 873 bp, Homo sapiens
  misc_feature (818)..(818): "n" may be a, t, c, g, other or unknown
  misc_feature (826)..(826): "n" may be a, t, c, g, other or unknown
  misc_feature (858)..(858): "n" may be a, t, c, g, other or unknown
aatcaatagttgcccagtgaaatcactgtcttcgttgcctgtagctgatttttaaaagcattggtgctgatgagaccgtccaaggacaaggaggtcggaggctgatcagcttctctctctcagatttccaagccatggggttgaagaaagggatgtttttcaacccagacccttatctgaagatttccattcagcctgggaaacacagcatcttccccgccctccctcaccatggacaggagaggagatccaagatcataggcaacaccgtgaaccccatctggcaggccgagcaattcagttttgtgtccttgcccactgacgtgctggaaattgaggtgaaggacaagtttgccaagagccgccccatcatcaagcgcttcttgggaaagctgtcgatgcccgttcaaagactcctggagagacacgccatagggtaaacctgtgactgagatcttactatcactaggttcccaccaacaggtcgtgcccaaaggtggcctgtaggctgcaatagtatagtctcacagagagtcaaaatggtatcattatatttcctttgtttttcctactaattatgttgcctgagccaacataagtgtttgttatattaaacaaacccatcccttttcacttgatgtgtaacactggttacttacccaagagagtaaaaaatcctattaaaaatattaaacagtattaaaagaagccctcaatggggcatttttctgtacaggtagaaactaaaggttggtttactatgaagaatattatttcattcatatgccatctggggatgtaaagatttaatcatatgngacatttncataacaggatggaatactgggtaactactgnagaagttcttactta

SEQ ID NO: 2358 - DNA, 695 bp, Homo sapiens
  misc_feature (618)..(618): "n" may be a, t, c, g, other or unknown
  misc_feature (679)..(679): "n" may be a, t, c, g, other or unknown
  misc_feature (690)..(690): "n" may be a, t, c, g, other or unknown
gctaaagagcgcgggtcctcggccgtggagggtcaagtggcttcttctgagcgctgagggaggggagcgtgcgtaggggatggtgccagcgctgcgttatttggttggtgcctgcggacgggcccgcgggcttttcgccggtggctcccctggggcgtgcgggttcgcgtctgggaggccaagaccgctgtgtggaggtagccgcagcgccagcaccagctcatttgatatagtcatcgttggtggcggaattgtggggcttgcctctgccagagcactcatcctgcgacatccatcactttctattggtgttctggaaaaggagaaagatttagctgttcaccagactggacataacagtggtgtcatacatagtggaatttattataaacctgagtctctgaaagccaaattatgtgtacaaggtgcagccctcctctatgagtactgtcagcaaaaggggatttcctacaagcagtgtggcaagcttatagtagctgttgaacaagaagaaattcccagacttcaggccctatatgagaaaggcctccagaatggtgtcccgggcctgaggctgatccagcaggaggatataaaaaagaaggagccatattgtangggtctaatggctattgattgtcacatactggcattgtggactatcggcaggtggctttgncatttgcccangattt

SEQ ID NO: 2359 - DNA, 868 bp, Homo sapiens
  misc_feature (773)..(773): "n" may be a, t, c, g, other or unknown
  misc_feature (854)..(854): "n" may be a, t, c, g, other or unknown
  misc_feature (866)..(866): "n" may be a, t, c, g, other or unknown
agctgtgttttattgcacacctaaatcctgattataggcttttcatttctccgcaaagcctttattttggcagttaagccaaatgtgttttccagaaagttagttattttctcctctttctttcctttctttcctccctttttcccgtctgaccccaaacgttattgtccaaacatgactggacagcagcttttgtttcttgaccctgtaatatgacagtctgctaatattgacagaaggtgcagtttttgggttatagtcgtgattttcgctaatcaatcatattagcaggaaaaaaaatgacttgtttctgttgtacttgagtcttaagaaaaagtgcccatagtttagtgacaatttccaaaggctttagtaccacctgtatttcaaaatgggggacccaaactcccggaagaaacaagctctgaacagactacgtgctcagcttagaaagaaaaaagaatctctagctgaccagtttgacttcaagatgtatattgcctttgtattcaaggagaagaagaaaaagtcagcactttttgaagtgtctgaggttataccagtcatgacaaataattatgaagaaaatatcctgaaaggtgtgcgagattccagctattccttggaaagttccctagagcttttacagaaggatgtggtacagctccatgctcctcgatatcagtctatgagaagggatgtaattggctgtactcaggagatggatttcattctttggcctcggaatgatattggaaaaaatcgctgggctnctggtttctaggggggaaagaatctgatgagcctttaaggccggtcaagcccaaattggagtttcatcatgggggactttnaaaaaccagttntg

SEQ ID NO: 2360 - DNA, 759 bp, Homo sapiens
  misc_feature (700)..(700): "n" may be a, t, c, g, other or unknown
  misc_feature (703)..(703): "n" may be a, t, c, g, other or unknown
  misc_feature (715)..(715): "n" may be a, t, c, g, other or unknown
cttagcctatgctggctacatcccttatccgaaggaggaactccctttaaggagcagccccagccctgctaacagcactgctggtaccattgacagcgacagctgggacgcgggtttctcagacatcgcgtcctcagtgcccttgccagtctctgaccgctgctttagccacctgcagcctactctcttgcagcgagccaagcccagtaacttcctgctggacagaaagaaaacggacaagctgaagaagaagaagaagaggaagcgcagggacagtgatgcgcctgggaaagaggggtacagggggggcttgctgaagctggaagccgctgacccctacgtggagacccccacgagtcccaccttgcaggatatcccccaggctcccagcgacccctgctcgggctgggactccgatactccctcgagtggatcttgtgccactgtgtcacctgatcaggtcaaagaaataaaaactgaaggcaaacggactatcgtccggcagggaaagcaggtggtgttccgagatgaggacagcactggcaatgatgaggacatcatggtggactcagatgacgattcctgggacctcgtgacctgcttctgcatgaagccatttgccggccggcccatgatcgagtgtaatgagtgccacacctggattacctgtcctgtgcgaaaatccggaaatccaatggtncanaatgtttgctgncaaaagtgccgggacttcaagtttgacatccgccgttcaaccgt

SEQ ID NO: 2361 - DNA, 792 bp, Homo sapiens
  misc_feature (742)..(742): "n" may be a, t, c, g, other or unknown
  misc_feature (751)..(751): "n" may be a, t, c, g, other or unknown
  misc_feature (777)..(777): "n" may be a, t, c, g, other or unknown
cacatttttgcccaaatgttaaacttaaagctcagacatatgaactccaggaaagtaatgttcaattgaaattgaccattgtgaatacagtgggatttggtgaccaaataaataaagaagagagctaccaaccaatagttgactacatagatgctcagtttgaggcctatctccaagaagaactgaagattaagcgttctctctttacctaccatgattctcgcatccatgtgtgtctctacttcatttcaccgacaggccactctctgaagacacttgatctcttaaccatgaagaaccttgacagcaaggtaaacattataccagtgattgccaaagcagatacggtttctaaaactgaattacagaagtttaagatcaagctcatgagtgaattggtcagcaatggcgtccagatataccagttcccaacggatgatgacactattgctaaggtcaacgctgcaatgaatggacagttgccgtttgctgttgtgggaagtatggatgaggtaaaagtcggaaacaagatggtcaaagctcgccagtacccttggggtgttgtacaagtggaaaatgaaaaccactgtgactttgtaaagctgcgggaaatgctcatttgtacaaatatggaggacctgcgagagcagacccataccaggcactatgagctttacaggcgctgcaaactggaggaaatgggctttacagatgtgggcccagaaaacaagccagtcagtgntcaagaganctatgaagcccaaaggacatgagttncatgggggaaccgtc

SEQ ID NO: 2362 - DNA, 916 bp, Homo sapiens
  misc_feature (596)..(596): "n" may be a, t, c, g, other or unknown
  misc_feature (740)..(740): "n" may be a, t, c, g, other or unknown
  misc_feature (793)..(793): "n" may be a, t, c, g, other or unknown
  misc_feature (878)..(878): "n" may be a, t, c, g, other or unknown
  misc_feature (888)..(888): "n" may be a, t, c, g, other or unknown
  misc_feature (902)..(902): "n" may be a, t, c, g, other or unknown
aattttcctcaagaggtgaaagatcttctctcctgcaatcataccgtattggatccagatctgcgaatgacattttgcaaagctttgatcttgctgagaaataagaatctcatcaatccatcaagcctgctagaactcttctttgaactttttcgttgccatgataaacttctgcgaaagactttatacacacatattgtgacggatatcaagaatataaatgcaaaacacaagaacaataaagtgaatgtagtattgcaaaatttcatgtacaccatgttaagagatagcaatgcaaccgcagccaagatgtctttagatgtaatgattgaactctacagaaggaacatctggaatgatgcaaaaactgtcaatgttatcacaactgcatgtttctctaaggtcaccaagatattagttgccgctttgacattctttcttgggaaagatgaagatgaaaaacaggacagtgactccgaatctgaggatgatggaccaacagcaagagacctgctagtacaatatgctacagggaagaaaagttccaaaaacaagaaaaagttggaaaaggcaatgaaagtgctcaagaaacaaanaaagaagaaaaaaccagaggtgtttaacttttcagccattcacttgattcatgatccccaagattttgcggaaaaactactaaagcagcttgagtgctgtaaggagaggtttgaagtgaagatgatgctcatgaaccttatctncagattggtgggaatcatgagcttttcctcttcaattctatcccttttgcaangttctgcagcccaccaagagaagtaccaagatcctctggttgctgacaagcatttatcactagtccccagagatattcatcatgnttatgactgnggcaacaatttgtncgccagacttggaa

SEQ ID NO: 2363 - DNA, 778 bp, Homo sapiens
  misc_feature (744)..(744): "n" may be a, t, c, g, other or unknown
  misc_feature (748)..(748): "n" may be a, t, c, g, other or unknown
  misc_feature (770)..(770): "n" may be a, t, c, g, other or unknown
tcagccttgacctcagttggaccaacatctctaaaaagcaactgacatggctcgtcaataggctgccaggactgaaagacctcctcctagcaggctgctcctggtctgcagtctctgccctcagcacctccagctgcccccttctcaggacccttgatcttcggtgggcagtaggaatcaaggaccctcaaattcgggacttgcttactccaccggctgataaaccaggtcaggacaatcgcagcaagctccggaacatgaccgacttccggctggcaggccttgacatcacagatgccacgcttcgcctcataattcgccacatgcccctcctgtctcgactcgacctcagtcactgcagccaccttacagatcagtcctccaatctactcactgctgtcgggtcttccactcgctactctctcacagagctcaatatggcaggttgcaataaattgacagaccagaccctgatctacctacggcgcattgccaacgtcaccttgatcgaccttcgaggatgcaagcagatcactcgaaaagcctgcgagcacttcatctcagacttgtccatcaacagcctctactgcctgtctgacgagaagctgatacagaagatcagctaagacacacccagcccagattcaacaggaaaccgatcttcccctgactccccaccgaggagagcctctcctcgaccctgcacgggctctgaggccagcgtcacacttcctctctgctctnctgncccttgagccctttctctacangtggggca

SEQ ID NO: 2364 - DNA, 737 bp, Homo sapiens
  misc_feature (632)..(632): "n" may be a, t, c, g, other or unknown
  misc_feature (652)..(652): "n" may be a, t, c, g, other or unknown
  misc_feature (728)..(728): "n" may be a, t, c, g, other or unknown
  misc_feature (735)..(735): "n" may be a, t, c, g, other or unknown
catcacagcagccagcgctgtgtctggtatcattgctgacctcgacaccaccatcatgttcgccactgctggcacgctcaatcgtgagggtactgaaactttcgctgaccaccgggagggcatcctgaagactgcgaaggtgctggtggaggacaccaaggtcctggtgcaaaacgcagctgggagccaggagaagttggcgcaggctgcccagtcctccgtggcgaccatcacccgcctcgctgatgtggtcaagctgggtgcagccagcctgggagctgaggaccctgagacccaggtggtactaatcaacgcagtgaaagatgtagccaaagccctgggagacctcatcagtgcaacgaaggctgcagctggcaaagttggagatgaccctgctgtgtggcagctaaagaactctgccaaggtgatggtgaccaatgtgacatcattgcttaagacagtaaaagccgtggaagatgaggccaccaaaggcactcgggccctggaggcaaccacagaacacatacggcaggagctggcggttttctgttccccagagccacctgccaagacctctaccccagaagacttcatccgaatgaccaagggtatcaccatggcaacccgccaangccgttgctgctggcaattnctgtcgccaggaagatgtcattggcacagccaatctgagcccgccgtgctattgcagatatgctttgggctttgcnagggaanca

SEQ ID NO: 2365 - DNA, 774 bp, Homo sapiens
  misc_feature (691)..(691): "n" may be a, t, c, g, other or unknown
  misc_feature (753)..(753): "n" may be a, t, c, g, other or unknown
  misc_feature (766)..(766): "n" may be a, t, c, g, other or unknown
acctgtcgccatccccggctccctgcccagagcaccatcgctacactcgccatcctctgcgtccacctcgccgctcggttcgctgtcccagcccctcccagggccggtgggctcctcagccatgacgcctccccagcagccgccacccctgcgttcagagccgggcacactgggctctgcagcctcatcctacagccccctaggtttgaacggtgtccccgggagcatctgggactttgtttccggcagcttctcccccagcccctcccccgtcctgagtgccggccccccatcctcttcgagtgcaagtccaaacggagctgagctggcccgggtcaggcggcagctggacgaggccaagaggaagatccggcagtgggaggagtcctggcagcaggtgaagcaggtctgcgatgcctggcagcgagaggcgcaggaggccaaggagcgtgcccgtgtggccgatagcgaccggcagctggcgctgcagaagaaggaggaggtggaggcacaggtgaagcagctgcaggaggagctggagggcctgggcgtagcctccacactgccggggctgcggggctgtggggacatcggcaccattcccctgccgaagctgcactcgctgcagagtcagctgcgcctggacctggaggcggtggacggcgtgatcttccagcttcgcgccaagcantgtgtggcctgccgggagcgggcccacggtgcttgtctgggggccctgtcaagcaccacatncttttgggaaccntgtgccgg

SEQ ID NO: 2366 - DNA, 768 bp, Homo sapiens
  misc_feature (681)..(681): "n" may be a, t, c, g, other or unknown
  misc_feature (709)..(709): "n" may be a, t, c, g, other or unknown
  misc_feature (754)..(754): "n" may be a, t, c, g, other or unknown
aaaaagcctgtttggtggtctcttcacacggacgcgcatgaaatttggtgccatgactcggatcgggggacctcccttgggagatcaatcccctgtcttcctgttctttgctccgtgagaaagatccacctacaacctcaggtcctcagaccgaccagcccaaggaacatctcaccaattttaaatcagctccaggagaatgggtgacttgaactggcaaggagcaacctgctctctccacgggcctctggaaccccggcaagagaagatcccttgatcaccatggacactcaagttggcaagaagagctccttagagaagtcgtgggagggcaagcaagctgatgtggagccaggacgatttgatgtgggagcacctgcagtggagcacagccagggagagccatctccccaggcctgacttgctcccataggagactttagccctaggggaactgtccatcctgatctctgcagggtggtcttgtccatcagacagggctgattcgacctgagcaccccttggtctgctggcctttctggggtcccagcctggccagacctgcttgcagggcagtcttgggtgccctggaggccacgccatagcttctgtgctggcagatagtatctgactggtggagagctccagcaaggctgcccctaggccacacaccagcccatncaccccttcccacactggagcttcctangcccaggaaacttctacgtgtctttgctggcacaagtctgcacangtagggtttgcctt

SEQ ID NO: 2367 - DNA, 871 bp, Homo sapiens
  misc_feature (762)..(762): "n" may be a, t, c, g, other or unknown
  misc_feature (824)..(824): "n" may be a, t, c, g, other or unknown
  misc_feature (838)..(838): "n" may be a, t, c, g, other or unknown
tcatggaatacgcgagtgggggtgaagtatttgattacttagttgcccatggaagaatgaaagagaaagaggcccgtgcaaaatttaggcagattgtatctgctgtacagtattgtcatcaaaagtacattgttcaccgtgatcttaaggctgaaaaccttctccttgatggtgatatgaatattaaaattgctgactttggttttagtaatgaatttacagttgggaacaaattggacacattttgtggaagcccaccctatgctgctcccgagcttttccaaggaaagaagtatgatggtcctgaagtggatgtgtggagtctgggcgtcattctctatacattagtcagtggctccttgcctttcgatggccagaatttaaaggaactgcgagagcgagttttacgagggaagtaccgtattcccttctatatgtccacagactgtgaaaatcttctgaagaaattattagtcctgaatccaataaagagaggcagcttggaacaaataatgaaagatcgatggatgaatgttggtcatgaagaggaagaactaaagccatatactgagcctgatccggatttcaatgacacaaaaagaatagacattatggtcaccatgggctttgcacgagatgaaataaatgatgccttaataaatcagaagtatgatgaagttatggctacttatattcttctaggtagaaaacccctgaatttgaaggtggtgaatcgttatccagtggaaacttgtgtcagangtccgggccatagtgacttaaacaacagcactttttaatcccctgctcacctgaaggtccanagaagtatcttcancaaatcagaagccaccggcgtttcaatggatca

SEQ ID NO: 2368 - DNA, 803 bp, Homo sapiens
  misc_feature (776)..(776): "n" may be a, t, c, g, other or unknown
  misc_feature (794)..(794): "n" may be a, t, c, g, other or unknown
  misc_feature (796)..(796): "n" may be a, t, c, g, other or unknown
tttgacaacaacagttttgaacaattctgtatcaattactgcaatgagaaactgcagcagctatttattcagctggttctgaagcaagaacaagaggaataccagcgggaagggatcccctggaaacatattgactacttcaacaatcagatcattgttgacctcgtggagcaacagcacaaagggatcattgcaatccttgatgatgcttgcatgaatgtcggcaaagtcaccgatgaaatgtttcttgaagcacttaacagtaaattgggcaaacacgcccatttttccagccgaaagctctgtgcctcagacaaaattctggagtttgatcgagattttcgaattcgacattatgcaggcgatgtagtctattctgtcattggttttattgacaaaaataaagatactttatttcaagatttcaagcgccttatgtataacagttcaaatcctgtgctcaagaatatgtggcctgaaggcaaactgagcattacagaggtgaccaagcgacctctgactgctgctaccttgtttaagaattctatgattgctctagtagacaaccttgcatcaaaggaaccatattacgttcgttgcatcaaacccaatgacaagaaatctccacagatatttgatgatgaacgctgccggcaccaagtagaatatcttggactactggaaaatgtgagagtgcgtcgggcaggatttgccttccgccagacataccagaagtttcttcacaggtataagatgatctctgaattcacctgggnccaccatgaccttccttnanacaaaga

SEQ ID NO: 2369 - DNA, 821 bp, Homo sapiens
  misc_feature (744)..(744): "n" may be a, t, c, g, other or unknown
  misc_feature (796)..(796): "n" may be a, t, c, g, other or unknown
  misc_feature (799)..(799): "n" may be a, t, c, g, other or unknown
ggtccacggaggtctatgagactcaggctggtgccttaataaatgtggagctagctctgaggagaggcctacaaatgaaatgtgtcttctgtcacaagacgggtgccactagtggatgccacagatttcgatgcaccaacatttatcacttcacttgcgccattaaagcacaatgcatgttttttaaggacaaaactatgctttgccccatgcacaaaccaaagggaattcatgagcaagaattaagttactttgcagtcttcaggagggtctatgttcagcgtgatgaggtgcgacagattgctagcatcgtgcaacgaggagaacgggaccatacctttcgcgtgggtagcctcatcttccacacaattggtcagctgcttccacagcagatgcaagcattccattctcctaaagcactcttccctgtgggctatgaagccagccggctgtactggagcactcgctatgccaataggcgctgccgctacctgtgctccattgaggagaaggatgggcgcccagtgtttgtcgtcaggattgtggaacaaggccatgaagacctggttctaagtgacatctcacctaaaggtgtctgggataagattttggagcctgtggcatgtgtgagaaaaaagtctgaaatgctccagcttttcccagcgtatttaaaaggagaggatctgtttggcctgaccgtctctgcaatgggcacgcatagcggaatcacttcctggggttgangcatgtgaaaattataccttccgatccggccgaaatcctttcatggaacttnctnttgccgttaaccccacaggttg

SEQ ID NO: 2370 - DNA, 861 bp, Homo sapiens
  misc_feature (626)..(626): "n" may be a, t, c, g, other or unknown
  misc_feature (836)..(836): "n" may be a, t, c, g, other or unknown
  misc_feature (842)..(842): "n" may be a, t, c, g, other or unknown
aacagcctcaccctgcagcccccagcacctcagcccgtctttctttctcacggggttccacttcatcagtctgtgaatcctcctgtgttgcccttgagtcagccagtcggacctgtcaataagtctgttggaactagtgtcctccccataaatcagactgttcgccctggggttttacccctcacccagcctgtgggacccataaacagacctgttgggcctggtgttcttcctgtgagcccctctgtcacccctggggtcctgcaggctgtctcgccaggggtgctttctgtgagtcgggcggtcccgtctggagtccttcctgcaggccagatgactcctgcaggccagatgactcctgcaggggttatcctgggcaaacagcaacttctggggttcttcctactggccagatggtccagtcaggagttctccctgtgggccagacagctccgtcacgggttcttcccccaggccagacagccccattgagggttatctctgcaggccaggtggtcccatctgggcttctttctcccaaccagacagtctcctcctcagctgttgtgcctgtaaaccagggtgtgaattctggtgttctgcagcttagtcagcctgttgtgtcnggagttcttctgtgggccagccagtgaggcctggggtcttgcaactcaaccagactgtgggcaccaacattctgctgtgaatcagccagtgagacctggtgcttcgcagaacaccaccttcctgacatcagctctattcttcagacagcttatccctacagggaaacaagtgaatgggattccaacctacacgcttggccccgtgtctgncacttntgccggttccccctggaag

SEQ ID NO: 2371 - DNA, 859 bp, Homo sapiens
  misc_feature (773)..(773): "n" may be a, t, c, g, other or unknown
  misc_feature (811)..(811): "n" may be a, t, c, g, other or unknown
  misc_feature (815)..(815): "n" may be a, t, c, g, other or unknown
ctgtggtgtttttcccccgctcctctggctgccttcctgatggatctctgtggtcccaggcaggaatggcctgcttggggacccagcgagctcccaaggcctttcctgctgcttcctctatccctgtgttttgcttggctctctaaattgactcagctccaggacatcaggaccccaggttctctggtcttgggactctgagacttgcaccaggaatcctgcccaggctctcaggcctttggactcagactgagctacttcactggctttcctggttctccagcttgaagatggcagatcgtgggacttctcagcctccataattgagtgagccaattccctggccaaaaggtgtgttttgctgacttcaagcatccctgctacaaaatggcctacttccatgaactgtccagccgagtgagctttcaggaggcacgcctggcttgtgagagtgagggaggagtcctcctcagccttgagaatgaagcagaacagaagttaatagagagcatgttgcaaaacctgacaaaacccgggacagggatttctgatggtgatttctggatagggctttggaggaatggagatgggcaaacatctggtgcctgcccagatctctaccagtggtctgatggaagcaattcccagtaccgaaactggtacacagatgaaccttcctgcggaagtgaaaagtgtgttgtgatgtatcaccaaccaactgccaatcctggccttgggggtccctacctttaccagtgggaatgatgacaggngtaacatgaacacaattatatttgcaagtatgaaccanagantaatccaacaagccctgtagaaaaccttatcttacaaatcaacc

SEQ ID NO: 2372 - DNA, 865 bp, Homo sapiens
  misc_feature (727)..(727): "n" may be a, t, c, g, other or unknown
  misc_feature (766)..(766): "n" may be a, t, c, g, other or unknown
  misc_feature (856)..(856): "n" may be a, t, c, g, other or unknown
ttccagaaagtggcagcctctgatcgtacaggactttcggattatgggaggcgggatccagagggaaacctggataagcagctgagctttaagtgcaatgtttcaaatacattttcgagtctggcactaaagaatactattgtggaggcttctattcagcttcctccttcccttttctcaccaaagcaaaaaagagaactcagaccaactgatgactctctttacaagcttcaactcattgcattccgcaatggaaagctttttccagccactggaaattcaacaaatttggctgatggtggaaaacgacgtactgtggttacccctgtgattctcaccaaaatagatggtgtgaatgtagatacccaccacatccctgttaatgtgacactgcgtcgaattgcacatggagcagatgctgttgcagcccggtgggatttcgatttgctgaacggacaaggaggctggaagtcagatgggtgccatatactctattcagatgaaaatatcactacgattcagtgctactcccttagtaactatgcagttttaatggatttgacgggatctgaactatacacccaggcggccagcctcctgcatcctgtggtttatactaccgctatcattctcctcttatgtctcttagccgtcattgtcagttacatataccatcacagtttgattagaatcagcctcaagagctggcacatgcttgtgaacttgngctttcatattttcctaacctgtgtgggctttgtgggangaataacccagactaggaatgccagcatctgccaagcagttgggataattcttcactattccacccttggcacagtactatgggtaggantgacagctc

SEQ ID NO: 2373 - DNA, 859 bp, Homo sapiens
  misc_feature (775)..(775): "n" may be a, t, c, g, other or unknown
  misc_feature (815)..(815): "n" may be a, t, c, g, other or unknown
atttctaacgagctcccaggtggcgcgggctgcccgggagcggaccgcaagtccgcgggactcctggggtcttggctccaggccaatcagccgtcaggactcttgataaatcgccctgctcggctaatgagcagaattgccgggacatgcgcgttccggccgaaggggggtaatttccgaactccgggaattcgttgtgtgaagtaggccactcctagggacgcgcggggagcccggtcctcgcgccatgtcgcggcgcaagcaggccaagccccagcacctcaactccgaggagccgcggcctgcgcgccgggagtgtgcggaggtggccccgcaggtggcgggggagccggcttcagaacttgatgatgatgttccaaaagcaaactgcctctccactgaaagcactgacactccgaaggcccctgtcatcactcttccctcagaggcaagggaacaaatggccacccttggagagaggacgttcaactgttgctacccaggttgccacttcaaaactgtccatggcatgaaagacttggaccgccatctcagaatccacacgggagacaaaccgcacaagtgtgagttctgtgacaagtgcttcagccggaaggacaacctgaccatgcacatgcggtgccacaccagtgtgaagccacacaagtgtcacctgtgtgactacgctgccgtggacagcagtagcctcaagaagcacctgcggatccactctgatgagccggccgtacaaatgccagcttttgccctatgccanccgcaattcagcagcttaccgtccacctggatctcacacnggggatacccccttcagtgctggtttttaacgccaagttaaaat

SEQ ID NO: 2374 - DNA, 785 bp, Homo sapiens
  misc_feature (765)..(765): "n" may be a, t, c, g, other or unknown
  misc_feature (775)..(775): "n" may be a, t, c, g, other or unknown
  misc_feature (777)..(777): "n" may be a, t, c, g, other or unknown
tactctaaatgaagaaagtctttatcagaaaattcgtattttggagaaaccttttgaatatattgaatgccagaaagccttccaaaaggacactgtttttgttaatcacatggaagaaaagccctataagtggaatggatctgaaatagcctttctccagatgtcggacctcactgtacatcagacatctcatatggaaatgaagccctatgaatgcagtgaatgtgggaaatccttctgtaaaaagtcaaaatttattatacatcagaggactcacacaggagagaaaccttacgaatgtaatcagtgtgggaaatccttctgccagaagggaacccttactgtgcatcagagaacacacacaggggagaagccctatgaatgtaatgaatgtgggaagaacttttaccagaagttacacctcattcagcatcagagaactcactcaggagagaagccctatgaatgtagttattgtggaaaatccttttgccagaagacacacctcacacaacatcagagaacacattcaggagagagaccttatgtttgtcatgactgtgggaaaaccttctcgcagaagtcagcacttaatgaccatcagaaaattcacacaggtgtgaaactctacaagtgtagtgaatgtgggaaatgcttctgccgcaagtctactctcacgacccacctgaggacccacacaggagagaaaccgtatgaatgtaatgagtgtggaaaattcttctcttgggtgcatatcttactggnccattatagnanctcattca

SEQ ID NO: 2375 - DNA, 852 bp, Homo sapiens
  misc_feature (793)..(793): "n" may be a, t, c, g, other or unknown
  misc_feature (799)..(799): "n" may be a, t, c, g, other or unknown
gtcggttgactccaccaggtagttgtggattctatgatggcctccttatccttctgttgcagctcctcactgagcaggggaaggctagcctaatcagggatatgtccagttcagaaatgtggaccgttttgtggcaccgcttctccatggtcctgaggctccccgaggaggcatctgcacaggaaggggagctttcgctatccagtccaccaagccctgagccagactggacactgatttctccccagggcatggcagccctgctgagcctggccatggccacctttacccaggagccccagttatgcctgagctgcctgtcccagcatggaagtatcctcatgtccatcctgaagcatctgctttgccccagcttcctgaatcaactgcgccaggcctcctttgcttcccctttgcgctggacatggatgctgacctccttatagatgtcttggccgacctcagggactcagaagttgcagcccatctgctgcaggtctgctgctaccatcttccgttgatgcaagtggagctgcccatcagccttctcacacgcctggccctcatggatcccacctctctcaaccagtttgtgaacacagtgtctgcctcccctagaaccatcgtctcgtttctctcagttgccctcctgagtgaccagccactgttgacctccgaccttctctctctgctggcccatactgccagggtcctgtctcccagcacttgcctttatccaagagcttctggctggctctgatgaatcctatcggccctgcgcaagcttctgggncaccanagaatctgtgcggcacacacttataggttctgggaacttgttcaaaaaaagat

SEQ ID NO: 2376 - DNA, 829 bp, Homo sapiens
  misc_feature (693)..(693): "n" may be a, t, c, g, other or unknown
  misc_feature (774)..(774): "n" may be a, t, c, g, other or unknown
  misc_feature (780)..(780): "n" may be a, t, c, g, other or unknown
  misc_feature (828)..(828): "n" may be a, t, c, g, other or unknown
gttcaagagaaaagggatgtattaccaaagattctgcctgctgaagacagggcgctcagggaaagggggcccccccagccactgccagctgtgcagcccagtggcccgattaacatggaggagaccaggcccgaaggaagctatttcagcaagtactcggaggcagctgagctgagaagcacagcctccctcctggccactcaagaatctgacgtgatggttgggcctttcaagctgaggcccaggaaacagcggactttgtccatgattgaggaagagatccgagcagctcaggaaagggaagaggagctgaagaggcagagataagtcttgcagagtacgcagagccccaggacaaagaatgccccatcactgccctccagaacatgctacaaaactgctccagggaaaatagagaaagtcaaacctcctccatcccccaccactgaaggccccagcttgcagcctgacttagcccctgaagaggctgccggaacccagcggcccaagaatctgatgcagaccctcatggaagactatgagacacacaaatctaaaaggcgcgagagaatggatgatagtagtgtcctcgaggccacacgggttaatcgaagaaagagcgcactggctttgcgctgggaagcagggatctatgccaaccaggaggaagaagacaacgaataaacttccttnaacccaggaagcgtctttggtgcttgggagaccaagaaaccaagaaattaacaactgaaagcattttaatggactatttantaaagngcaaccaaacttcagcaattccttatgtagacccagaacttgcaattnt

SEQ ID NO: 2377 - DNA, 723 bp, Homo sapiens
  misc_feature (691)..(691): "n" may be a, t, c, g, other or unknown
  misc_feature (698)..(698): "n" may be a, t, c, g, other or unknown
  misc_feature (708)..(708): "n" may be a, t, c, g, other or unknown
tcagagatgtaactgtctttcataatataagtgatgtttgccaggaatattatcctaaatttgttagacatatttctgacatatctgtgatgatagtttgaaaattagtatgtattatttgttgccttttatgccattgtgtccttttcttgatgttttcaaagctggctgaatcctacacaatatgttacactcctaatctgcattttttaaatgcataggccgtttaacttagcacagactattggcctctgcttgaagaatagtatacctataaactggaagcattatcatcacttactcattataacccatcctgtctgttctgtacagtatagttggacccagatttttaccctatgaatttggttagcacaaatgggggaaagtatgaaatgccaaggaaaattgaaattcatgtaggagatgagtagaggaatgttcaggagttcaagcagaacaagaggaacccaactataccgtttctgatctaaatggtatggtggggaaaaaccatcagatcaacagaaaggacataatttttaaataaaagtaacttccttatattgagcaaatttaattttatgaaaaatgcattacaaagtctttgtttcactcatttctctgtgcgactattgaagtgtttgttaaactggatcacgtccaagaagttaatgttaggccaggccanggggctnacgcttatgntcccagcacttttag

SEQ ID NO: 2378 - DNA, 854 bp, Homo sapiens
  misc_feature (797)..(797): "n" may be a, t, c, g, other or unknown
agagctcttttattacgcacagaaagctgttcttcatcctacagggcccctgtactgcccagaggagaaggagatgaaaccagcttgtataaaagcccttactcgtatatttaaaatatctgatcaagataatgatggtactctcaatgatgctgaactcaacttctttcagaggatttgtttcaacactccattagctcctcaagctctggaggatgtcaagaatgtggtcagaaaacatataagtgatggtgtggctgacagtgggttgaccctgaaaggttttctctttttacacacactttttatccagagagggagacacgaaactacttggactgtgcttcgacgatttggttatgatgatgacctggatttgacacctgaatatttgttccccctgctgaaaatacctcctgattgcactactgaattaaatcatcatgcatatttatttctccaaagcacctttgacaagcatgatttggatagagactgtgctttgtcacctgatgagcttaaagatttatttaaagttttcccttacataccttgggggccagatgtgaataacacagtttgtaccaatgaaagaggctggataacctaccagggattcctttcccagtggacgctcacgacttatttagatgtacagcggtgcctggaatatttgggctatctaggctattcaatattgactgagcaagagtctcaagcttcagctgttcagtgacaagagataaaaagatagacctgcagaaaaacaaactcaaagaatgtgtcagatgtaatgnaaatggagtgaaaactgtgggaaaagggagtcttcagctcttctggaagaactaatg

SEQ ID NO: 2379 - DNA, 856 bp, Homo sapiens
  misc_feature (688)..(688): "n" may be a, t, c, g, other or unknown
  misc_feature (763)..(763): "n" may be a, t, c, g, other or unknown
  misc_feature (816)..(816): "n" may be a, t, c, g, other or unknown
  misc_feature (856)..(856): "n" may be a, t, c, g, other or unknown
caacaatacactggaccaagaagggcatatcatcttgcactctatgcatcgttacctgccgaggcttcatttggtgcctgcagaaaaggctgtggaggtgatacaattaaatggccctggtgtccacacttttaccttcccacagactgaattctttgcagtaacagcttatcagaacattcagattactcagctgaaaatagattacaatccatttgccaaaggctttcgggatgatgggctgaataataatccccagagagatggaaaacaaaagaacagctctgaccaagaagggaataatatttccagttcttctggtcatcgggtccgtcttacagaaggtcaggggtcagagatacaaccaggtgatttggatcctttgtcaaggggtcatgaaacatcaggcaagggtttggagaagacttcccttaatataaaacgagactttcttggtttcatggatactgattcagcacttagtgaagttcctcaattgaagcaagagatttctgaatgtcttattgccagcagttttgaagatgactcccgtgtagcctcaccgttagaccagaacggaagcttcaatgttgttattaaagaggaacctctagatgattatgactacgaacttggtgagtgcccagaaggggtcactgtgaaacaggaagagacagatgaagagacngatgtatactcaaatagtgatgatgatcctatactagagaaacagctaaagaggcacaataaagttgcaacccanagctgccatctatcttctaaatggctttcaagccagcccatcaggtgttgctnaagcttaaatggtcaaaattagaccctgggaaagaagccn

SEQ ID NO: 2380 - DNA, 830 bp, Homo sapiens
  misc_feature (769)..(769): "n" may be a, t, c, g, other or unknown
  misc_feature (817)..(818): "n" may be a, t, c, g, other or unknown
acaatgaaaaacaaccagaacacttgggtctggatcaatatataataaaacgctttgatggaaagaaaatttcccaggaacgagaaaaatttgctgatgaaggcagtatattttacacccttggagaatgtgggctcatatccttttcagactacattttcctcacaactgttctttccactcctcagagaaattttgaaattgccttcaagatgtttgatttgaatggagatggagaagtagatatggaagaatttgaacaggttcagagcatcattcgctcccaaaccagtatgggtatgcgccacagagatcgtccaactactggcaacaccctcaagtctggcttgtgttcagccctcacaacctacttttttggagctgatctgaagggaaagctgacaatcaaaaacttcctcgaatttcagcgtaaactgcagcatgatgttctgaagcttgagtttgaacgccatgaccctgtggatgggagaattactgagaggcagtttggtggcatgctacttgcctacagtggggtgcagtccaagaagctgaccgccatgcagaggcagctcaagaagcacttcaaagaaggaaagggtctgacatttcaggaggtggagaacttctttactttcctaaagaacattaatgatgtggacactgcattgagtttttaccatatggctggagcatctcttgataaaggaaagggcaccatcttcatggggagaagatgagtcttgaaatatcaagacaattgcagaangctgtgccctgagagaatggaagaactgggaaagagaaaaggaagtcnnaagcttaagtga

SEQ ID NO: 2381 - DNA, 840 bp, Homo sapiens
  misc_feature (748)..(748): "n" may be a, t, c, g, other or unknown
  misc_feature (831)..(831): "n" may be a, t, c, g, other or unknown
  misc_feature (833)..(833): "n" may be a, t, c, g, other or unknown
aaggtgatcaagttcatcctcatcatctgctacaccgtctactacgtgcacaacatcaagttcgacgtggactgcaccgtggacattgagagcctgacgggctaccgcacctaccgctgtgcccaccccctggccacactcttcaagatcctggcgtccttctacatcagcctagtcatcttctacggcctcatctgcatgtatacactgtggtggatgctacggcgctccctcaagaagtactcgtttgagtcgatccgtgaggagagcagctacagcgacatccccgacgtcaagaacgacttcgccttcatgctgcacctcattgaccaatacgacccgctctactccaagcgcttcgccgtcttcctgtcggaggtgagtgagaacaagctgcggcagctgaacctcaacaacgagtggacgctggacaagctccggcagcggctcaccaagaacgcgcaggacaagctggagctgcacctgttcatgctcagtggcatccctgacactgtgtttgacctggtggagctggaggtcctcaagctggagctgatccccgacgtgaccatcccgcccagcattgcccagctcacgggcctcaaggagctgtggctctaccacacagcggccaagattgaagcgcccgcgctggccttcctgcgcgagaacctgcgggcgctgcacatcaagttcaccgacatcaaggagatcccgcttgtggatctatagcctgaagacactggangagctgacctgacgggcaacctgagcgcggagaacaaccgctacatcggcatcgacggcttgcgggagcttaaacgccttaangngctgcgg

SEQ ID NO: 2382 - DNA, 848 bp, Homo sapiens
  misc_feature (672)..(672): "n" may be a, t, c, g, other or unknown
  misc_feature (677)..(677): "n" may be a, t, c, g, other or unknown
  misc_feature (717)..(717): "n" may be a, t, c, g, other or unknown
  misc_feature (784)..(784): "n" may be a, t, c, g, other or unknown
  misc_feature (808)..(808): "n" may be a, t, c, g, other or unknown
  misc_feature (827)..(827): "n" may be a, t, c, g, other or unknown
ctgtaccatcgatacctgatgaatgaagagcaagctgtcagcaaagtggacggcatcctgtctaactgtggcatagaaaaggagtcagacctgtgtgtgctgaacctcatacgatacacagccaccactaagtgctctccgagtgtggatcccgagagggtgctgtggagtctgagggaccaccccctcctccccgaggctgaggcgtgtgtgcggcaacacctccccgacctctacgctgccgggggtgtcaacatctgggccctggtggcggctgtggtgctcctctccagcagtgtgaatgacatccagcgactgctcttctgcctccggagacccagctccacggtgaccatgccagatgtcaccgagaccctgtactgcatagccgtgcttctctacgccatgagggagaaggggattaacatcagcaataggattcactacaacattttctattgcctatatcttcaggagaattcctgcactcaggccacaaaagttaaagaggagccatctgtctggccaggcaagaaaaccatccaacttacacatgaacaacagctgattctgaatcacaagatggaacctctccaggtggtgaaaattatggcctttgccggcactgggaagacctcaacgctggtcaagtatgcagagaagtggtctcanagcangtttctgtatgtgacattcaacaagagcatcgcaaagcangcccgaacgcgtcttcccagcaacgtcatctgcaaaacctttcactccatgggctacgggcacatanggcggaagtaccagtcaaaggaanaagttgaatctcttcaagntaacaccctttatgggcaact

SEQ ID NO: 2383 - DNA, 820 bp, Homo sapiens
  misc_feature (798)..(798): "n" may be a, t, c, g, other or unknown
  misc_feature (801)..(801): "n" may be a, t, c, g, other or unknown
  misc_feature (811)..(811): "n" may be a, t, c, g, other or unknown
atttttggaagcatgttgcgaggctccgcttcttctacaagtatggagaaggcaaaaggcaaggagtggacctccacagagaagtcgagggaagaggatcagcaggcttctaatcaaccaaattcaattgctttgccaggaacatcagcaaagagaaccaaagaaaaaatgtctgtcaaaggcagtaaagtgctctgccctaagaaaaaggcagagcacactgacaaccccagacctcagaagaagataccaatccctccattaccttctaaactgccacctgttaatctgattcaccgggacattctgcgggcctggtgccaacaattgaagctgagctccaaaggccagaaattggatgcatataagcgcctgtgtgcctttgcctacccaaatcaaaaggattttcctagcacagcaaaagaggccaaaatccggaaatcattgcaaaaaaattaaaggtggaaaagggggaaacgtccctgcaaagttctgagacacatcctcctgaagtggctcttcctcctgtgggggagccgcctgccctggaaaattccactgctctccttgagggagttaatacagttgtggtgacaacttctgccccagaggctttgctggcctcctgggcgagaatttcagccagggcgaggacaccagaagcagtggaatcttcacaagaggcctctggtgtcaagtggtgtgtggtccatgggaaaagtcttccttgcagacacagatgggttgggttcacctgcagtttcatgctggtcaagcctgggttccagaaaagccagnaangggaaatgantgccctctt

SEQ ID NO: 2384 - DNA, 881 bp, Homo sapiens
  misc_feature (834)..(834): "n" may be a, t, c, g, other or unknown
  misc_feature (867)..(867): "n" may be a, t, c, g, other or unknown
  misc_feature (881)..(881): "n" may be a, t, c, g, other or unknown
caaatgagaaagattcaaattgtttgttattttctgtattttcagtcaaaaaatcagttatatagtgattttaaagcagattaatggaaaaaaattcatgtaacaattacctgaaaatttataacctattcctaatcaaacccaattatatcagaatacctttctgaatttgagatttttgctctacattttataatgaataaggctattttttgaaggtatttcattttgaattctgtcattaacctcaaaagctttctactgctttgcggtgaaggcaaaatattcgataactcaacttaggccccactgttccccaacttcatggaggccagaagactttactttgttccataatgaaatataaacacagaacaaagttgtaaaagtagcatggatatgttgaaactttggacaagcttcttgtcctttggaatatgggatttatattcatctcctcaatatcccatgtatgcacagaaacttcagttctatttctatagacacaggaacctagtgactattgaacgtaattgtaataaaatgctgctcattgagccaaagagaagaaatgatttattaacatggggacaccaagaaaaacaaagtatgcttttattccctttgtcaagctcagttttagggttttttcttttttttatagtgacaatccatagatatagacattcctaaaagaaaaataaataattcagtagatatatgtcactggtacctgaatatggaatggaatttgatggtttttattttggtgagacaggtcttgctctgtcacccagactggaatgcaatggcatgatcacaccttactggganccttggcctttaagctcgggatcctcctggctnaacttgcaggagcn

SEQ ID NO: 2385 - DNA, 832 bp, Homo sapiens
  misc_feature (639)..(639): "n" may be a, t, c, g, other or unknown
  misc_feature (749)..(749): "n" may be a, t, c, g, other or unknown
  misc_feature (770)..(770): "n" may be a, t, c, g, other or unknown
  misc_feature (793)..(793): "n" may be a, t, c, g, other or unknown
gtcaggcgcgaatcccagcggccggcgggcggcggggatacttctacatagacataatcaagttttgactatttggaaaccaagcatcattaaaattctctcaaactcctaattgcgaagaatcgataacatttcaagaagtgataacatttctctgaacaagaaaagaagtgattgaccacgttttaaaagtactctggcactggtgctgtgttttcttcccctccctaaatttgaagaactatggagaaatggtacttgatgacagtagtggttttaataggactaacagtacgatggacagtgtctcttaattcttattcaggtgctggtaaaccgcctatgtttggtgattatgaagctcagagacactggcaagaaataacttttaatttaccggtcaaacaatggtattttaacagcagtgataacaatttacagtattggggattggattacccacctcttacagcttatcatagtctcctatgtgcatatgtggcaaagtttataaatccagactggattgctctccatacatcacgtggatatgagagtcaggcacataagctcttcatgcgtacaacagttttaattgctgatctgctgatttacatacctgcagtggttttgtactgntgttgcttaaaagaaatctcaactaagaaaaagattgctaatgcattatgcatcttgctgtatccaggccttattcttatagactatggacattttcaatataattctgngagtcttggctttgcttttgnggggtggtcttggaatatcttgnggactggggaacttctaagggcactgggcattttgctta

SEQ ID NO: 2386 - DNA, 780 bp, Homo sapiens
  misc_feature (689)..(689): "n" may be a, t, c, g, other or unknown
  misc_feature (763)..(763): "n" may be a, t, c, g, other or unknown
  misc_feature (773)..(773): "n" may be a, t, c, g, other or unknown
ttactagacattgatccattaattttaatacatttgttggaccttaaggaccggagcagtatagaaaatttgtggggcttacagcctcgcccacctgcttcacttctgcagcccacagcatcatattctcgaaaagataaagaccaaaggaagcaacaggcaatgtggcgagtgccctctgatttaaagatgctaaaaagactcaaaactcaaatggccgaagttcgatgtatgaaaactgatgtaaagaatacactttcagaaataaaaagcagcagtgctgcttctggagacatgcagacaagccttttttctgctgaccaggcagctctggctgcatgtggaactgaaaactctggcagattgcaggatttgggaatggaactcctggcaaagtcatcagttgccaattgttacatacgaaactccacaaataagaagagtaattcgcccaagccagctcgatccagtgtagcaggtagtctatcacttcgaagagcagtggaccctggagaaaatagtcgttcaaagggagactgtcagactctgtctgaaggctccccaggaagctctcagtctgggagcaggcacagttctccccgagccttgatacatggcagtatcggtgatattctgccaaaaactgaagaccggcagtgtaaagctttggattcagatgctggtgtggntgcagttttcagtggcttgcctgcggttgagaaaaggaggaaaatggcaccttgggggctaatgctaaaggagncatctggaangactgca

SEQ ID NO: 2387 - DNA, 801 bp, Homo sapiens
  misc_feature (685)..(685): "n" may be a, t, c, g, other or unknown
  misc_feature (743)..(743): "n" may be a, t, c, g, other or unknown
  misc_feature (765)..(765): "n" may be a, t, c, g, other or unknown
  misc_feature (790)..(790): "n" may be a, t, c, g, other or unknown
aaggagctaccagcagaatagtgcccacactaaccattgcattgtgaagatgctgcaccggctggcccatgacctcaaaatggaagccctactttttcagctgtcagtcttctgcctcttcaatcgtctgcttagtgaccctgctgctggagcctacaaagagctagtgacttttgccaaatacatcctgggcaaattttttgcactggctgcagtcaaccaaaaagcctttgtggagctgttgttctggaagaacacagctgtggttcgagagatgactgagggctatggctccctggatgacaggtcttccagtcgcagagcacctacatggagccccgaagaagaggctcatcttcgggagctgtacctcgccaataaggacgtggaagggcaggatgtggtggaagccatcttggcccacctgaatactgttcctcgaacacgcaagcagatcatccaccatctggtacagatgggactggctgacagtgtcaaggacttccaaaggaaaggaacccatattgtactgtggacgggggatcaggagttggagctgcagcggctttttgaggaattccgggactcagatgatgtcctgggtcatatcatgaagaatatcacagccaaacgctcacgggcccgaatagtggataaactcttggctctggggctggtggctgancggcgggagctgtacaagaaacggcagaaaaagttgcatcctcatcttgccaatggancggagtccctgaaagattttgncaggaagattggaagaagaggaaanctgctgaggaa

SEQ ID NO: 2388 - DNA, 601 bp, Homo sapiens
  misc_feature (562)..(562): "n" may be a, t, c, g, other or unknown
  misc_feature (566)..(566): "n" may be a, t, c, g, other or unknown
  misc_feature (568)..(568): "n" may be a, t, c, g, other or unknown
cttgctacagccaaatggcatctcactttttaaagacgtttgcaattattagttgattcacagtacagaacaaggtataaaggaaaaaaccctgctaggtagtgttacacctgctaattggatgactttgccaagtcacctaaactctggatctcagtcaccttttgtcctacattcctctacccttctacttgaaaatttgaaatatgctgtctattcacttcatagtcattaaggaaatgttcttaattgtttttttgtttttgtttttttttgagatggagtcttgctctgtcgccagactggagtgcagtggcgcaatctcggctcactgcaacctccacctcctggattcaagcgattctcctgcctcagcctcccaagtagctgggattacaggcgcatgccaccatgcccagctaatttttttgtatttttagtagagatggggtttcaccgtgctggccaggatggtctcgatctcctgacctcgtgatccgcccacctcggcctcccaaggtgctgggactacaggcatgagccaccgtgcccggcctcttanttgntntttaaaaattatgtacattttaagtattttgca

SEQ ID NO: 2389 - DNA, 736 bp, Homo sapiens
  misc_feature (400)..(400): "n" may be a, t, c, g, other or unknown
  misc_feature (687)..(687): "n" may be a, t, c, g, other or unknown
  misc_feature (692)..(692): "n" may be a, t, c, g, other or unknown
  misc_feature (706)..(706): "n" may be a, t, c, g, other or unknown
aaaaaaaaaagaaaaaaaaaaaactcttgtgtagcctgaggcggcggtagcatggagggggagagtacgtcggcggtgctctcgggctttgtgctcggcgcactcgctttccagcacctcaacacggactcggacacggaaggttttcttcttggggaagtaaaaggtgaagccaagaacagcattactgattcccaaatggatgatgttgaagttgtttatacaattgacattcagaaatatattccatgctatcagctttttagcttttataattcttcaggcgaagtaaatgagcaagcactgaagaaaatattatcaaatgtcaaaaagaatgtggtaggttgatacaaattccgtcgtcattcagatcagatcatgacgtttagagagaggctgnttcacaaaaacttgcaggagcatttttcaaaccaagaccttgtttttctgctattaacaccaagtataataacagaaagctgctctactcatcgactggaacattccttatataaacctcaaaaaggactttttcacagggtacctttagtggttgccaatctgggcatgtctgaacaactgggttataaaactgtatcaggttcctgtatgtccactggttttagccgagcagtacaaacacacagctctaaattttttgaagaagatggatccttaaaggaggtncatangataaatgaaatgnatgcttcattaccaggaggaattaaagagt

SEQ ID NO: 2390 - DNA, 717 bp, Homo sapiens
  misc_feature (654)..(654): "n" may be a, t, c, g, other or unknown
  misc_feature (677)..(677): "n" may be a, t, c, g, other or unknown
  misc_feature (679)..(679): "n" may be a, t, c, g, other or unknown
agaggactatgaggcgggcgccaactgcttgggccgcagggcgggaggcagcgcgggagtggggcgttgaggggccggcctagcttggggctctggccttgcgtcttccgaccgaatcaccgctcctgagcccggtgcggggctgccgctatcgcctggccgtgggtgccggagcggccgggttgcgactcagcgttcttgggtgggcgcgggcggcgtctccgcggcgggcatcccccgaggccgccctcgggccatgatcgactccgtgaagctgcgccgcgacagcgcggcggacttcttctcccactacgagtacctgtgcgcgctgcagaactccgtgccgctgcccgccgtgcgcgcctgtctccgggagggcgtgctggatttcaacgccgaccgcctccgcggggtggactgggcgcctctgctgagcaccctcaagatcaataaagacctgcccttggtctccatcaagagcttcttccagccctggctgggggacacaggttctgacatgaataaattttgcagaagtcgtgttcctgcgataagatacaaagatgtgaccttcagttgtgtaaaagctcttaaaggctggttaaagtatatcaagtgtgctaaagaacctggactaaatggactaattctganagagaaggatttaactattctancnaagggaattgaataaatcggctttttttggtgcacctg

SEQ ID NO: 2391 - DNA, 687 bp, Homo sapiens
  misc_feature (422)..(422): "n" may be a, t, c, g, other or unknown
  misc_feature (532)..(532): "n" may be a, t, c, g, other or unknown
  misc_feature (594)..(594): "n" may be a, t, c, g, other or unknown
  misc_feature (638)..(638): "n" may be a, t, c, g, other or unknown
  misc_feature (683)..(683): "n" may be a, t, c, g, other or unknown
aaaaaaaaaaaaaaaaaaaaaaaaaaaaaaaaaagaattgactcgcgccctcgtccgccgccataggccagtgccggggtttaagggccaggaaaggaagcattcagggaatttaggtgtagccagaagaaaatcaggtcctggctccccagaagcaagagagttcaaatgaaggaaggaggaggttcctggatgtggatgtcatcatttctgggaacactcttaaatggagactcagatttcttagccaaaatttagggaggatccagaagaaaccaaagacgaagcatcccagttcttgggtatttcctgaaacagaagaaaatgacaaaggcccaggaatcagtgaccctggaggatgtggctgtggacttcacctgggaggagtggcagttcctgagccctgctcagaaggacctgtnccgggatgtgatgttggagaactacagcaaccttgtgtcagtggggtatcaagccggcaaacctgatgccctcaccaagttggaacaaggagaaccactatggacactanaagatgaaatccacagtccagcccacccagaaattgagaaagctgatgatcatctgcagcancccttgcaaaaccaaaaaatactgaagaggacgggacaacgctntgaacacggaagaactttgaaatcatatttaggtttaacccaccngagc

SEQ ID NO: 2392 - DNA, 826 bp, Homo sapiens
  misc_feature (801)..(801): "n" may be a, t, c, g, other or unknown
  misc_feature (819)..(819): "n" may be a, t, c, g, other or unknown
  misc_feature (821)..(821): "n" may be a, t, c, g, other or unknown
ttggagtcttttaactgtgtctctcaattccaggcatgtgcacaggtccgtggcatgaattatttcagccaaattgaagtctggagatgtgcctgaaaattagattaggacagatgttatgcttattccatatactttctacattatagcctttcttttgtttactaaaaaggcatagtcactcgcaaatctagtattgaatacattcaaaatccattgaagataaccaaataagcttttaaattgtaggacattcttactatatcccacttactatactaaaactagttttagaactccttcacttttacaattaaattgagattccatgtaccactagtcatatatgactgtgtacatttgtatgtatacacatgtaaagtcactaaacatgcacacacacacacacaaatgcacacactcatacatacttaataggaacactaagaaaaagcctgcagatgtcttttctttaaaaacaaagatgtctttagaaactacatgtatttatagctccaaaaaattaaaagttcattcctagtgaaagcaaaacatgaaaggtagtttattaaagactcaaagctaatttttagttatttacattttagttactacctcatttgtctcctggaagtctttcttttctaaatgctacattctgcagacatattcagcccatgcttttctagctcagttattcctacgcaaaaagttaatttaatatcctacaacatggatgaaaatttcaaaaaccatgcttggaagaagccagtccttaaaggacccctaatttatggattncccattttccaaggtttncngaatt

SEQ ID NO: 2393 - DNA, 801 bp, Homo sapiens
  misc_feature (543)..(543): "n" may be a, t, c, g, other or unknown
  misc_feature (723)..(723): "n" may be a, t, c, g, other or unknown
  misc_feature (727)..(727): "n" may be a, t, c, g, other or unknown
  misc_feature (775)..(775): "n" may be a, t, c, g, other or unknown
acttgccgaagcatgaacgaagccatccctagtggcaaggagacttccatcgagctggatgtgcaccaccctcctacagtgaccctgtccattgagccacagacggtgcaggagggtgagcgtgttgtctttacctgccaggccacagccaaccccgagatcttgggctacaggtgggccaaagggggtttcttgattgaagacgcccacgagagtcgctatgagacaaatgtggattattcctttttcacggagcctgtgtcttgtgaggttcacaacaaagtgggaagcaccaatgtcagcactttagtaaatgtccactttgctccccggattgtagttgaccccaaacccacaaccacagacattggctctgatgtgacccttacctgtgtctgggttgggaatccccccctcactctcacctggaccaaaaaggactcaaatatggggcccaggcctcctggctccccacccgaggctgctctctctgcccaggtcctgagtaacagcaaccagctgctgctgaagtcggtgactcangcagacgctggcacctacacctgccgggccatcgtgcctcgaatcggagtggctgagcgggaggtgccgctctatgtgaacgggccccccatcatctccagtgaggcagtgcagtatgctgtgaggggtgacggtggcaaggtggagtgtttcattgggagcacaccacccccagaccgnatancatggcctggaaggagaacttcttggaagtggggaccctggaacgctnttcagtggagaggaccaacttaggca

SEQ ID NO: 2394 - DNA, 858 bp, Homo sapiens
  misc_feature (811)..(811): "n" may be a, t, c, g, other or unknown
  misc_feature (848)..(848): "n" may be a, t, c, g, other or unknown
  misc_feature (851)..(851): "n" may be a, t, c, g, other or unknown
gaaaccatggtcaggtggtctcttacctgttaaaatcaggagctgacaaagaaaagttggcgacatggtggcacccgtgctggagacttctcacgtgttttgctgcccaaaccgggtgcggggagtcctgaactggagctctgggcccagaggacttctggcctttggcacgtcctgctccgtggtgctctatgaccccctgaaaagggttgttgttaccaacttgaatggtcacaccgcccgagtcaattgcatacagtggatttgtaaacaggatggctccccttctactgaattagtttctggaggatctgataatcaagtgattcactgggaaatagaggataatcagcttttaaaagcagtgcatcttcaaggccatgaaggacctgtttatgcggtgcatgctgtttaccagaggaggacatcagatcctgcattatgtacactgatcgtttctgcagctgcagattctgctgttcgactctggtctaaaaagggtccagaagtaccaatattagcatgtggcaatgatgattgcagaattcacatatttgctcaacaaaatgatcagtttcagaaagtgctttctctctgtggacatgaggattggattagaggagtggaatgggcagcctttggtagagatcttttcctacaagctgttcacaagattgcctgataagaatatggaagctgtatataaagtcaacatctttagaaactcaggatgacgatacctaagactgaaagaaaatacttttaccatagaaaatgaaagtggtaaaatacatttgctggtactctgganacagtgctaacccggtcatgaaactgggtaaatgcanttnactgcaa

SEQ ID NO: 2395 - DNA, 788 bp, Homo sapiens
  misc_feature (637)..(637): "n" may be a, t, c, g, other or unknown
  misc_feature (647)..(647): "n" may be a, t, c, g, other or unknown
  misc_feature (736)..(736): "n" may be a, t, c, g, other or unknown
  misc_feature (757)..(757): "n" may be a, t, c, g, other or unknown
  misc_feature (777)..(777): "n" may be a, t, c, g, other or unknown
gtgaagtcgcgcggcttccacccacgcagtgttctaagtgaaggccagaaactcgctcgccatgtcggctgcagaggcggggggtgttttccacagagccaggggcaggaccctggccgcgtttcccgcagaaaaggaaagcgaatggaaaggcccattctacttcatcctgggcgcagacccacagtttgggctgatcaaggcctggtccactggggactgtgacaatggcggtgacgaatgggaacaggagatccgtctaactgagcaagccgtccaggccatcaacaagctgaaccccaaacccaaattcttcgttctgtgcggcgacctcatccacgccatgccagggaagccgtggcggacggagcagacggaggacctgaagcgagtgcttagggcagtggacagggccatcccactggtccttgtcagcggcaaccatgacattggcaacacccccacggccgagaccgtcgaggagttctgccggacttggggatatgactacttcagcttctgggtcgggggcgtcctgttcctggtcctcaactcccagttctacgagaacccctccaaatgccccagcctgaagcaggctcaggaccagtggctggacgagcagctgagcatcgcnaggcagcggnactgcagcatgccatcgtcttccagcacatccgctgtcctggagagcatcgacgaggacgacgactactacttcaaccttcagcaagtncactcggaaagaagttggcangacaaagttcattccacgcnaggtgttaaga

SEQ ID NO: 2396 - DNA, 786 bp, Homo sapiens
  misc_feature (773)..(773): "n" may be a, t, c, g, other or unknown
  misc_feature (775)..(775): "n" may be a, t, c, g, other or unknown
  misc_feature (786)..(786): "n" may be a, t, c, g, other or unknown
aggatgagtgtactaagcttctggttggcaatattgttatcacctgatataacaatcgtacctatcgtattgatgatgtggattggaataagactccaaaggatagcttcacgatgtctgatgggaaagagatcacattcttggaatactacagcaaaaattatgggatcacagttaaggaagaggaccagccattgctgattcacaggcccagtgagagacaggataatcatgggatgctgctaaaaggggaaatcctgctgctgcctgagctttcttttatgaccggaatcccagagaagatgaagaaggacttcagagccatgaaggatttggctcagcaaatcaatctgagccccaagcaacaccatagtgctttggaatgcttgctgcaaagaattgcaaagaacgaggcagccaccaatgaactgatgcgttgggggctccgtctgcaaaaggatgtacataagattgaaggacgtgttctgccaatggaaagaattaacttaaaaaatacttcgtttatcacatctcaggaactaaactgggttaaggaagtaaccagagacccttccatcttgactatccccatgcatttctgggcacttttttacccaaagagagcaatggaccaggctcgagaactggtcaacatgttggagaagatagccggccccattggcatgcgtatgagcccacccggcctgggttgaactaaaggatgacccgaattgagacttatgtcagaaccattcaatccacgttaggagctnangggaaaatccn

SEQ ID NO: 2397 - DNA, 838 bp, Homo sapiens
  misc_feature (761)..(761): "n" may be a, t, c, g, other or unknown
  misc_feature (766)..(766): "n" may be a, t, c, g, other or unknown
  misc_feature (835)..(835): "n" may be a, t, c, g, other or unknown
ttatgttacaaaatttacaagaacggttagaaaggaaaaagagaatagaagaaattatgaagcggacaagaaagacagatgtgaatgcctcaaaggtcacagaaacatccagccatgacatatatgaagaggctgaggctgacaacgaagaaagcgacaaggactcattgaatgaaatgtttccatcagccattctaaatggcacaggctcacctaccaaatttaaaatgccgttcaacaatgccaagaaaatgacacacaagctggtatttctagaagatggtaccagccaggtccgtaaagagccaaaaacatattttaatggcgatttgaaaaacttcagacaaaaaagcatgaaagacacttcaatacaggaagtagtttcaagaccatcttccaaaagaatgaccagtcacacaacgaaaaccagaaaggcggatgaaaccaacaccaccagcagatcctctgcacaaacaaaatctgaaggattccatgacatcttgccaaagtcctcagacacctttagacaataagagaagaagcaaacctgtttctcctcatttggatatgtaaaccttactcagcctgggagatgaatacatcttccactctggataactcaactcctgggcccatcagtcctcaaatttttctgcttctgacttgaacctggtaaaggaagtgcaccgaaaaattgaaagaactgtcaaaaggccctttgatgtatatctcagatggtaaagtcatcttattctcttggnctaancaagagttctaagttaagagtgggttttggtttctttggaaaatcatcttggctctcaatcttgggtgnccc

SEQ ID NO: 2398 - DNA, 762 bp, Homo sapiens
  misc_feature (610)..(610): "n" may be a, t, c, g, other or unknown
  misc_feature (758)..(758): "n" may be a, t, c, g, other or unknown
  misc_feature (760)..(760): "n" may be a, t, c, g, other or unknown
  misc_feature (762)..(762): "n" may be a, t, c, g, other or unknown
tgggctaccagtgggctcccatcctagccaacttcctgcacatcatggcagtcatcctgggcatctttggcaccgtgcagtaccgctcccggtacctcatcctgtatgcagcctggctggtgctctgggttggctggaatgcatttatcatctgcttctacttggaggttggacagctgtcccaggaccgggacttcatcatgaccttcaacacatccctgcaccgctcctggtggatggagaatgggccaggctgcctggtgacacctgttctgaactcccgcctggctctggaggaccaccatgtcatctctgtcactggctgcctgcttgactacccctacattgaagccctcagcagcgccctgcagatcttcctggcactgttcggcttcgtgttcgcctgctacgtgagcaaagtgttcctggaggaggaggacagctttgacttcatcggcggctttgactcctacggataccaggcgccccagaagacgtcgcatttacagctgcagcctctgtacacgtcggggtagcctctgccccgcgcccaccccggcgcctcgccctgggctgaccgcagctgccgcgagctcgggccaaggcgcangcgtgtccccctggtggcccgcgctctactgaacctgtgcccaaccccgcgtctgcatctggagatgcggacttggacgtggacttggacttggacttggatttgaacttggctctttgcaacccggacttcggaggaatgggccggncngn

SEQ ID NO: 2399 - DNA, 803 bp, Homo sapiens
  misc_feature (665)..(665): "n" may be a, t, c, g, other or unknown
  misc_feature (739)..(739): "n" may be a, t, c, g, other or unknown
  misc_feature (745)..(745): "n" may be a, t, c, g, other or unknown
  misc_feature (775)..(775): "n" may be a, t, c, g, other or unknown
aaaaacccggctttgctgcttttaactcttcttccttctgtgcctctctaagtgggtcagtatcctaaggaagccttcttatttatcttcctgcaaacaagggttacctgaaaagaaaaaaaaagtcaacattgtcaagctgtttgtttactctttctttgaaaacatcaccttctgaaatttgtcttttagctctctcagattcttccccaaatgaggcagggtgcagacagcacagtcagctctgcagagtttggaggggctcactgccactgggtactcagaacctctgtggactggatgtcagctctttcctttggcagcgtgtttccttttccgagtatgtgctgttaaactagattggccggttcgctttccatttcctgacacttgacatggaatgcctttgaccattggtgctctgacagagaagtcatggagtcattgccatttcctggttgcccttttggaatgtgatcctgttagtagaggttttctagcttctactaagatatttctttccctaaccatcatacacttggcatgtttcattcccatctcctttcccctcaccttaaaggagactacccctttgccccatattgtcaacctaattttctctcgtactctctctagtgaatgatgtgctaccaagtatatgccangctgtgagaggattatactgagtagtagaaagaactaatttgaaataaaaattatttggataattaagaaagcngattanatgcccatggtcaacaaggaagttgactgnatggctgctaagttagattcaaaacatc

SEQ ID NO: 2400 - DNA, 884 bp, Homo sapiens
  misc_feature (723)..(723): "n" may be a, t, c, g, other or unknown
  misc_feature (812)..(812): "n" may be a, t, c, g, other or unknown
  misc_feature (827)..(827): "n" may be a, t, c, g, other or unknown
  misc_feature (876)..(876): "n" may be a, t, c, g, other or unknown
tcaagatgcacttagtaagccccatggaactgtgaaagccatatgtatccctgaaggagcaaaatacttaaaaaggaaagacattgaatccattagaaactttgcagctgaccattttaatcaggaaatcttacctgtattccttaacgccaatagaaactggaattctccagttgctaatttcataatggagtcacaaagactggaattaatcagactaatggagacccaagaggaagatgtggtcctactaactgctggagagcacaataaagcatgctctttgttaggaaaattacgactggaatgtgctgaccttctagaaacaagaggagtggtgctccgtgaccccactctgttctctttcctttgggtggtagatttcccactcttcctgcccaaggaggaaaatcccagagagctggaatcggcccaccacccatttactgctccccaccccagtgacatacatctcctgtacactgagcccaaaaaggaggatgtgaaaatgctctcccatctgctccaggctttagattatggggcaccccctcatggaggaattgccttagggttagacagactgatatgccttgtcactggatctccaagcatcagagatgtcatagccttcccaaagtccttccggggacatgacctcatgagcaataccccagattctgtcccttctgaggaactgaagccctatcatatccgagtctncaagccaacagacttcaaaagcagaaagagctcattgaatcatgcataccatgccgaaaggttgagcttttaggtttggcctctttggnttcccaaggttaagncagatctagagtctgcccaggctacatcaagctttaaaggaaggaatcnggcacatt

SEQ ID NO: 2401 - DNA, 742 bp, Homo sapiens
  misc_feature (657)..(657): "n" may be a, t, c, g, other or unknown
  misc_feature (680)..(680): "n" may be a, t, c, g, other or unknown
  misc_feature (705)..(705): "n" may be a, t, c, g, other or unknown
ttgcttgcctttgcctttgaggctctgtggctgtggggctgagtggcatcatggcggctcagaaagatctctgggacgccattgtgattggggcggggatccagggctgcttcactgcataccacctggccaaacacaggaagaggatcctcctgctggagcagttctttctaccacactcccgaggaagctcccatggacaaagccggataatccgaaaggcgtacctggaagacttttacacccggatgatgcatgagtgctatcagatatgggcccagctggagcacgaggctggaacccaattgcacaggcagactggattactgctgctgggaatgaaagagaatcaagaattaaagacaatccaggccaatctgtcgaggcagagggtagaacaccagtgtctttcatctgaggaactgaagcaacgtttcccaaatattcggttgcccaggggagaagtggggctcttggacaattccggaggagttatctatgcatataaggccctcagagccctgcaggatgcaattcgacagctaggaggcatagtgcgtgacggagagaaggtggtggagataaacccagggctactggtcacggtgaaaaccaccttcaggagctaccaagctaagagcttggtcatcacagcangtccttggaccaaccagcttctncgtcccctgggcattgagatgcctnttcagacccttgcggatcaacgtgtgttactggccaa

SEQ ID NO: 2402 - DNA, 898 bp, Homo sapiens
  misc_feature (814)..(814): "n" may be a, t, c, g, other or unknown
  misc_feature (895)..(895): "n" may be a, t, c, g, other or unknown
  misc_feature (897)..(897): "n" may be a, t, c, g, other or unknown
acaatgtgctagaacaaatcacaagctttgcgtcaggaacatcctatcatctccctttggctcaccacattcagctcatctttgatctcatggagccagcactgaacatcaacggactaattgacttcgcaatacagttactaaatgaactgagtgttgtggaagctgaactgctcctaaaatcctccagcctggcaggaagttatacaacaggactgtgtgtctgcatcgtggctgttctcaggcgctatcacagttgtctaatcttgaatcctgatcagacagcccaggtgtttgaagggttgtgtggtgtggtcaagcatgtcgtaaacccctcagaatgttcttcccctgaaagatgcattttagcctacctctatgatctctatgtgtcatgtagccacctcagaagtaaatttggagacctcttcagtgcctgttcaaaagtaaagcaaaccatatataataacgtgatgcctgcaaattcgaacttgcgatgggatccagacttcatgatggattttattgagaatccctcagcccgcagcatcaactactcaatgctgggcaagatcctcagtgacaatgcggccaatcgctacagctttgtctgcaatacactcatgaatgtatgtatgggccatcaggatgctggcaggattaacgacatagccaatttctcctctgagcttacggcttgctgcactggtcttagttcagaatggctgggggttctgaaggctctttggtggtcttcaaatcacgtgtgggggttttaaaggatggactttgcactggaaaatgtgaagtggancctttcatttccatggattcatttactactttcactggtaattctggatagcccgacagtggttttttccctgggaggacntnc

SEQ ID NO: 2403 - DNA, 829 bp, Homo sapiens
  misc_feature (772)..(772): "n" may be a, t, c, g, other or unknown
  misc_feature (778)..(778): "n" may be a, t, c, g, other or unknown
  misc_feature (799)..(799): "n" may be a, t, c, g, other or unknown
aaaaaaaaaaaaaaaaaattttctgctccttttgtgccttcttttagattgttttctttatattttcctcagctagtttgaaagttagttgttacatttctattcttttggtgtttaccttcagttttttaattggagtataatttaccttcagtaaaattcatattttttggagtatagttctgagttttgataaacagataacagtcatgtaaccaccaaccaccaccatcgtcatgttatagaacaattccatcaccccaaaaattttcttttgccccttgtagtcaacctctttccacatttctggcctttggcaaccactgaactgttttctgtttgtatagtgttgcatttttccagaatgtcatataaatggaattattcctttacttaccatactgaatttgacattcatgcatattattccttgtgtccataatttatttttattattaaatagtattccattgtatggatattatcacagtttgtttatccgttgaccaaatgaaggacatgtgggtgggttttttttttgagacagagtctcagtctgtcactcaggctggagtgcagtagtgcaaacacggctcactgcagcctcaacctcctgggctcaagtgatcctcctacctctgcctcctgggtagctaggactacatgcatgtgccaccacactcagttttttaattttttgtaacagatagagagatagagatattgcccaggctggttttgaactcctggcctcaagtgaccctcccacctnagtttncccaagtgcttgggattacanggggtgtgccaccacacctgggcccattcc

SEQ ID NO: 2404 - DNA, 665 bp, Homo sapiens
  misc_feature (593)..(593): "n" may be a, t, c, g, other or unknown
  misc_feature (603)..(603): "n" may be a, t, c, g, other or unknown
  misc_feature (632)..(632): "n" may be a, t, c, g, other or unknown
gggaggagaagtctcagctagaacgagcggccctaggttttcggaagggaggatcagggatgtttgcgagcggctggaaccagacggtgccgatagaggaagcgggctccatggctgccctcctgctgctgcccctgctgctgttgctaccgctgctgctgctgaagctacacctctggccgcagttgcgctggcttccggcggacttggcctttgcggtgcgagctctgtgctgcaaaagggctcttcgagctcgcgccctggccgcggctgccgccgacccggaaggtcccgaggggggctgcagcctggcctggcgcctcgcggaactggcccagcagcgcgccgcgcacacctttctcattcacggctcgcggcgctttagctactcagaggcggagcgcgagagtaacagggctgcacgcgccttcctacgtgcgctaggctgggactggggacccgacggcggcgacagcggcgaggggagcgctggagaaggcgagcgggcagcgccgggagccggagatgcagcggccggaagcggcgcggagtttgccggaggggacggtgccgccagaagttggaggagccgncgccctctgncacctggagcaactgtggcgctgcttctncccgctggcccaaaatttctgtggctctggttc

SEQ ID NO: 2405 - DNA, 788 bp, Homo sapiens
  misc_feature (658)..(658): "n" may be a, t, c, g, other or unknown
  misc_feature (720)..(720): "n" may be a, t, c, g, other or unknown
  misc_feature (744)..(744): "n" may be a, t, c, g, other or unknown
  misc_feature (772)..(772): "n" may be a, t, c, g, other or unknown
tgacaatatagaagattctacagcaagattagatacacaacactctgaagacatgaatgccaccagatctgaagagcagttccatgttataaaccacgcagagcaaactcttcgtaaaatggagaactacttgaaagagaaacaactatgtgatgtgctactgattgcaggacacctccgcatcccagcccataggttggttctcagcgcagtgtctgattattttgctgcaatgtttactaatgatgtgcttgaagccaaacaagaagaggtcaggatggaaggagtagatccaaatgcactaaattccttggtgcagtatgcttacacaggagtcctgcaattgaaagaagataccattgaaagtttgctggctgcagcttgtcttctgcagctgactcaggtcattgatgtttgctccaattttctcataaagcagctccatccttcaaactgcttagggattcgatcatttggagatgcccaaggctgtacagaacttctgaacgtggcacacaaatacactatggaacacttcattgaggtaataaaaaaccaagaattcctcctgcttccagctaatgaaatttcaaaacttctgtgcagtgatgacattaatgtgcctgatgaagagaccatttttcatgctctaatgcantgggtggggcatgatgtgcagaataggcaaggagaactggggatgctgctttcttacatcanactggccattacttccaccacagntactgggcagatcttggaaacccagttnccatggtttacctggg

SEQ ID NO: 2406 - DNA, 823 bp, Homo sapiens
  misc_feature (805)..(805): "n" may be a, t, c, g, other or unknown
  misc_feature (807)..(807): "n" may be a, t, c, g, other or unknown
  misc_feature (817)..(817): "n" may be a, t, c, g, other or unknown
tgctcaggcagttcttcaagctgtgacagctgtccagacagcaaatactcctcttagtggcaccacagttagcgagagtgcagtgactccagcccagagtccagtacttagaataattattgacaacatgtactaccctgtaacacttgatgttcttcaccaaatattttctaagtttggtgctgtattgaagataatcacatttacaaaaaataaccagtttcaagctttgctccagtatggtgatccagtaaatgctcaacaagcaaaactagccctagatggtcagaatatttataatgcctgctgtaccctaaggattgatttttccaaacttgtgaatttgaatgtaaaatacaacaatgataaaagtagggattatactcgacctgatcttccatctggggatggacaacctgcattggacccagctattgctgcagcatttgccaaggagacatccctcttagctgttccaggagctctgagtcctttggccattccaaatgctgctgcagcagctgctgcagctgctgctggccgagtgggtatgcctggagtctcagctggtggcaatacagtcctgttggttagcaatttaaatgaagagatggttacgccccaaagtctgtttaccctcttcggtgtttatggagatgtgcagcgtgtgaagattttatacaataagaaagacagcgctctaatacagatggcttgatggaaaccaatcacacttggcatgaatcatcttaatggacagaaaatggtttgggaaaaatatttcggggtactctggctaaacatnanactgtccagntacctt

SEQ ID NO: 2407 - DNA, 814 bp, Homo sapiens
  misc_feature (632)..(632): "n" may be a, t, c, g, other or unknown
  misc_feature (740)..(740): "n" may be a, t, c, g, other or unknown
  misc_feature (746)..(746): "n" may be a, t, c, g, other or unknown
  misc_feature (806)..(806): "n" may be a, t, c, g, other or unknown
taatcatctaaagcaacaggtacaacagctacaagtcttgttgctacaggcccatggaggtaccctgcctggatctataactgtggaaccatcagagaatctacaatccctgatggagaagaatcagtccctggtagaggagaatgaaaaattaagtcgtggtctgagcgaggcagctggtcagacagcccagatgttggagaggatcatttggacagagcaagcgaatgaaaaaatgaacgccaagctagaagagctcaggcagcatgcggcctgcaaactggatcttcaaaagctagtggagactttggaagaccaggaattgaaagaaaatgtagagataatttgtaacctgcagcaattgattacccagttatcggatgaaactgttgcttgcatggctgcagccattgatactgcggtggagcaagaagcccaagtagaaaccagtccagagacgagcaggtcttctgacgcttttaccactcagcatgctctccgtcaagcgcagatgtctaaggagctggttgagttgaataaagcgcttgcactgaaagaggccctggctaggaagatgactcagaatgacagccaactgcagcctattcagtaccaataccaggataacatanaagagctagaattagaagtcatcaatctgcaaaaggaaaaggaagaattggtcttgacttcagacagcaaagaaggtgccaaccaaccaagttgagtgagcccgccgnaacgtntcagaactgaggcaatgctgtctgaaaaaactgatgacagccaactttgaactaagatcncgacgctg

SEQ ID NO: 2408 - DNA, 831 bp, Homo sapiens
  misc_feature (784)..(784): "n" may be a, t, c, g, other or unknown
  misc_feature (800)..(800): "n" may be a, t, c, g, other or unknown
  misc_feature (821)..(821): "n" may be a, t, c, g, other or unknown
agatggttctgaactttgataccaaggatcccctcatcctgtcctgcgtccttactaatgtctctgcactctttccatttgtcacctacagaccagagttcctgccccaggtcttctctaagctattttcatctgtcacttttgaaactgttgaagaaagtaaggcccccagaacccgggcagtgaggaatgtgaggaggcatgcttgttcctccatcatcaagatgtgtcgtgactacccccagcttgtgctgcccaattttgacatgctttataaccatgtgaagcaactcctctccaatgagctactcctgacacaaatggagaagtgtgccctcatggaagccctggttctcattagcaaccaatttaagaactacgagcgtcagaaggtgttcctagaggagctgatggcaccagtggccagcatctggctttctcaagacatgcacagagtgctgtcagatgttgatgctttcattgcgtatgtgggtacagatcagaagagctgtgacccaggcctggaggatccgtgtggcttaaaccgtgcacgaatgagcttttgtgtatacagcattctgggtgtggtgaaacgaacttgctggcccactgacctagaagaggccaaagctgggggatttgtggtgggttatacatccagtggaaatccaatcttccgtaacccctgcacagagcagattctgaaacttcttgacaatttgcttgcgcttataagaacccacaatcattatatgcaccagaaatgctagcccaaatggcagancctttcaccaaggctnttggatatgcttgacgccggnaaaaactgct

SEQ ID NO: 2409 - DNA, 648 bp, Homo sapiens
  misc_feature (614)..(614): "n" may be a, t, c, g, other or unknown
  misc_feature (633)..(633): "n" may be a, t, c, g, other or unknown
  misc_feature (640)..(640): "n" may be a, t, c, g, other or unknown
acatgccatggtggctatgtgtataccacagggcgtgatggagcctactaccagctgtttgtacgagacggccagctccagccagtcctaaggcagaagtcctgtcgaagcatgaactggctagctgggctccgtatagtgcccgatgggagcatggttatcctgggtttccatgccaatgagtttgtggtgtggaaccctcggtcacacgagaagctgcacatcgtcaactgtggtggagggcaccgttcgtgggcattctctgatactgaggcggccatggcctttgcttacctcaaggatggggatgtcatgctgtacagggctctgggtggctgcacccggccacacgtgattctccgggagggtctgcatggtcgtgagatcacttgtgtaaagcgtgtgggcaccattaccctggggcctgaatatggagtgcccagcttcatgcagcctgatgacctggagcctggcagtgaggggcccgacttgactgacattgtgatcacatgtagtgaggacactactgtctgtgtcctagcactccctacaaccacaggctcagcccacgcactcacagctgtttgtaaccatatctcctcggtacgtgctgnggctgtgtggggcattggnaccccangtggccct

SEQ ID NO: 2410 - DNA, 752 bp, Homo sapiens
  misc_feature (675)..(675): "n" may be a, t, c, g, other or unknown
  misc_feature (695)..(695): "n" may be a, t, c, g, other or unknown
  misc_feature (733)..(733): "n" may be a, t, c, g, other or unknown
ctagtctatctccgcttcctcaacctctcctacaaccccatcagcaccattgagggctccatgttgcatgagctgctccggctgcaggagatccagctggtgggcgggcagctggccgtggtggagccctatgccttccgcggcctcaactacctgcgcgtgctcaatgtctctggcaaccagctgaccacactggaggaattagtcttccactcggtgggcaacctggagacactcatcctggactccaacccgctggcctgcgactgtcggctcctgtgggtgttccggcgccgctggcggctcaacttcaaccggcagcagcccacgtgcgccacgcccgagtttgtccagggcaaggagttcaaggacttccctgatgtgctactgcccaactacttcacctgccgccgcgcccgcatccgggaccgcaaggcccagcaggtgtttgtggacgagggccacacggtgcagtttgtgtgccgggccgatggcgacccgccgcccgccatcctctggctctcaccccgaaagcacctggtctcagccaagagcaatgggcggctcacagtcttccctgatggcacgcttggaggtgcgctacgcccaggtacaggacaacggcacgtacctgtgcatcgcggccaacgcgggcggcaacgactccatgcccgnccacctgcatgtgcgcaagntacttcgcccgactggccccattaagcccaacaagaanccttcgcttttcatcttcc

SEQ ID NO: 2411 - DNA, 773 bp, Homo sapiens
  misc_feature (754)..(754): "n" may be a, t, c, g, other or unknown
  misc_feature (763)..(763): "n" may be a, t, c, g, other or unknown
  misc_feature (768)..(768): "n" may be a, t, c, g, other or unknown
ggcgccgggggacacgttggctgcgttttcggcgggcctcccgggtacaaaaatggctgtggctagcgatttctacctgcgctactacgtagggcacaagggcaagtttgggcacgagtttctggagttcgaatttcggccggacggaaagcttagatatgccaacaacagcaattacaaaaatgatgtgatgatcagaaaagaggcttatgtgcacaagagtgtaatggaagaactgaagagaattattgatgacagtgaaattacaaaagaagatgatgctttgtggcctccccctgatagggttggccgacaggagcttgaaattgtaattggagatgagcacatatcttttaccacatcaaaaataggttctcttattgatgtaaatcagtcaaaggatcctgaaggccttcgagtattttactatttggtacaagacttgaaatgtttagttttcagtcttattggattacacttcaagattaaaccaatttaaattgtatgttttcaggctgtttgtatatttaattaagggatgggaggggttatttgtcatttacagtattggggtttttatgaatgtgaagcaaacaaaaaaaatttgtatgtaaactgaaaataagaaaatacattagcaagcttaatggttatccttacttgagtccacatgggttggacagtccccacacacattaaattctggaaatgaaagccaccttttggtaaaaatttgctctaataaaacataccnaatcctggnttgcnaaata

SEQ ID NO: 2412 - DNA, 831 bp, Homo sapiens
  misc_feature (643)..(643): "n" may be a, t, c, g, other or unknown
  misc_feature (809)..(809): "n" may be a, t, c, g, other or unknown
  misc_feature (828)..(828): "n" may be a, t, c, g, other or unknown
  misc_feature (831)..(831): "n" may be a, t, c, g, other or unknown
tgttcaaagacgtacattcaactcaagagtccagctctacagcagctatatttggaaatacacatattttatggccagtatataaatgatttttaataaaattctaccaaatatctggctgggtagctgccctcgtcaggtggaacatgtaaccatcaaactgaagcatgaattggggattacagctgtaatgaatttccagactgaatgggatattgtacagaattcctcaggctgtaaccgctacccagagcccatgactccagacactatgattaaactatataggaagaaggcttggcctacatctggatgccaacaccagatatgagcaccgaaggccgagtacagatgctgccccaggcggtgtgcctgctgcatgcgctgctggagaagggacacatcgtgtacgtgcactgcaacgctggggtgggccgctccaccgcggctgtctgcggctggctccagtatgtgatgggctggaatctgaggaaggtgcagtatttcctcatggccaagaggccggctgtctacattgacgaagaggccttggcccgggcacaagaagattttttccagaaatttgggaaggttcgttcttctgtgtgtagcctgtaactggtcagcctgcttctgccccctnctgatttccctaaggagcctgggatgatgtggtcaaatgacctagaaacaaggattctacctgaactgaaaggactgtgtgaccttccccaaccaaccactttcacctgggatgactttcgaatatgctttggtttggggctggattttttgaaatcttttccagnaaactgggggttaaccccntgn

SEQ ID NO: 2413 - DNA, 818 bp, Homo sapiens
  misc_feature (601)..(601): "n" may be a, t, c, g, other or unknown
  misc_feature (648)..(648): "n" may be a, t, c, g, other or unknown
  misc_feature (675)..(675): "n" may be a, t, c, g, other or unknown
  misc_feature (759)..(759): "n" may be a, t, c, g, other or unknown
  misc_feature (775)..(775): "n" may be a, t, c, g, other or unknown
  misc_feature (817)..(817): "n" may be a, t, c, g, other or unknown
tggggtgtcgctccgggctggtggcggggccactgccccgcttgggggaagccgagcgatggtttgtgggcgccagttgtctggcgccgggagtgagaccctaaaacaaagaagaacacaaatcatgtcccgaggacttccaaagcagaaaccgatagaaggtgttaaacaagttatagttgtggcttctggaaagggtggagtcggaaaatctactacagcagtgaatcttgcacttgcactagcagcgaacgattcgtccaaggccattggtttgctagatgtggatgtgtatggaccttcagttccaaagatgatgaatctgaaaggaaatccggaattatcacagagcaacctaatgaggcctctcttgaattatggtattgcttgtatgtctatgggctttctggttgaagaaagtgaaccagtagtttggagaggccttatggtaatgtcggccattgagaaattgttgaggcaggtagattggggtcaactggactacttagttgtagacatgccaccaggaactggagatgtgcagttatcagtctcacagaatattcctataacaggtgctgtgattgtctccacgccccangacatcgcattgatggatgcacacaagggtgctgagatgtttcgcanagtccacgtgcccgtccttggccttgnccaaaacatgaatgttttccagtggtccaaaatgtaaacacaaaactcatatttttggtgctgatggtcaaggaaactagccanacccttggtcttgaanttctaggagacattccttacaccttaatataagggaagcttna

SEQ ID NO: 2414 - DNA, 841 bp, Homo sapiens
  misc_feature (800)..(800): "n" may be a, t, c, g, other or unknown
  misc_feature (812)..(812): "n" may be a, t, c, g, other or unknown
  misc_feature (831)..(831): "n" may be a, t, c, g, other or unknown
tgaaaaaagatggtgaagaatgtactaacgaaggcaaaggaatagctgcacgaattcttgggccatccaaaccacctccttcaacatataatccacataaacctgttccttatccgatacctccatgccgaccacatgcaactattgcaccaagtgcttataacaatgcaggtctggtaccattagcgaatgtcatagctccacctccacctccatatactcctaatcctgtaggaacagagaatgaagacctttcgaatccgtcaaaacctatacagaatcaaacattttccaccccagcaagtcaactcttttctcctcatggttctaatccttcaacacctgctgcaactcctgttcctactgcatccccagtcaaggcaattaatcatccatcagcatcagcagctgccaccgtttctggaatgaacctgctgaatactgtccttcctgtgttcccagggcaggtctcctcagccgttcacacacctcagccatcaataccaaacccaacagttatcagaaccccttcattgcccactgcacctgttacatccatccacagtacaaccaccactcctgttccttccattttttctggcctagtgtcactgccaggtccttctgccactcctaccgcagccactcctaccccaggacctacaccacggtccactcttggttccagtgaagcatttgcttctacttctgcacctttcactagcctcccttttccaccagctcttctgctgcttctaccagcaacccaaattctgcttcattggcatcagtttttgcanggcttcctttgnccttacaccaacatccaanggctatccaa

SEQ ID NO: 2415 - DNA, 780 bp, Homo sapiens
  misc_feature (646)..(646): "n" may be a, t, c, g, other or unknown
  misc_feature (690)..(690): "n" may be a, t, c, g, other or unknown
  misc_feature (753)..(753): "n" may be a, t, c, g, other or unknown
  misc_feature (776)..(776): "n" may be a, t, c, g, other or unknown
cgtatcaacgggcatgatgttgtcctggcaacgttttctacaccttataacagcatccctgggtctgcagtctgtgcctatgacatgcttgacattgccagtgtttttactgggagattcaaggaacagaagtctcctgattccacctggacaccagttcctgatgaacgagttcctaagcccaggccaggttgctgtgctggctcatcctccttagaaagatatgcaacctccaatgagttccctgatgataccctgaacttcatcaagacgcacccgctcatggatgaggcagtgccctccatcttcaacaggccatggttcctgagaacaatggtcagataccgccttaccaaaattgcagtggacacagctgctgggccatatcagaatcacactgtggtttttctgggatcagagaagggaatcatcttgaagtttttggccagaataggaaatagtggttttctaaatgacagccttttcctggaggagatgagtgtttacaactctgaaaaatgcagctatgatggagtcgaagacaaaaggatcatgggcatgcagctggacagagcaagcagctctctgtatgttgcgttctctacctgtgtgataaaggttccccttggccggtgtgaacgacatnggaagtgtaaaaaaacctgtattgccttcagagacccatattgnggatggataaaggaaagtggtgcctgcagccatttatacccacagcagactgacttttgagcnggacattaagcgtggcaataccnatgg

SEQ ID NO: 2416 - DNA, 638 bp, Homo sapiens
  misc_feature (624)..(624): "n" may be a, t, c, g, other or unknown
  misc_feature (630)..(630): "n" may be a, t, c, g, other or unknown
  misc_feature (632)..(632): "n" may be a, t, c, g, other or unknown
tggtgagatgtttctggaagaaaaaatcccctcgatttctgatttaaagctagcaattcgaagagctactctgaaaagatcatttactcctgtatttttgggaagcgccttgaagaacaaaggagttcagcctcttttagatgctgttttagaatacctcccaaatccatctgaagtccagaactatgctattctcaataaagaggatgactcaaaagagaaaaccaaaatcctaatgaactccagtagagacaattcccacccatttgtaggcctggcttttaaactggagtttttgtctaggtcctttttccgtctcactagacagaaggaccacagaaggcccatccagaggaccacgttatatttgattgtcatgtctccttatgatctcctaggctgtaatagtttcttagactttccttgtttctcacgagattgatatttttgagaagtattggtcagctcttttgtagagtgtccctcaatttgggtttattatttgatgcttttcacatgattagattggagtcatgtgtttttaggaggactgccatcgaggtgaagtgttattcttgtcacatcatatccaaggtacagacttgcagcatgatttatcattgnttttgntntttttg

SEQ ID NO: 2417 - DNA, 669 bp, Homo sapiens
  misc_feature (610)..(610): "n" may be a, t, c, g, other or unknown
  misc_feature (655)..(655): "n" may be a, t, c, g, other or unknown
  misc_feature (665)..(665): "n" may be a, t, c, g, other or unknown
gtgtggagtttacggagccggtgggcggtaggcggtgctacgggtagctgggtgctgtccaaaggcgacagggcgtcgttaggggagcgagtcgtgaccggttgggccacactcaacgtgggacgaagcttcgcctactgtttgactacgtgcgtgcagcctcccctcgatgtcggccctcgaaaagagcatgcacctcggccgccttccctctcgcccacctctacccggcagcgggggcagtcagagcggagccaagatgcgaatgggccctggaagaaagcgggacttttcccctgttccttggagtcagtattttgagtccatggaagatgtagaagtagagaatgaaactggcaaggatacttttcgagtctacaagagtggttcagagggtccagtcctgctccttctgcatggaggaggtcattctgccctttcttgggctgtgttcacggcagcgattattagtagagttcagtgtaggattgtagctttggatctgcgaagtcatggtgaaacaaaggtcaagaatcctgaagatctgtctgcagaaacaatggcaaaagacgttggcaatgtggttgaagccatgtatggggaccttctnctccaattatgctgattggacatagcatgggtggtgctattgagnccacacagcntcat

SEQ ID NO: 2418 - DNA, 734 bp, Homo sapiens
  misc_feature (667)..(667): "n" may be a, t, c, g, other or unknown
  misc_feature (689)..(689): "n" may be a, t, c, g, other or unknown
  misc_feature (691)..(691): "n" may be a, t, c, g, other or unknown
cagcttcgagacagagtgatagatggaactccttgtggccaggacacaaatgatatctgtgtccagggcctttgccggcaagctgaaattcctcagagtgaaaactgtacccctcctcagcaaagtggatgatatccatgctatctgtagccttctaaaagactttcttcgaaacctcaaagaacctcttctgacctttcgccttaacagagcctttatggaagcagcagaaatcacagatgaagacaacagcatagctgccatgtaccaagctgttggtgaactgccccaggccaacagggacacattagctttcctcatgattcacttgcagagagtggctcagagtccacatactaaaatggatgttgccaatctggctaaagtctttggccctacaatagtggcccatgctgtgcccaatccagacccagtgacaatgttacaggacatcaagcgtcaacccaaggtggttgagcgcctgctttccttgcctctggagtattggagtcagttcatgatggtggagcaagagaacattgaccccctacatgtcattgaaaactcaaatgccttttcaacaccacagacaccagatattaaagtgagtttactgggacctgtgaccactcctgaacatcagcttcttaagactccttcatctagntccctgtcacaaaaaagtccgntncaccttaccaagaacactcctagatttgggagcaaaagcaagt

SEQ ID NO: 2419 - DNA, 774 bp, Homo sapiens
  misc_feature (637)..(637): "n" may be a, t, c, g, other or unknown
  misc_feature (738)..(738): "n" may be a, t, c, g, other or unknown
  misc_feature (750)..(750): "n" may be a, t, c, g, other or unknown
  misc_feature (753)..(753): "n" may be a, t, c, g, other or unknown
tcaacatggtagcgcccggccgagtgctcatctgcactgtcaaggatgagggctccttccacctcaaggacacagccaaggctctgctgaggagcctgggcagccaggctggccctgccctgggctggagggacacatgggccttcgtgggacgaaaaggaggtcctgtcttcggggagaaacattctaaatcacctgccctctcttcctggggggacccagtcctgctgaagacagatgtgccattgagctcagcagaagaggcagagtgccactgggcagacacagagctgaaccgtcgccgccggcgcttctgcagcaaagttgagggctatggaagtgtatgcagctgcaaggaccccacacccatcgagttcagccctgacccactcccagacaacaaggtcctcaatgtgcctgtggctgtcattgcagggaaccgacccaattacctgtacaggatgctgcgctctctgctttcagcccagggggtgtctcctcagatgataacagttttcattgacggctactatgaggaacccatggatgtggtggcactgtttggtctgaggggcatccagcatactcccatcagcatcaagaatgcccgcgtgtctcacactacaaggccagcctnctgccactttcaacctgtttccggaggccaagtttgctgtggttctggaagaggacctggacattgctggggattttttcagtttcctgagccaatccatncacctactggangangatgacagctgtactggatct

SEQ ID NO: 2420 - DNA, 738 bp, Homo sapiens
  misc_feature (394)..(394): "n" may be a, t, c, g, other or unknown
  misc_feature (404)..(404): "n" may be a, t, c, g, other or unknown
  misc_feature (440)..(440): "n" may be a, t, c, g, other or unknown
  misc_feature (593)..(593): "n" may be a, t, c, g, other or unknown
  misc_feature (607)..(607): "n" may be a, t, c, g, other or unknown
  misc_feature (615)..(615): "n" may be a, t, c, g, other or unknown
  misc_feature (702)..(702): "n" may be a, t, c, g, other or unknown
  misc_feature (717)..(717): "n" may be a, t, c, g, other or unknown
  misc_feature (723)..(723): "n" may be a, t, c, g, other or unknown
acagaaggcggggccagcgccgctgccgggtgctggaggcgccattggagccggcttggctggcgagcccggctgaggagcctcttgggtcgcacttaccgccgcgtccgctcccggtccctggcccctcagcggcatggcgtgcggggcgacgctgaagcggcccatggagttcgaggcggcgctgctgagccccggctccccgaagcggcggcgctgcgcccctctgcccggccccactccgggcctcaggcccccggacgccgagccgacgtcgccgtttcagacgcagaccccaccgcagagtctgcagcagcccgccccgcccggcagcgagcggcgccttccaactccggagcaaatttttcagaacataaaacaagaatatagtcgntatcagaggnggagacatttagaagttgttcttaatcagagtgaancttgtgcttcggaaagtcaacctcactcctcagcactcacagcacctagctctccaggttcctcatggatgaagaaggaccagcccacatttaccctccgacaagttggcataatatgtgagcgcctcttaaaagactatgaagataaaattngggaggagtatgancaaatctnaataccaaactagcagaacaatatgaatctttttgtgaaaatcacacatgatcagattatgcgacggtatgggacaagggcaacaanctatgtgtcatgaanctttgncacatatctgggtat

SEQ ID NO: 2421 - DNA, 805 bp, Homo sapiens
  misc_feature (677)..(677): "n" may be a, t, c, g, other or unknown
  misc_feature (755)..(755): "n" may be a, t, c, g, other or unknown
  misc_feature (796)..(796): "n" may be a, t, c, g, other or unknown
  misc_feature (799)..(799): "n" may be a, t, c, g, other or unknown
ttacccgatcccactctccagacccgccgctgcctatgaggaggccctgcagctggtgaaggaggggagagtgccttgccggaccctcaggacggagctgctgggctgctacagtgaccaggactttctggccaagctgcactgtgtgcggcaggccttcgaggggcttctggaagacaagagtaaccagcttttcttcgggaaagtgggccgacagatggtgacaggcctgatgaccaaggctgagaagagccccaaaggcttcctggagagctacgaggagatgctgagctatgccctgcggcccgagacctgggccacaacacggctggagctggagggccgaggggtggtatgcatgagcttcttcgacatcgtgctggacttcatcctcatggacgccttcgaggacctggagaaccctccggcctcggtgctcgccgtcctgcggaaccgctggctgtcagacagcttcaaggagacggccttggccactgcttgctggtcggtcctgaaagccaagaggaggctgctgatggtgcctgatggcttcatctcccatttctactccgtatcggagcatgtgagccctgtcctagccttcggcttccttggacccaagcctcacttgctgaagtctgtgctttcttcaagcaccagattgtgcagtacctganggacatgttcgacctggacaatgtgcgcttacacgtcacttgccgcgctggcagacgacatccttgcactgtcccggngccgcaacgagatattgctggggtacctgggggtgccccgnggncagcaa

SEQ ID NO: 2422 - DNA, 856 bp, Homo sapiens
  misc_feature (825)..(825): "n" may be a, t, c, g, other or unknown
  misc_feature (832)..(832): "n" may be a, t, c, g, other or unknown
  misc_feature (837)..(837): "n" may be a, t, c, g, other or unknown
atttagattattttggatacattttgaaaagggatagcataaatattttaagtaaaaagacctttattttaaataatagtggatattttaatgctggaaattagcattatagttgatatgccagaaattatatctttggttgtgatttaaacttatgctataaactaaattaatgatgtaaatacatagttttaaacattcttttagggacatgtaacttttaagtatcacttcaataatacgtattattataggaacaaagatttgggaataattgattacaggtgaggaagtactggaattccagttcaaggagataccatttcatttaggactaaaaggacaagatacaagttcacatgatgggaaaaatcagaaaacctctcgcagacaaagggtatataatggatatgaggcatcaaaaagcatggtatagtcagtgatggggaatagtccagaaaggctgaaacacagcatgtgatgcgagtcaaggtagttgatgcccaactgtgaagggccgttctaatctagcatggaggtagacagtgtttccttaatatggctgcatatcagaattacctaggtcaggacgaggcatggagatgctactttaataggccctgccgcagatcttccaaaccagaatcttaatcctggagtctaggaatctttatttttcacacactcatccaagtggtctgataaaatcagtccagcacttttagaacccactgataacagacttattcctggagacgcatttgaggaggaattggaagaattttctaatggaaaaggaaaaaagggtcacatggaaccagaatnttgcaangggancctggggcccagggaattt

SEQ ID NO: 2423 - DNA, 608 bp, Homo sapiens
  misc_feature (534)..(534): "n" may be a, t, c, g, other or unknown
  misc_feature (547)..(547): "n" may be a, t, c, g, other or unknown
  misc_feature (599)..(599): "n" may be a, t, c, g, other or unknown
aaaacaattggtatatgaaatatacacatcctgtgccccaatatggtgcattatgaaaaacaaaatcattttctaaaatgcattttttgagcattgctctatagaagggaagggtgatgagagaacagaactggcccctgtacaggtgtcattaatctggttgtatatgggttataatatgtaatacaaaaagctcattaagtatgggactacatggagagggaagacagtttcatttatagctactggggctaccaggacccttgctgactgcagcctggttgtgattagttcaggttactaggtgttctgatggagtgggacagtccaagtccagtaactgacattacgttttatgcgtgtgcagtttggtataacgtggagtcagtgctctaacgacacactatacttctatatgcttttttctgtgaattttccttggtacatgagagaaataagtactctcatcaacttatgataaattggactattaggaataaaacaatctcagagcagctcctaaacaagagaatnaaaatgggccatnccagcacttataaggggagcacatcttgtaatgaaagtctgtgcctattggnaatgattcc

SEQ ID NO: 2424 - DNA, 822 bp, Homo sapiens
  misc_feature (784)..(784): "n" may be a, t, c, g, other or unknown
  misc_feature (789)..(789): "n" may be a, t, c, g, other or unknown
  misc_feature (808)..(808): "n" may be a, t, c, g, other or unknown
taagaaactgaaagaattgaaccaacgcattgggaagacagagtgcagaaataagcatgaaggaatagctgataaacttttggcaaaaatagcaaaacttcaaagacgtattaaaacagtattattatttcaaaggaattgtttgaaaccaaacatgttatccagtaatggagcctctaaggttgcaaattcagaggctatgattttggataagaatcttgagtcagttaatagtccaattgaaaagtcttctgtgaattatgagccttctaacccttccgaaaaaggaagtaaaaaaattaatttgtcatcagatcaaaataagtctgtttctgaaagtaacaatgatgatgttatgttgatttctgtggaaagtcctaatttgacaactccaactacatcaaatccaacagataccagaaaaattacatcaggaaattctagcaattctcccaatgctgaagttatggctgtacagaagaaacttgattctataattgatttgacaaaagaaggcctatccaactgcaatacagaaagtccagtatcccccctggagtcacattcgaaagctgcttcaaactcaaaggaaacaaccccattggcacaaaatgcagtccaggttcctgagtcctttgagcacctgccacctcttccagaaccaccagcaccactacctggaattagtagaccaaaaccccgagacacactttctttcccagaaacctggagcttcaaaagtggaaaccgggttttcagaaccaaatgggcattggccctgacnttggnaattttaaccccaaaatcnaatccccaaagtgg

SEQ ID NO: 2425 - DNA, 859 bp, Homo sapiens
  misc_feature (829)..(829): "n" may be a, t, c, g, other or unknown
  misc_feature (833)..(833): "n" may be a, t, c, g, other or unknown
  misc_feature (856)..(856): "n" may be a, t, c, g, other or unknown
tttacccagactcctcctggaatgctggccttggacaacatgctgtacttggctaaagtccaccaggacacctacatccggattgtcttggagaacagtagccgggaagacaaacatgaatgcccctttggccgcagtgccattgagctcaccaaaatgctctgtgaaatcctgcaggttggggaactaccaaatgaaggacgcaatgactaccacccgatgttctttacccatgaccgagcctttgaagagctctttggaatctgcatccagctgttgaacaagacctggaaggagatgagggcaacagcagaggacttcaacaaggttatgcaagtcgtccgagagcaaatcactcgagctttgccctccaaacccaactctttggatcagttcaagagcaaattgcgtagcctgagttactctgagattctacgactgcgccagtctgagaggatgagtcaggatgacttccagtccccgccaattgtggagctgagggagaagatccagcccgagatccttgagctgatcaagcagcagcgcctgaaccggctctgtgagggcagcagcttccgaaagattgggaaccgccgaaggcaagaacggttctggtactgccggttggcactgaaccacaaggtccttcactatggtgacttggataacaacccacaaggggaggtgacatttgaatccctgcaggagaaaattcctgttgcagacattaaggccattgtcactgggaaagattgtccccacatgaaagagaaaagtgctcttgaaacagaaccaaggaggtggttgggaatttgggcctttttccatnctgnatgaacccttgatgagaaccttnaac

SEQ ID NO: 2426 - DNA, 812 bp, Homo sapiens
  misc_feature (476)..(476): "n" may be a, t, c, g, other or unknown
  misc_feature (608)..(608): "n" may be a, t, c, g, other or unknown
  misc_feature (747)..(747): "n" may be a, t, c, g, other or unknown
  misc_feature (762)..(762): "n" may be a, t, c, g, other or unknown
  misc_feature (799)..(799): "n" may be a, t, c, g, other or unknown
atatatcgacgaagaatggaaaaagatgtcccaatgctgccccaaagccagagaagaaagatggggtgtccttctgtgctgaacatgtccgtaggaatgccctggcacttcatgctcaaatgaagaagaccaacccagggcctgtgggtgaaacactcctgtgccagctgagctcatatgctaagacagagctggggtctcagactccagaaagtagtcgcagtgaagccagccgaatactagatgaagacagctggagtgatggggagcaggaacccattactgtggatcagacatggagaggtgaccctgacagtgaagctgatagcatagacagtgatcaagaagatcccctaaaacatgctggtgtctacacggcagaagaagtggccctgattatgcgtgaaaagctaattcgtttgcagtcgttgtatattgatcagtttaaacgacttcagcatctgctcaaggagaanaagcgccgatacttacataatcgcaaagtggaacatgaagctctaggcagtagtctcctgactggcccagagggacttttggccaaagaacgagagaacttaaagcgattaaaatgtctgcgacgataccgncagcgctatggagtggaagccttactgcataggcagttgaaggaacggagaatgctggccacagatggtgcttgcccaacaggcccataccactcgttccagtcagaggtgcttggcctttgtggatgatgttcgttgntccatcagtctcttncaatgaccagacactggccttacccataatttgtcanggataccaaatca

SEQ ID NO: 2427 - DNA, 884 bp, Homo sapiens
  misc_feature (783)..(783): "n" may be a, t, c, g, other or unknown
  misc_feature (786)..(786): "n" may be a, t, c, g, other or unknown
  misc_feature (833)..(833): "n" may be a, t, c, g, other or unknown
tcatttcatgttatgttttcatttcccctctgtctgagagattgctctgatgtctttccttccataagtcctacggagatcgagcttacctcatttttctcccaggcctaggagctcaattaccaggatcactttcttccccagggtgtactacagacctccacatgttggacagtaggattcagcagagaatgagtcccacatcctcttttcatccataagccactcttcccaactactcttccgccttccattgtccctatgtctactttactgctcaatctggattttggggaacctcctcccaaaaaggcattagaaggaaatgccaagcaccgaaattttgtcaagaagcggaggctcttagaacggagaggctttctgagtaaaaagaaccaaccccctagcaaggcgcctaagttgcactctgaaccttcaaagaaaggggagactcctacggtcgatggcacttggaagaccccttccttcccaaaaaagaagacagctgcttccagcaatgggtcaggacagcccctggacaagaaagctgcagtgtcttggttgacccctgccccttcaaaaaaggctgattctgttgctgctaaagtagatttgctgggggagttccagagtgcccttccaaagatcaatagccacccaacccgctctcagaagaagagctcccagaagaaatcctctaaaaagaaccatcctcagaagaatgccccacagaactccacccaagctcattcagagaataaatgctccggagcatcccaaaanttncacggaagatggtggcaatgactgtgaaatggtggcacaggaccaangggcatgttagttccttggctcgatgaacattgcaactacaacggagatgg

SEQ ID NO: 2428 - DNA, 706 bp, Homo sapiens
  misc_feature (653)..(653): "n" may be a, t, c, g, other or unknown
  misc_feature (689)..(689): "n" may be a, t, c, g, other or unknown
  misc_feature (695)..(695): "n" may be a, t, c, g, other or unknown
taaatgcagctagattcaaatgggctgataaccaaattttaacacatcagcaatttgcattcagaaatttaaaaaatactgggccagacataaccctcaggttactttacctctgagggtgcaacctcttctcctcaaaatgtactggttctgcctgtctggagggccatggagaagaggctgggagtcaagccaaatcctgcttcctggattttatcaggatattattggcagacatctgcgaagtggttgagaagcctgtacctgttttatacttgcttttgcttcagcgttctgtggttgtcaacagatgccagtgagagcaggtgccagcaggggaagacacaatttggagttggcctgagatctgggggagaaaatcacctctggcttcttgaaggaaccccctctctccagtcatgttgggctgcctgctgccaggactctgcctgccatgtcttttggtggctagaagggatgtgcattcaggcagactgcagcaggccccagagctgccgggcttttaggacacactcctccaattccatgctggtgtttttaaaaaaattccaaactgcagatgatttgggctttctacctgaagatgatgtaccacatcttctggggctaggttggaactgggcatcttggangcagagcccacccagagctgcactcagacctgctgnatcttncagtgccagca

SEQ ID NO: 2429 - DNA, 826 bp, Homo sapiens
  misc_feature (745)..(745): "n" may be a, t, c, g, other or unknown
  misc_feature (751)..(751): "n" may be a, t, c, g, other or unknown
  misc_feature (810)..(810): "n" may be a, t, c, g, other or unknown
atatgatgcatcctgaacctggaaaattctaccagattaatccagaagagtatgaacatccaaatccctggaaagagagtttccagcagtcgtataaaggtgcacatgtaaagccaggatttgctgaacatttctacagtaaccctgcaagatataaaggaagagaaaatatgttgtattatgatactattgaagatgcccttggtggggtacaagaggctcattttgatggacttatctttgttcattctggaatatatactgatgaatggatatatattgaatctccaatcaccatgattggtgcagcacctgggaaagtggcagacaaagttataattgaaaacactagagattcaaccttcgtttttatggaaggctctgaagatgcttatgttggatatatgacaataaggtttaaccctgatgacaaatctgcacaacaccacaatgcacaccactgcttagagattacagtaaattgtagccctattattgatcactgtatcatccgaagtacatgtacagttggttctgcagtatgtgttagtggtcaaggagcatgtcccaccatcaagcactgtaacatcagtgactgtgaaaatgttggactatatataacagatcatgcacagggaatatatgaggataatgaaatttccaataatgcgttagctgggatttgggttaaaaatcatggaaacccaattattagacggaatcatattcatcatggacgtgatgntggtgnggtcacatttgatcatggcatggggtacttttgaaagttgcaattttcccccgaaattnggatagcaggcttttg

SEQ ID NO: 2430 - DNA, 704 bp, Homo sapiens
  misc_feature (630)..(630): "n" may be a, t, c, g, other or unknown
  misc_feature (689)..(689): "n" may be a, t, c, g, other or unknown
  misc_feature (699)..(699): "n" may be a, t, c, g, other or unknown
agccagaccggcggccacaagacccctctctctaaaacaccagacccactgctgggctgcaaaaggaagcgcagaggtggtggccatgtgaggccatccacgcccaagaaaatgcaggaggtggtgaaagacggtagccaggatgccgaccacagccaggggagagctgagcccggccatgagaggcgagacctgcccatccagggcaaagccagtgaggccctgggaggggagggcaccgccaggggccctggcgacactcgcatgtcacagggccagggtaagacagacgaggcaaggcgcctagacgagaaagagagctctgaagacaaaagcagctccctggacagtgacgaggacctggacacagccatcaaggacttgttaaggtccaagcgaaagctcaagaagaggtgcagggagcccagggctgcgtgcaggaagaaggtcaggttcagcacagcccagacgcacttcttggagcagctgggcgggctccggagagactggaaagacaggggcccgccagtgctgaagagctgcctctccaagtccaagagagacagtggcgagggtcctgggaagaaaccccccagtgtctttggcagcacggcagagaggatgaggcangagggtgccgcgagccaggacgcggcctggcctttcgggtgaggagacccgcttcgctntgcttcgaanggaat

SEQ ID NO: 2431 - DNA, 882 bp, Homo sapiens
  misc_feature (704)..(704): "n" may be a, t, c, g, other or unknown
  misc_feature (809)..(809): "n" may be a, t, c, g, other or unknown
  misc_feature (820)..(820): "n" may be a, t, c, g, other or unknown
attatgctggtctccatggcggggcctcggagccaagacgaggttgagtagactcgttttgaattttctcccctctgctccggcggacttcccatgtcgccttgtggggctatcggcggcggcaggactgggggagtcagaggtctggcagcgctgtctgcgcagacctaccggacgctacctcccaacccccctgtcttcctcctgcctcctcctcctcccgtcacctcctgacccgccggagctccgagcaactgccggcctccgcctccagccgcagccggtcactggcggcgccttccgcgccaagcttgggggccttttcggggtcccacatggcacggcttccgacccccggcccgggacggggctcgcaggccccagaggggcaggctggagaaggaggaggttaggtgtcttcaggagggttgctgagcccaaggacgcgccatcgccgcggagaaggagccggaccccttgggcggagcgcccaatgtgtggtccctcacgccgtcccgcaccttgctttttagggttctttttccgctttctgagcccttttataccttacgtttagaaggggaaaatcatcctcccacaccttctccccgactttttgccttttttgtcttgaagttacccaaaggcctgtgtattggtctcaatggtcccaagaattactctaatatagttggttttctganggaagatggatggagataactatctgatcccaatgtcactttttaaggcattcgcttcaagagaacaagcagtttaagaatcaggcagaactggattgcaaaaanttaatgggcanacccggtatgtgtgcaggtgaagacaaagctttccttttttacttggtttaaagatgtctac

SEQ ID NO: 2432 - DNA, 744 bp, Homo sapiens
  misc_feature (626)..(626): "n" may be a, t, c, g, other or unknown
  misc_feature (707)..(707): "n" may be a, t, c, g, other or unknown
  misc_feature (716)..(716): "n" may be a, t, c, g, other or unknown
  misc_feature (738)..(738): "n" may be a, t, c, g, other or unknown
taatagaatttaaaacatttcacaaaagtcaacacataaataatatcaaccaaaataaagtggtagacagaagagaaaatatactaatttattgttcaaagaggaaaataagtctcaaaggttaaggctattatataaatttatttttaaaaagacataaacctacattttcagaagaagaagttccatgtttccttagattatgtatttagcatccattaatcacagggccaaactaacaacaaaagttgtttagctttcccttacaatccagcttttatgggtgtgcaaacatcacattacagtccctccaaccacaaaccccaacatatagtatttcacttcctgcccaatagtgggtgtccccacacctttcaaccactgtagcaacaaagctctggcctaggcttttcacttgcttctttactgcctgactgactttggtgtttcctcatgtggcctggtgtggcatggcacgccctcttgggagatgaaagtaatcttccataggcaattgtttctgtgtcaccattgctgattaaaacaaatcctaagtacaaatgtcagaacagaaacatgcaaagcaagaaaacattacatcatgaaagtttctttttttttctttnttctttttttttttttttgagacagagttttgctctttttgctcaggctggagtacagtgggcgcgatcttggttcaccgnaaccttcgncttctgggttcaagcgtttctnctgcct

SEQ ID NO: 2433 - DNA, 852 bp, Homo sapiens
  misc_feature (814)..(814): "n" may be a, t, c, g, other or unknown
  misc_feature (836)..(836): "n" may be a, t, c, g, other or unknown
  misc_feature (849)..(849): "n" may be a, t, c, g, other or unknown
gtcgcgagaggttgttcgcgccttgagagttaagcgaagtgtggtggcttccaaggaatacaaacataaaggccttcgaccgttgcaaatagactaaagtgaaaacaaatctgaatgaagatgaagttatttcagaccatttgcaggcagctcaggagttcaaagttttctgtggaatcagctgcccttgtggctttctctacttcctcttactcatgtggccggaagaaaaaagtgaacccatatgaagaagtggaccaagaaaaatactctaatttagttcagtctgtcttgtcatccagaggcgtcgcccagaccccgggatcggtggaggaagatgctttgctctgtggacccgtgagcaagcataagctgccaaaccaaggtgaggacagacgagtgccacaaaactggtttcctatcttcaatccagagagaagtgataaaccaaatgcaagtgatccttcagttcctttgaaaatccccttgcaaaggaatgtgataccaagtgtgacccgagtccttcagcagaccatgacaaaacaacaggttttcttgttggagaggtggaaacagcggatgattctggaactgggagaagatggctttaaagaatacacttcaaacgtctttttacaagggaaacggttccacgaagccttggaaagcatactttcaccccaggaaaccttaaaagagagagatgaaaatctcctcaagtctggttacattgaagtgtccagcatattctgaaagatgtcagtggagtgccactcttgaaagtgctgtcaacatgaaaccttaactatatagnctgcttggactgtgtggctganatcaggcaagctntgg

SEQ ID NO: 2434 - DNA, 785 bp, Homo sapiens
  misc_feature (758)..(758): "n" may be a, t, c, g, other or unknown
  misc_feature (770)..(770): "n" may be a, t, c, g, other or unknown
  misc_feature (778)..(778): "n" may be a, t, c, g, other or unknown
tcttgtcaatgatggcggtcacagcaggtgccgacttctgctatgccatcgaggttttcaagcctatggctgatgctgctgtgaagattgtggagaaaaatggctttagtgataagattaaggttatcaacaagcattccaccgaggtgactgtaggtccagagggtgacatgccatgccgtgccaacatcctggtcacagagttgtttgacacagagctgatcggggagggggcgctgccctcctatgagcacgcacacaggcatctcgtggaggaaaattgtgaggccgtgccccacagagccaccgtctatgcacagctggtggagtccgggaggatgtggtcgtggaacaagctatttcccatccacgtgcagaccagcctcggagagcaggtcatcgtccctcccgttgacgtggagagctgccctggcgcaccctctgtctgtgacattcagctgaaccaggtgtcaccagccgactttacagtcctcagcgatgtgctgcccatgttcagcatagacttcagcaagcaagtcagtagctcagcagcctgccatagcaggcggtttgaacctctgacatctggccgagctcaggtggttctctcgtggtgggacattgaaatggaccctgaggggaagatcaagtgcaccatggcccccttctgggcacactcagacccagaggagatgcaatggcgggaccactggatgcaatgtgtgtacttcctggcacaagaagaacctgtggtgcanggctcaacgctntatctggnacccacc

SEQ ID NO: 2435 - DNA, 779 bp, Homo sapiens
  misc_feature (684)..(684): "n" may be a, t, c, g, other or unknown
  misc_feature (713)..(713): "n" may be a, t, c, g, other or unknown
  misc_feature (734)..(734): "n" may be a, t, c, g, other or unknown
agacacatcgaaaggaatcgcagatgtccccgagtggttcaaaggcagtcggctcaactatgcagaaaacctcctgcggcacaaagagaatgacagagttgccctttacattgcaagggaaggcaaagaggaaattgtgaaggtgacttttgaagagctgaggcaagaagtggctttgtttgcagcagcaatgaggaaaatgggtgtgaagaaaggagatcgggttgttggttatttacccaacagtgagcacgctgtcgaggcgatgctggctgcggcaagcattggtgccatctggagctccacgtccccggacttcggtgagaatggtgtgctggaccggttttctcaaattcagccaaagctcatcttctctgtggaggctgttgtctataatggcaaagagcacaaccacatggaaaagctgcagcaggtggttagaggcctaccagacttgaagaaagtggtggtgattccttatgtgtcctccagagagaacatagacctttcaaagattccaaacagtgtgtttctggatgactttcttgccaccggcaccagtgagcaggccccgcagctggagttcgagcagctgccttcagccacccactgttcatcatgttctcatcgggcaccacgggcgcacccaagtgcatggtgcattccgctgggggcaccctcatncacatctgaaggagcacctgctgcacggnaacatgaccagcagtgacatnctctgggctcaccacggccggctggatgatgtggaacttggatgg

SEQ ID NO: 2436 - DNA, 748 bp, Homo sapiens
  misc_feature (711)..(711): "n" may be a, t, c, g, other or unknown
  misc_feature (724)..(724): "n" may be a, t, c, g, other or unknown
  misc_feature (743)..(743): "n" may be a, t, c, g, other or unknown
attgaggaacatggcgttgctggtgcgagtccttacggagttttgctcttgttgcgcaagctggagtgcaatggcgtgatcttggctcactgcaacctctgcctcccgggttcaagcgattctcctgcctcagcctcctgagtagctgggattacagaggaaccagactagcatttctcagtgggttccagtatgcagccgattgatacctgtgtctcctacccaaggacagggggacagggctctgtctcgcacttcccagtggccccagatgagccagtcccaagcatgtggtggatcagaacagattcctggaatagacatacagctgaataggaagtatcacaccacacgtaagctttctactaccaaagattccccacagcctgttgaggagaaggttggtgctttcacaaagataatagaagccatgggattcacgggacctttgaaatacagtaaatggggtgtcagatgcctgatacattcaattcatggtttcttataaccctactccacgtctggatgtgtctagtccgaatgaagcaggaaggccggagtgggaagtacatgtgtcgtatcatagttcattttatgtgggaggatgttcagcagcgcggcagagtcatgggggttaatccctatatcctgaagaagaacatgatcctcatgacaaatcatttctatgcagcgatcttgggatatgatgangggatcctttcanatgatcatgggctggccgntgcct

SEQ ID NO: 2437 - DNA, 737 bp, Homo sapiens
  misc_feature (631)..(631): "n" may be a, t, c, g, other or unknown
  misc_feature (665)..(665): "n" may be a, t, c, g, other or unknown
  misc_feature (699)..(699): "n" may be a, t, c, g, other or unknown
  misc_feature (734)..(734): "n" may be a, t, c, g, other or unknown
acatgcgccctgacagcccaacaatggcggcgcccgcggagtcgctgaggaggcggaagactgggtactcggatccggagcctgagtcgccgcccgcgccggggcgtggccccgcaggctctccggcccatcttcacacgggcaccttctggctgacccggatcgtgctcctgaaggccctagccttcgtgtacttcgtggcattcctggtggctttccatcagaacaagcagctcatcggtgacagggggctgcttccctgcagagtgttcctgaaggacttccagcagtacttccaggacaggacaagctgggaagtcttcagctacatgcccaccatcctctggctgatggactggtcagacatgaactccaacctggacttgctggctcttctcggactgggcatctcgtctttcgtactgatcacgggttgcgccaacatgcttctcatggctgccctgtggggcctctacatgtccctggttaatgtgggccatgtctggtactctttcggatgggagtcccagcttctggagacgggattcctggggatcttcctgtgccctctgtggacgctgtcaaggctgcccagcatacccccacattccggattgtcctgtggggcttncggtggctgatcttcaggatcatgcttggagcangcctgatcaagatccggggggaccggtgctggcnaaaccttacctggattggactttcactatgaaaancca

SEQ ID NO: 2438 - DNA, 808 bp, Homo sapiens
  misc_feature (759)..(759): "n" may be a, t, c, g, other or unknown
  misc_feature (783)..(783): "n" may be a, t, c, g, other or unknown
  misc_feature (798)..(798): "n" may be a, t, c, g, other or unknown
ttgttgtttgttgaagcatttcctattagggatccaaaccttcatgctattggaatggatagtgaaatccagaaacagtttgaagagctctatagccttttagaagatccttacccgatggtccgttccacagggatccttggtgtttgtaaaataacttctaagtactgggaaatgatgcccccgaccattcttattgacctcctgaagaaggtgactggggaactggcatttgacacgagctcagctgatgttcgttgttctgtctttaagtgtctgccaatgattttggacaacaaactgagccacccattgttagagcagctccttccagctctcagatacagtctccacgacaattcggagaaagtgagggtagcttttgtggacatgctgttgaagatcaaagctgtgagggctgctaagttttggaaaatatgtcccatggagcacattctggttcgtctggaaactgattctcgacctgtgtctcggcgcctggtgagcctcatctttaattctttcctgcctgtgaatcagccggaggaggtctggtgcgagcgctgtgtcaccctggtgcagatgaaccacgccgctgccaggaggttctatcagtacgcccacgaacacaccggctgcaccaacatagcaaagctgattcacgttattcgtcattgcttaaatgcctgtatccagagggcagtgagagaccttcagaggaccaggaggaagaagaccgaaagggagaaggagaatggngactggtcttggacaaaacactgncagtaaacgatgttncatgccttgg

SEQ ID NO: 2439 - DNA, 705 bp, Homo sapiens
  misc_feature (628)..(628): "n" may be a, t, c, g, other or unknown
  misc_feature (653)..(653): "n" may be a, t, c, g, other or unknown
  misc_feature (666)..(666): "n" may be a, t, c, g, other or unknown
ttgttatgtctgccagatggtcagtattctgacagtgtgggacaaaggaaaaacggcagcctgggcaaccccgcctctataagaactaaaaaattagccaggcatggcggtgcatgcccctgtagtcctagcttctcaggaggctgaggcaggaggctctcttgagcccgggaggacaaggctgcagtgagccatgaccatgccactgcactcagcctgggcaacagagtgagaccctgtctcaagaaagaaaaacgagaaagggagagtccctccactgtaaggagatcgggttcattacattttggggtgttggagaaaaatactgagtcagcacctgtgtgggattggtgggagcagatttggtgttttccaccccttcacaggattctgaggtaactcatttctgttggccttggccttgtatggggaggatttccctccagccttgtatggggaggatttcccttgtatggggaggattttccctccagcttgtgggaaaggaatcaaggaccagagacaggcaggggagaagatcactgagggatttacggcagcagcctctgcacggcttcccacgaccttcccagctgcttgctggacgctgctggagaaacagcacatnccaagatcatcatggccccagcatnctcttgaacttantaacagttggcctgacagatgaaccggatatcatccctg

SEQ ID NO: 2440 - DNA, 728 bp, Homo sapiens
  misc_feature (635)..(635): "n" may be a, t, c, g, other or unknown
  misc_feature (651)..(651): "n" may be a, t, c, g, other or unknown
  misc_feature (671)..(671): "n" may be a, t, c, g, other or unknown
tcaaaataaaattcctgaatttgtacaagccacaggaagctagattgagatcattatatgacaactggaaggccaaggctatgggttacctcaaattgaggaattttggcacctactcacaggctccatgagcagatgaagtagacagctttactcagtatctcagaccaagaacttcatctccatctccaactagctgaaacatcttccctcctcaacctggaaaattctctgacttagaaatttaaacaaaaccctcccctttcattgaatctccattgtctggagtttgcttgttttaatctagcctgttcctccactatgggctccctttcaaactatgccctgcttcaactaacccttactgcttttttgacaattctagtacaacctcagcacctgcttgctccagttttccggacactatctatcttgactaatcagtctaattgctggttatgtgaacatctagataatgcagaacaacccgaactagtttttgttcctgccagtgcaagcacctggtggacctattctggacaatggatgtatgaaagggtgtggtatccacaagcagaagtacagaatcactctacttcctcctatcgtaaagtgacttggcactgggaagcctncatggaagctcaaggnctatcctttgctcaagtaanggtattggagggaaatttttctctttgcgtagaaaataaaaatggcagtggaccctt

SEQ ID NO: 2441 - DNA, 772 bp, Homo sapiens
  misc_feature (694)..(694): "n" may be a, t, c, g, other or unknown
  misc_feature (723)..(723): "n" may be a, t, c, g, other or unknown
  misc_feature (743)..(743): "n" may be a, t, c, g, other or unknown
gctagcgaataaccttaaacaggagggtcataatcttgggctgctccatggggatatggatcagagtgagagaaacaaggtcatttcagactttaagaaaaaggacatcccagtcctggtggccacagatgttgcagcccgtggtctggacattccttcaattaagactgtcattaactatgatgtggcacgagacattgatacccacacgcataggattggccgcacaggaagagcgggtgagaaaggtgtggcctataccctactcactcccaaggacagcaattttgctggtgacctggtccggaacttggaaggagccaatcaacacgtttctaaggaactcctagatctggcaatgcagaatgcctggtttcggaaatctcgattcaaaggagggaaaggaaaaaagctgaacattggtggaggaggcctaggctacagggagcggcctggcctgggctctgagaacatggatcgaggaaataacaatgtaatgagcaattatgaggcctacaagccttccacaggagctatgggagatcgactaacggcaatgaaagcagctttccagtcacagtacaagagtcactttgttgcagccagtttaagtaatcagaagctggaagttctgctgctggggcaaagtgggtggactagtgcagggagcttgaattctggtccaactactcancacaacagggccataacagtcctgacagncccgtcaccaatgccgccanggcatccaagctttggcaatctggcacat

SEQ ID NO: 2442 - DNA, 730 bp, Homo sapiens
  misc_feature (695)..(695): "n" may be a, t, c, g, other or unknown
  misc_feature (701)..(701): "n" may be a, t, c, g, other or unknown
  misc_feature (704)..(704): "n" may be a, t, c, g, other or unknown
ggcagagacgagaagagaggaggggaggcctcctccgccgccgccatcttggaccgggcccggtcagcttccgcggagccatcggcagacgccgcggcctcccttgagccccgacccccgtcgtcagaacaaccccgggcccactcccccaaccccacttccgcttcgcgccgctatcgcgatagcgcccgggcccggggcgcgagaaaaaggcggcgggcgctcgcctcccccgcctgtcgcgatacgctcctcagcggcggcgccagctcctgtgcgtccgtctccaagagagtatgaagagagtgcgtctgtagggcagggaagatggcggacaagcgcaaactccaaggtgagattgatcgctgcctcaagaaggtgtctgagggcgtggagcagtttgaagatatttggcagaagctccacaatgcagccaacgcgaaccagaaagaaaagtatgaggctgacctaaagaaggagattaagaagctacaacggctgagggaccaaatcaagacatgggtagcgtccaacgagatcaaggacaagaggcagcttatagacaaccgcaagctcattgagacgcaaatggaacggttcaaagttgtggaacgagagaccaaaaccaaagcttacagcaaaagagggcctgggcctgcccagaaggtagatcctgccagaaggagaaggaagangttggncantggctcacgaataccattgacacgct

SEQ ID NO: 2443 - DNA, 727 bp, Homo sapiens
  misc_feature (646)..(646): "n" may be a, t, c, g, other or unknown
  misc_feature (652)..(652): "n" may be a, t, c, g, other or unknown
  misc_feature (696)..(696): "n" may be a, t, c, g, other or unknown
tggtgatttgcatctcgtgacccgtattgtggctggttaagccagggatcctgtggtagagtgaccccagggatgcttgctgaaggatatgaacaagacacagaattcggcaacacagctcatctaggggactgccatggtgtacgatgggaagtccagtctggagagtccaaccagatggtccacatgaatgtcctcatcacctgtgtctttgctgcttttgttttgggggcattcattgcaggtgtggcagtatactgctatcgagacatgtttgttcggaaaaacagaaagatccataaagatgcagagtccgcccagtcatgcacagactccagtggaagttttgccaaactgaatggtctctttgacagccctgtcaaggaataccaacagaatattgattctcctaaactgtatagtaacctgctaaccagtcggaaagagctaccacccaatggagatactaaatccatggtaatggaccatcgagggcaacctccagagttggctgctcttcccactcctgagtctacacccgtgcttcaccagaagaccctgcaggccatgaagagccactcagaaaaggcccatggccatggagcttcaaggaaagaaacccctcaattttttccgtctagtccgncacctnattccccattaagtcatgggcatatcccagtgccattggtcttncaaatgctacccatgactacaacacgtcttt

SEQ ID NO: 2444 - DNA, 828 bp, Homo sapiens
  misc_feature (493)..(493): "n" may be a, t, c, g, other or unknown
  misc_feature (731)..(731): "n" may be a, t, c, g, other or unknown
  misc_feature (744)..(744): "n" may be a, t, c, g, other or unknown
  misc_feature (789)..(789): "n" may be a, t, c, g, other or unknown
cagtacacaaatgcatgagtatgtttatacagtgttagactgatgtgaatttgcatttgttacattacattgccagcgcatatcatttagcaagttggcattaacatttatgctttaattaaatgcctgtatacctatgtgtgcagcagtaaaaaattagtgagaaaaagcaactttttgtcactcttaggaaatattttgtcttattagtgttcttggcacatgtatattactaaagtagataattccaatgagaaatactaccagattattgttataaaattaatttacaatgtccctgatattgagctaactcttaaaaaaaccaaacaaaactcgtatctgagtgtaactttgccaatattttaaaagccaaaatattctctggacaacaaatttgtattgctcagggacagtttaccttgcctggtaaaccttcccaaacagaaatatagctatactatctttggttttgtttttttgttttttttgnttgtttgtattagatggaatttcactcttgtcgcccaggctggagtgtagtggcgcagtctcagctcactgcaacctccacctcccgggttcaagtgattctcctgtctcagctccctgagtaactggaattacaggtgcacgccaccacgcccggctaatttttgtgtttttagcagagacagggtttcaccacgttggccagggtggtcttggactcctgacctcaggtcatcctnctgcctcggcctnccaaagtgctgagactacaggtgtgagccccggctcagccactanctttgggtttttaaacatggatatattcctcaagatgaa

SEQ ID NO: 2445 - DNA, 373 bp, Homo sapiens
  misc_feature (360)..(360): "n" may be a, t, c, g, other or unknown
  misc_feature (366)..(366): "n" may be a, t, c, g, other or unknown
  misc_feature (371)..(371): "n" may be a, t, c, g, other or unknown
cctttttctctaaggcaggaaaggaaagacattaaaccattaattaagtcaatcctcttggagactcaaaagactatgaagtgatcactctatataaaatataaatacagtgtgggttcaaatggccattttttgtgtgtccctctctctcatcttatgcttcccttcctttttttatttttattttttggagacggagtcttgctgtgtcgcccaggttggagtgcagtggcgtgatcttagctcactgcaagctctgccttccaggttcacgccattcttctgcctcagccccctgagtagctgggactacaggcgcccgccaccacgcccggctaatttttttttttttttttgganttttangaaangc

SEQ ID NO: 2446 - DNA, 869 bp, Homo sapiens
  misc_feature (724)..(724): "n" may be a, t, c, g, other or unknown
  misc_feature (852)..(852): "n" may be a, t, c, g, other or unknown
  misc_feature (855)..(855): "n" may be a, t, c, g, other or unknown
  misc_feature (858)..(858): "n" may be a, t, c, g, other or unknown
ctcttctcttgtctctgacggcttgtagttatggggcaggagccgcggacgctgccgccctcccccaactggtactgcgcccgctgcagcgatgccgtgcccgggggcctctttggcttcgccgcgcggacctccgtcttccttgtccgcgtgggcccgggcgcaggcgagagtccagggacacccccgtttcgagtcataggagagttggtgggacacaccgaaagggtctctggcttcacattttctcatcaccctggtcagtacaacctctgtgccaccagctccgacgatgggactgtgaaaatatgggatgtagagacaaaaacagttgtgacagaacatgcactccatcagcatacgatatcaacactacattggtctcctcgagtaaaggacttaatagtatctggggatgaaaaaggagtagttttctgttactggtttaacagaaatgacagccagcacctctttatagaacccaggacaattttctgtcttacttgttcacctcatcatgaagatttagtagccattggctacaaggatggcatagtggtgataattgacatcagtaagaaaggagaggttattcataggcttcgaggccatgatgatgaaatccactccatagcctggtgtcccctgcctggtgaagattggttatctataaaccaagaggaaacttcagaagaagctgaaattaccaacgggaatgctgtancacaagcttcagtaacaaaaaggttgctacttaaccactggaagcaaagatcaaaccattcgaatcttggagctggtctaaaaggcccaggggtggatgaattttggaaattggcccttttttgaaanaanaanaaggagggggt

SEQ ID NO: 2447 - DNA, 774 bp, Homo sapiens
  misc_feature (589)..(589): "n" may be a, t, c, g, other or unknown
  misc_feature (662)..(662): "n" may be a, t, c, g, other or unknown
  misc_feature (723)..(723): "n" may be a, t, c, g, other or unknown
  misc_feature (725)..(725): "n" may be a, t, c, g, other or unknown
  misc_feature (769)..(769): "n" may be a, t, c, g, other or unknown
aagggttggctgcgcgtgcggcgggagtagaggcgccttgcgcaccaggaagtgactgtttccccaccgcagcaaaccaggccatccgctggccttttagtttgccgcctcaggtttgtaagaggatttattggttacgaaggaaggtggatttcagtgtgttctttggatggcaggccttaagagaagagtcccactgcacagcctcagatacttcatctccatggtgggtctcttctccaaaccaggactgcttccctggtatgccagaaatccaccaggatggtcacagctctttctgggcacagtatgtaagggagatttcacccgtgtgatagccacgaaatgtcagaaaggacaaaaaagtcagaagaaaccaagccatcttggaccactagatggttcctggcaggaaaggctggctgatgttgtgacaccactctggaggttgagctatgaagaacagctcaaggtgaaatttgcagctcagaagaaaattttacaaagactagagtcttacatccaaatgctcaatggagtcagtgtgacaacggctgtacccaaatctgagaggctctcttgtcttctncatcctattataccctctcctgtcatcaatggttaccgaaataagtccaccttctctgtgaaccgaggtccanatggcaatccaaagactgtggggttctacctgggaacttggagagatgggaaccttgctgngngcagtctaatcatctgaaaaacatccttgagaaacacagtcaantgggc

SEQ ID NO: 2448 - DNA, 696 bp, Homo sapiens
  misc_feature (667)..(667): "n" may be a, t, c, g, other or unknown
  misc_feature (683)..(683): "n" may be a, t, c, g, other or unknown
  misc_feature (686)..(686): "n" may be a, t, c, g, other or unknown
ctattttggtgacagaagaagaacttagtagatgcattgaggatgtgtttaaggtgtacgtggttgggaatgaacctttaacagttttgatggattccctgcttccagtcctgggagtgctttttcttctctactgttttactaagcagagtgtgtctcacataaggtcactttgccaagaaatcttattatggattctggggaagctggaaaggaagaaggcaattgccagcctgaaaggatttgcagggttggacaaagctgtgccctctctccattctctgtgtcagtttagagttgccactcaaggtggcattatgattaccatcaaagaggccattagtgatgaagatgaagatgaagccctgtaccagaaggtatcctctgagcagggccgggtggagcatctcggggacttgctgtcccactgccaggaatgcggtttggcaggagacttcttcatcttctgtttgaaagagttgactcatgtggcctcggaaaatgaaacagagttaaaaactgagcccttctccagcaagagcctcttggaattagagcaacatcagactcttcttgtggaaggccaagagcggaagctgcttgtcctgcagctgatggctgtctgtgcgagagaatgtctgagcagatattcacaaacgtcactcangtggtggactttgtancancaacattgca

SEQ ID NO: 2449 - DNA, 675 bp, Homo sapiens
  misc_feature (607)..(607): "n" may be a, t, c, g, other or unknown
  misc_feature (633)..(633): "n" may be a, t, c, g, other or unknown
  misc_feature (651)..(651): "n" may be a, t, c, g, other or unknown
catcaagaccatcagggcgatatctttggcggcctggtcctcctgaaggtgaaggcaaaggtgcgacagtgcctgcaggagcggcggacagtgcccattttgtttgcctctaccgttcggcgccaccccgacaagacggccctgatcttcgagggcacagatacccactggaccttccgccagctggatgagtactcaagcagtgtagccaacttcctgcaggcccggggcctggcctcgggcgatgtggctgccatcttcatggagaaccgcaatgagttcgtgggcctatggctgggcatggccaagctcggtgtggaggcagccctcatcaacaccaacctgcggcgggatgctctgctccactgcctcaccacctcgcgcgcacgggcccttgtctttggcagcgaaatggcctcagccatctgtgaggtccatgccagcctggacccctcgctcagcctcttctgctctggctcctgggagcccggtgcggtgcctccaagcacagaacacctggaccctctgctgaaagatgctcccaagcaccttcccagttgccctgacaagggcttcacagataaactgttctacatctacacattcngcaccacagggcttgccaaaggccgncatcgtggtgcacagcangtattaccgcatggcttgccctgg

SEQ ID NO: 2450 - DNA, 899 bp, Homo sapiens
  misc_feature (716)..(716): "n" may be a, t, c, g, other or unknown
  misc_feature (799)..(799): "n" may be a, t, c, g, other or unknown
  misc_feature (897)..(897): "n" may be a, t, c, g, other or unknown
tacttggatatgaaaaatactcgtacggcctctgaaccatcagctcaactaagctatgccagcactggacgagagtttgcagccttttttgccaagaagaaacctcaaaggccaaaaaattctcttttcaagttcgaatcgtcctcccatgccatcagtatgagcgcctatctgcgagaacagagaagggagctctatagtcggagtggagaactgcaagggggtcctgatgacaacttaattgaaggtggaggaacaaaatttgtctgcaaacctggagccagaaacattaccgtcatattccacccattactaagatttattcaggagattgagcatgctctgggtcttggcccagccaaacagtgtcctcttcgagagtttctcaccgtgtacatcaaaaacatctttctcaatcaagtcttggctgagatcaacaaggagattgaaggagtcactaaaacatctgaccctttgaagattctggccaacgcagacaccatgaaggtgctgggagtgcagcggcctctcctacagagcacaatcattgtggagaagacagttcaagacctcctgaacctgatgcatgacttgagtgcatattcagatcaattcctcaacatggtgtgcgtgaagctccaggagtacaaggacacctgcactgcagcttacaggggtattgtccagtcagaagaaaaacttggcatcagtgcatnctgggcaaaagatgatgatatcagcagactcttgaaatctctaccaaactggatgaatatggctcaacccaacagcttgaggnccaaaagagaggaggaagaagattcataagggcagcttttggcaaggagtctgaagtcttattgggaacctgggggataaattaatccctcccaaganat

SEQ ID NO: 2451 - DNA, 889 bp, Homo sapiens
  misc_feature (732)..(732): "n" may be a, t, c, g, other or unknown
  misc_feature (736)..(736): "n" may be a, t, c, g, other or unknown
  misc_feature (806)..(806): "n" may be a, t, c, g, other or unknown
  misc_feature (875)..(875): "n" may be a, t, c, g, other or unknown
aacacgataaaggggacatgccgggagttgcagtaccctcaggaaggtagcgtcttgatctgcgtggcgtggttctgtgccttgggaagagatgaatgggaagcggccagcggagcccggcccagcccgggtgggaaaaaagggaaagaaggaggtgatggcggagttttcggacgctgttacggaagaaaccttgaaaaagcaggtggctgaggcctggagccgcaggacgccgttcagtcacgaagtcattgtcatggacatggacccttttcttcactgtgtgatcccaaacttcatccaaagccaagacttcttagaagggcttcagaaggaactgatgaacttggacttccatgagaagtataatgatttatataagttccagcagtctgatgatttgaagaagagaagagagcctcacgtctccactttaaggaaaattctgtttgaagatttccggtcctggctttctgatatttctaaaattgacctggaatcaaccattgacatgtcctgtgctaaatatgaattcactgatgccctgctgtgccatgatgatgagctggaagggcgccggattgccttcatcctgtacctggttccttcctgggacaggagcatgggtggtaccctggacctgtacagcatagatgaacactttcagcccgaagcagattgtcaagtctcttatcccttcgtggaacaaactggttttctttgaagtatctnctgngtcctttcaccaggtgtctgaagtgctgctgaagaaaagtcacgtttgctataagtggctggttcatggnccattattgcttcggcttcccactcttttgaacccccatccttggagccttacatccacaagatcatanatttggatgatgga

SEQ ID NO: 2452 - DNA, 740 bp, Homo sapiens
  misc_feature (645)..(645): "n" may be a, t, c, g, other or unknown
  misc_feature (685)..(685): "n" may be a, t, c, g, other or unknown
  misc_feature (720)..(720): "n" may be a, t, c, g, other or unknown
ctgaccgccggggggtgcccccgggacgtagcgccgcggagaggaagcggcaaaggggaccatgcggcgcctgactcgtcggctggttctgccagtcttcggggtgctctggatcacggtgctgctgttcttctgggtaaccaagaggaagttggaggtgccgacgggacctgaagtgcagacccctaaggtttggtccttgtttttcaaggtggctgggatgagcccttgggcgcctcaggtgcctgtatcacccactcctccctaccaaagagggcatcttcctacaggaggacaccttgctgtatgtcatttcccatgtctcttgcaagaagctcagttccatttgcagactcaggtctttcttcaagtcagatgcacactgctggtgtattgcacggaccttccacccactagcatcatcatcaccttccacaacgaggcccgctccacgctgctcaggaccatccgcagtgtattaaaccgcacccctacgcatctgatccgggaaatcatattagtggatgacttcagcaatgaccctgatgactgtaaacagctcatcaaattgcccaaggtgaaatgcttgcgcaataatgaacggcaaggtctggtccggtcccggattcggggcgctgacatcgnccagggcaccactctgactttcctcgacagccactgtgangtgaacagggactggctccagcctctgttgcacanggtcaaagaggactacacgc

SEQ ID NO: 2453 - DNA, 819 bp, Homo sapiens
  misc_feature (733)..(733): "n" may be a, t, c, g, other or unknown
  misc_feature (798)..(798): "n" may be a, t, c, g, other or unknown
  misc_feature (803)..(803): "n" may be a, t, c, g, other or unknown
ttttagaatggcacatcatatctcattgatgccaacatggttttgtccatggttctgactttctgtgaaggcaccagcttgcaatatgccatcccatttcaccttgcatgtgagacagcaaacaaaatccacaaatggtgtgaactaatatgctggctgctaccttgcataaattaatgatttgatcacacgggttcttcgtggggttacatctgtgaatagcctgttttccacatgtaaatttgtgccttacaccttgagttgtgtacacttgtaaactctttatgatcaactgttcccccttttgaaataagtgcagatatttatttaaccctcccttccccaccctctgccccacttccagccctctgaaagattggagtcaagcagatggaagaatgcagtggtgatagttgtcatgcgacagcctgagaacgctgggcagcaccacaccctccaattcacactgccttctagttgtgccaactggaaccaccctttggctgtgctgcgaagcatggaccccagtgttgttgtgggtgtgtcaaatcccctttcatcctcaagagctccctgcttcccttagattatttcaatacggtgatatccttatttgctagcagaaaagggactaacgtcccattcctcttttctgctgcgtccactggctagagagcaagcggtgcgcggttgggcagacacctgggaggagtcttcaagccatgtgcacagnacacacgtgcagtgcacacaaagaaatgacatggaaatagatgcaggcaggctggtccctgctgngattnacgagtaacttcaagt

SEQ ID NO: 2454 - DNA, 795 bp, Homo sapiens
  misc_feature (437)..(437): "n" may be a, t, c, g, other or unknown
  misc_feature (622)..(622): "n" may be a, t, c, g, other or unknown
  misc_feature (651)..(651): "n" may be a, t, c, g, other or unknown
  misc_feature (761)..(761): "n" may be a, t, c, g, other or unknown
  misc_feature (786)..(786): "n" may be a, t, c, g, other or unknown
  misc_feature (791)..(791): "n" may be a, t, c, g, other or unknown
tcttacctatcaaaaagaaacatttgtttgagaattccaggcttctgcagcctccaaaaggtgttcttctctatgggcctccaggctgtggtaaaacgttgattgccaaggccacagccaaagaagcaggctgtcgatttattaaccttcagccttcgacactgaccgataagtggtatggagaatctcagaaattggctgctgctgtcttctcccttgccataaagctacaaccatccatcatctttatagatgaaatagactcctttctacgaaaccgttcaagttctgaccatgaagctacagccatgatgaaagctcagtttatgagtctctgggatggattggatactgatcacagctgccaggtcatagtaatgggagctaccaatcgtcctcaggaccttgactcggctataatgagaagaatgcctacnagatttcatatcaaccagcctgctttaaaacagagagaagcaatcctgaaactcatcttgaaaaatgaaaatgtggataggcatgtagacctgctagaagttgcccaggaaactgatgggttttcaggaagtgacctaaaagagatgtgtcgagatgctgcccttctctgtgttagagaatatgntaattctacatcagaagaaagccatgacnaagatgaaattcggcctggtcaacagcaggacctgcatcgggcaattgaaaagatgaagaaatcaaagggtgcagcatttcagaatggtttaacccatggtttgggttanaattaagagtaaagaacattttgtncaggntcaa

SEQ ID NO: 2455 - DNA, 794 bp, Homo sapiens
  misc_feature (610)..(610): "n" may be a, t, c, g, other or unknown
  misc_feature (704)..(704): "n" may be a, t, c, g, other or unknown
  misc_feature (729)..(729): "n" may be a, t, c, g, other or unknown
  misc_feature (790)..(790): "n" may be a, t, c, g, other or unknown
aagttaaaacagctgagcttctgaatgcctgcaagaagctgccctttgaaattaagaacttcgtgaagaaaacagaggctcttcggttgcagtatcgctacttagacttgcgtagtttccaaatgcagtataacctgcgactgaggtcccagatggtcatgaaaatgcgggaatatctctgtaatctgcatgggtttgtggatatagaaacccccacattgtttaagaggaccccagggggtgccaaagagtttttagtaccatccagggaacctggaaagttttattctctccctcagagtcctcaacagtttaagcaacttctgatggttggcggtttagacagatattttcaggttgcccgatgttatcgagatgaaggttcaagaccagacagacagcctgagtttactcagattgacatagagatgtcatttgtagaccagactgggatccagagtttaattgagggtttgctccagtattcctggcccaatgacaaagatcctgtggttgttccttttcctactatgacttttgctgaggtgctggccacctatggaactgataaacctgacactcgctttggaatgaagattatagatatcantgatgtgtttagaaacacagagattggatttcttcaagatgcacttagtaagccccatggaactgtgaaagccatatgtatccctgaaggaccnaatacttaaaaaggaaagacattgnatccattaaaacttttgcagctgccattttaatcaggaaatcttacctggattccttacgnccat

SEQ ID NO: 2456 - DNA, 739 bp, Homo sapiens
  misc_feature (416)..(416): "n" may be a, t, c, g, other or unknown
  misc_feature (532)..(532): "n" may be a, t, c, g, other or unknown
  misc_feature (602)..(602): "n" may be a, t, c, g, other or unknown
  misc_feature (612)..(612): "n" may be a, t, c, g, other or unknown
  misc_feature (619)..(619): "n" may be a, t, c, g, other or unknown
  misc_feature (679)..(679): "n" may be a, t, c, g, other or unknown
  misc_feature (689)..(689): "n" may be a, t, c, g, other or unknown
  misc_feature (721)..(721): "n" may be a, t, c, g, other or unknown
  misc_feature (727)..(727): "n" may be a, t, c, g, other or unknown
  misc_feature (734)..(734): "n" may be a, t, c, g, other or unknown
agcagaatagccaggcaggacagagaaactccaccagcagtattgagcccaggcttctgtgggagagagtggagaagctggtgcccagacctggcagtggcagctcctcagggtccagcaactcaggatcccagcccgggtctcaccctgggtctcagagtggctccggggaacgcttcagagtgagatcatcatccaagtctgaaggctctccatctcagcgcctggaaaatgcagtgaaaaaacctgaagataaaaaggaagttttcagacccctcaagcctgctgatctgaccgcactggccaaagagcttcgagcagtggaagatgtacggccacctcacaaagtaacggactactcctcatccagtgaggagtcggggacgacggatgaggaggacgacgatgtggagcangaaggggctgacgagtccacctcaggaccagaggacaccagaagcagcgtcatctctgaatttgagcaatggtgaaacggaatctgtgaaaaccatgattgtccatgatgatgtanaaagtgagccggccatgaccccatccaaggaaggcactctaatcgtccgccagactcagtccgctagtancacactccanaaacacnaatcttcctcctcctttacccttttatagaacccagattactaccgatttctccatctancggaacaacngttgactctgtggtggggattttcctgtgatngggatnaaacccnaaacc

SEQ ID NO: 2457 - DNA, 748 bp, Homo sapiens
  misc_feature (79)..(79): "n" may be a, t, c, g, other or unknown
  misc_feature (98)..(98): "n" may be a, t, c, g, other or unknown
  misc_feature (112)..(112): "n" may be a, t, c, g, other or unknown
  misc_feature (167)..(167): "n" may be a, t, c, g, other or unknown
  misc_feature (443)..(443): "n" may be a, t, c, g, other or unknown
  misc_feature (458)..(458): "n" may be a, t, c, g, other or unknown
  misc_feature (462)..(462): "n" may be a, t, c, g, other or unknown
  misc_feature (550)..(550): "n" may be a, t, c, g, other or unknown
  misc_feature (590)..(590): "n" may be a, t, c, g, other or unknown
  misc_feature (603)..(603): "n" may be a, t, c, g, other or unknown
  misc_feature (656)..(656): "n" may be a, t, c, g, other or unknown
  misc_feature (682)..(682): "n" may be a, t, c, g, other or unknown
  misc_feature (698)..(698): "n" may be a, t, c, g, other or unknown
  misc_feature (705)..(705): "n" may be a, t, c, g, other or unknown
  misc_feature (742)..(742): "n" may be a, t, c, g, other or unknown
ggaagataatgtttgcttgcccagcaatggcaaattatatacaaaggtaatcaactgggtgcagcgtagcatctggganaatggagacagtctggaanagctgatggaagangttcaaaccttgtactactcagctgatcacaagctgcttgatgggaacctactanatggacaggctgaggtgtttggcagtgatgatgaccacattcagtttgtgcagaaaaagccaccacgtgagaatggccataagcagataagtagcagttcaactggatgtctctcttctccaaatgctacagtacaaagccctaagcatgagtggaaaatcgttgcttcagaaaagacttcaaataacacttacttgtgcctggctgtgctggatggtatattctgtgtcatttttcttcatgggagaaacagcccacagagctcaccaacaagtnctccaaaactaagtnagantttaagctttgagatgcaacaagatgagctaatcgaaaagcccatgtctcctatgcagtacgcacgatctggtctgggaacagcaganatgaatggcaaactcatagctgcaggtggctataacaganaagaatgtcttcnaacagtccaatgctataatccacatacagatcactggtcctttcttgctcccntgaaaaacaccaagaacccgatttcnaatggctgttctcatngggccanctctatgtggtaggtggatcaaatgggccctccaatnacctga

SEQ ID NO: 2458 - DNA, 875 bp, Homo sapiens
  misc_feature (799)..(799): "n" may be a, t, c, g, other or unknown
  misc_feature (817)..(817): "n" may be a, t, c, g, other or unknown
  misc_feature (836)..(836): "n" may be a, t, c, g, other or unknown
  misc_feature (841)..(841): "n" may be a, t, c, g, other or unknown
  misc_feature (863)..(863): "n" may be a, t, c, g, other or unknown
agtcacctcttctcaaccctttacctgggcagatcatttgaaagcacaggaagaagctcaaggtcttgtccagcattgtagggcaacagaagttactttgcctaaaagtatacagagccttatctattggctccaccctgctttgtcttggctaccactgttccctcgtattggagctgatagaaaaatggctggaaagacaagtccttggtcaaatgatgcaaccctgcagcatgttttaatgagtgactggtctgtgagctttacttctctatataatttgctgaagacaaaactttgcccctatttctacgtttgtacctatcagtttactgtcctgttccgagcagcaggattagctggaagtgacttaatcacagctctcatatctccaacaactcgaggtttaagagaagctatgagaaatgaaggtattgaattttctctgcctttaataaaagaaagtggccataagaaggagacagcatctggaacaagcttgggatatggggaggagcaagccatcagtgatgaggatgaagaagaaagtttttcctggctggaagagatgggtgtgcaagataaaattaaaaagccagacatactttctatcaagctgcgtaaagagaaacatgaagtacaaatggatcacagacctgaatctgttgttgttggtaaaaagaatcaacacctttacattgctcaattttttgattaactctaagaatttaattgctacctcaggtccacaggcaggactcctccaacctcttgtccctgttgctttccgaaggtgccncaatgccaattgcttaanggcccgaatttttaatttnaaaanccaaactcctttctggaatacnaaaaccatttta

SEQ ID NO: 2459 - DNA, 667 bp, Homo sapiens
  misc_feature (538)..(538): "n" may be a, t, c, g, other or unknown
  misc_feature (593)..(593): "n" may be a, t, c, g, other or unknown
  misc_feature (595)..(595): "n" may be a, t, c, g, other or unknown
  misc_feature (610)..(610): "n" may be a, t, c, g, other or unknown
  misc_feature (639)..(639): "n" may be a, t, c, g, other or unknown
  misc_feature (648)..(648): "n" may be a, t, c, g, other or unknown
gagacctgaggctctggcctgcagctcgcgccgccatggacgctgccgaggtcgaattcctcgccgagaaggagctggttaccattatccccaacttcagtctggacaagatctacctcatcgggggggacctggggccttttaaccctggtttacccgtggaagtgcccctgtggctggcgattaacctgaaacaaagacagaaatgtcgcctgctccctccagagtggatggatgtagaaaagttggagaagatgagggatcatgaacgaaaggaagaaacttttaccccaatgcccagcccttactacatggaacttacgaagctcctgttaaatcatgcttcagacaacatcccgaaggcagacgaaatccggaccctggtcaaggatatgtgggacactcgtatagccaaactccgagtgtctgctgacagctttgtgagacagcaggaggcacatgccaagctggataacttgaccttgatggagatcaacaccagcgggactttcctcacacaagcgctcaaccacatgtncaaactccgcacgaacctccagcctctggagagtactcagtctcaggacttctananaaaggcctggtgcangcggcttgctgggggatgtgagcgctcangacgtgatnaagtactcgtggttctgga

SEQ ID NO: 2460 - DNA, 949 bp, Homo sapiens
  misc_feature (553)..(553): "n" may be a, t, c, g, other or unknown
  misc_feature (630)..(630): "n" may be a, t, c, g, other or unknown
  misc_feature (638)..(638): "n" may be a, t, c, g, other or unknown
  misc_feature (641)..(641): "n" may be a, t, c, g, other or unknown
  misc_feature (695)..(695): "n" may be a, t, c, g, other or unknown
  misc_feature (704)..(704): "n" may be a, t, c, g, other or unknown
  misc_feature (770)..(770): "n" may be a, t, c, g, other or unknown
  misc_feature (809)..(809): "n" may be a, t, c, g, other or unknown
  misc_feature (840)..(840): "n" may be a, t, c, g, other or unknown
  misc_feature (899)..(899): "n" may be a, t, c, g, other or unknown
  misc_feature (917)..(917): "n" may be a, t, c, g, other or unknown
  misc_feature (921)..(921): "n" may be a, t, c, g, other or unknown
  misc_feature (937)..(937): "n" may be a, t, c, g, other or unknown
  misc_feature (942)..(942): "n" may be a, t, c, g, other or unknown
tctctacccgggaatgtctcggcgaaagcagcggaaaccccaacagttaatctcggactgcgaaggtcccagcgcgtctgagaacggtgatgctagcgaggaggatcacccccaagtctgtgccaagtgctgcgcacaattcactgacccaactgaattcctcgcccaccagaacgcatgttctactgaccctcctgtaatggtgataattgggggccaggagaaccccaacaactcttcggcctcctctgaaccccggcctgagggtcacaataatcctcaggtcatggacacagagcatagcaaccccccagattctgggtcctccgtgcccacggatcccacctggggcccagagaggagaggagaggagtcttcagggcatttcctggtcgctgccacagaaccagtatgtggcattcctgtcaaatggcctgcccatgaagccctggaattccagctccacctccactaccactccaagcctggccccaccagtgctgtttggcctaggaactgtggctgggaaggtgcctccaacaatgggatccanggaagccaaggagaagacagcccccctcctatttcagcctcctgcacccaaggcagtgcctgagaagcccatcatanacaagaantancaaactgtacattccttcttcctccccctgctccagaaggtgccggtactgaanatgctccantaattggtgaaccaaccctaaggaattagggaaaaatgaaggaagggcataggaaaattttcccanttaatcccctgatggtcccattaaggtaaagtttggctngtcattttccaaaactctccacttctcatcntgataactctcaaatttgggaaacaactgaattcttgccaaaaagttcccccagaaaanttttgggaaaattttaanttcntttctttaaggaaccnttttnggtcccc

SEQ ID NO: 2461 - DNA, 614 bp, Homo sapiens
  misc_feature (270)..(270): "n" may be a, t, c, g, other or unknown
  misc_feature (274)..(274): "n" may be a, t, c, g, other or unknown
  misc_feature (357)..(357): "n" may be a, t, c, g, other or unknown
  misc_feature (528)..(528): "n" may be a, t, c, g, other or unknown
  misc_feature (554)..(554): "n" may be a, t, c, g, other or unknown
  misc_feature (567)..(567): "n" may be a, t, c, g, other or unknown
  misc_feature (575)..(575): "n" may be a, t, c, g, other or unknown
  misc_feature (602)..(602): "n" may be a, t, c, g, other or unknown
gtagtgacggggattgttgtgttgcagaaatccggcaatcgacctgaggacttgcgagccgctcagctcccgggacgtttggagctgctgctaaataatttctgctcagccatgtcgccggctccagatgcagccccggctcctgcgtcgatctccctgtttgacctcagcgcggatgctccggtctttcagggcctgagcctggtgagccacgcgcctggggaggctctggcccgggctccgcgtacttcctgttcaggctcagggganaaanaaagcccagaaagaaagctactccagggtcctatggatatttcagaaaagttattttgttcaacttgtgaccagaccttccanaaccaccaagaacagagggaacattataagcttgactggcatcggtttaacctaaagcaacgtctcaaggacaagcctctcctgtctgccctggactttgaaaagcagagctccacaggagatctttccagcatctcgggatcagaagactcagactcagccagtgaggangacttgcagacactggatcgggaganggctacatttganaaattganccgacccccaggcttttaccctcatcnagttcttttcca

SEQ ID NO: 2462 - DNA, 818 bp, Homo sapiens
  misc_feature (564)..(564): "n" may be a, t, c, g, other or unknown
  misc_feature (670)..(670): "n" may be a, t, c, g, other or unknown
  misc_feature (756)..(756): "n" may be a, t, c, g, other or unknown
  misc_feature (778)..(778): "n" may be a, t, c, g, other or unknown
  misc_feature (781)..(781): "n" may be a, t, c, g, other or unknown
  misc_feature (809)..(809): "n" may be a, t, c, g, other or unknown
  misc_feature (813)..(813): "n" may be a, t, c, g, other or unknown
gcatacatgacaaaatgtggccacagcttttgctacaagtgtattcatcagagtttggaggacaataatagatgtcccaagtgtaactatgttgtggacaatattaaccatctgtatcctaatttcttggtgaatgaactcattcttaaacagaagcaaagatttgaggaaaagaggttcaaattggaccactcagtgagtagcaccaatggccacaggtggcagatatttcaagattggttgggaactgaccaagataaccttgatttggccaatgtcaatcttatgttggagttactagtgcagaagaagaaacaactggaagcagaatcacatgcagcccaactacagattcttatggaattcctcaaggttgcaagaagaaataagagagaggaaatgagtggcttatactctcctgtcagtgaggatagcacagtgcctcaatttgaagctccttctccatcacacagtagtattattgattccacagaatacagccaacctccaggtttcagtggcagttctcagacaaagaaacagccttggtataatagcacgttngcatcaagacgaaaacgacttactgctcattttgaagacttggagcagtgttacttttctacaagggatgtctcgtatctcagatgacagtcgaactgcaagccanttgggatgaatttcaggaatgcttgtccaagtttactccaatataattccagttacgacctttaacccccattgtcatatgcctantgatctctataatggttcccanttntaatcctctaattattgaaatttggaancccnggggg

SEQ ID NO: 2463 - DNA, 821 bp, Homo sapiens
  misc_feature (756)..(756): "n" may be a, t, c, g, other or unknown
  misc_feature (815)..(815): "n" may be a, t, c, g, other or unknown
ctattctgtaaatgttcaatgaactagagaatgattcttgggtagttaatattgtcaatgttgatgaactcttttccttcgctgaaagcagctactttgttggaggtttcaattctgcgtggcaatttgcagcatttctagtggtactgctccacattttacagctttatgaagaaggtgtttactttttttgaaattaccttgagacatttcaaactgtgcagaagatatatgcacaaaagcaaatgtcttgcagtttgctatagccacttatcatcatctggctcttgaatagctttaattcagctgttgaatctcacttgaatttgagcaaaaccttcatctttatatgtatctggacaaattacttcaattgcttgacagtaatgaccaatcaatttatttaaaatagtatcatttagtaggacagtgtttttctctggtttgagcaacgaattcaaccagtcctctgggttgatcatcatcatcatcatcatttggttatcagttcctgagttatttttaccaggggagttttatacctttagacagctattttgaattatctcagggaatgtcatatatctctgcctctttagagtcagtcactggcactttgtctgtttggtgacatcatgtttccctgactgttcttcatctttggtagttatacattgatatatgtgcattgaatatgttaggtatttataaacagtctttgcaatctggctttgtctgtgaatgtccctgttatantaagtctgtccaaaaattgttaagccatactgtcttttttttgggtcttttaaaaaccncccccc

SEQ ID NO: 2464 - DNA, 795 bp, Homo sapiens
  misc_feature (698)..(698): "n" may be a, t, c, g, other or unknown
  misc_feature (730)..(730): "n" may be a, t, c, g, other or unknown
  misc_feature (762)..(762): "n" may be a, t, c, g, other or unknown
  misc_feature (771)..(771): "n" may be a, t, c, g, other or unknown
  misc_feature (793)..(793): "n" may be a, t, c, g, other or unknown
aaacagacatggccggcgaaggagatcagcaggacgctgcgcacaacatgggcaaccacctgccgctcctgcctgcagagagtgaggaagaagatgaaatggaagttgaagaccaggatagtaaagaagccaaaaaaccaaacatcataaattttgacaccagtctgccgacatcacatacatacctaggtgctgatatggaagaatttcatggcaggactttgcacgatgacgacagctgtcaggtgattccagttcttccacaagtgatgatgatcctgattcccggacagacattacctcttcagctttttcaccctcaagaagtcagtatggtgcggaatttaattcagaaagatagaacctttgctgttcttgcatacagcaatgtacaggaaagggaagcacagtttggaacaacagcagagatatatgcctatcgagaagaacaggattttggaattgagatagtgaaagtgaaagcaattggaagacaaaggttcaaagtccttgagctaagaacacagtcagatggaatccagcaagctaaagtgcaaattcttcccgaatgtgtgttgccttcaaccatgtctgcagttcaattagaatccctcaataagtgccagatatttccttcaaaacctgtctcaagaagaagaccaatgttcatataaatggtggcagaaataccagaaganaaagttcattggtgcaaatctaacttcgtggnctcgctggctgttttccttatatgatgctganaactttaantgggacagaaatccagaaaacnct

SEQ ID NO: 2465 - DNA, 737 bp, Homo sapiens
  misc_feature (69)..(69): "n" may be a, t, c, g, other or unknown
  misc_feature (147)..(147): "n" may be a, t, c, g, other or unknown
  misc_feature (495)..(495): "n" may be a, t, c, g, other or unknown
  misc_feature (543)..(543): "n" may be a, t, c, g, other or unknown
  misc_feature (669)..(669): "n" may be a, t, c, g, other or unknown
  misc_feature (675)..(675): "n" may be a, t, c, g, other or unknown
  misc_feature (684)..(684): "n" may be a, t, c, g, other or unknown
  misc_feature (705)..(705): "n" may be a, t, c, g, other or unknown
  misc_feature (723)..(723): "n" may be a, t, c, g, other or unknown
agccgccgcctcgccgcttcccctcgtcggagcggccgctcgtccgcccggcttgaggcccgcggggancgcggcgcaattcgtcggcccgcgggggggcggcctcccggcatcttcgcggcgaccaaggactaccaggaaggggancggctgggatggcgcgtccgcggccccgcgagtacaaagcgggcgacctggtcttcgccaagatgaagggctacccgcactggccggcccggattgatgaactcccagagggcgctgtgaagcctccagcaaacaagtatcctatcttcttttttggcacccatgaaactgcatttctaggtcccaaagacctttttccatataaggagtacaaagacaagtttggaaagtcaaacaaacggaaaggatttaacgaaggattgtgggaaatagaaaataacccaggagtaaagtttactggctaccaggcaattcagcaacagagctcttcagaaactgagggagaangtggaaatactgcagatgcaagcagtgaggaagaaggtgatagagtanaagaagatggaaaaggcaaaagaaagaatgaaaaagcaggctcaaaacggaaaaatcatatacttcaaagaaatcctctaaacagtcccggaaatctccaggaagatgaagatgacaagactgccnagaaanaagaaaacnaaagcagctctgaaggtgganatgccgggcaacgacacnagaaaacacacttc

SEQ ID NO: 2466 - DNA, 692 bp, Homo sapiens
  misc_feature (599)..(599): "n" may be a, t, c, g, other or unknown
  misc_feature (602)..(602): "n" may be a, t, c, g, other or unknown
  misc_feature (625)..(625): "n" may be a, t, c, g, other or unknown
  misc_feature (631)..(631): "n" may be a, t, c, g, other or unknown
  misc_feature (689)..(689): "n" may be a, t, c, g, other or unknown
gaagcgcgccgcgcacctcatggttccggggacagttagggcggcggatggagggtttggaatcacttgctaggagtcttgtctctctgccacccaggacatcatggcagctcacctggtaaagcgatgcacgtgcctcctgagagaagctgctcgtcaggcccctgccatggctccagttggccgactgagacttgcctgggtagcccataagactctgacttcctcagccacctcacccatttcccacctcccaggttccttgatggagccggtggagaaggaacgagcatctactccctacatagagaagcaggtggaccacctcatcaagaaggccacaaggccagaggagctcctggagctacttggtggcagtcacgacttggacagcaatcaagcagcaatggtacttatccggctctctcacttgctgtctgagaagccagaagataaaggcttgctcatacaggatgcccactttcatcaacttctctgtctgctcaacagtcagattgcctcggtctggcatggtaccctctcgaagctgctgggaacctgtatgctctgggcatccccaaggcctccaaggactgcantcngtggaacaggaagtccgctggcncatgcngaactcaattacaagcacctggccttcctggcaaaatcctgttgccaccctctcacangaa

SEQ ID NO: 2467 - DNA, 716 bp, Homo sapiens
  misc_feature (520)..(520): "n" may be a, t, c, g, other or unknown
  misc_feature (579)..(579): "n" may be a, t, c, g, other or unknown
  misc_feature (670)..(670): "n" may be a, t, c, g, other or unknown
  misc_feature (683)..(683): "n" may be a, t, c, g, other or unknown
  misc_feature (694)..(694): "n" may be a, t, c, g, other or unknown
  misc_feature (714)..(714): "n" may be a, t, c, g, other or unknown
  misc_feature (716)..(716): "n" may be a, t, c, g, other or unknown
aaagtgggctccaggcgtcgcgatggaggagagcgggtacgagtcggtgctctgtgtcaagcctgacgtccacgtctaccgcatccctccgcgggctaccaaccgtggctacagggctgcggagtggcagctggaccagccatcatggagtggccggctgaggatcactgcaaagggacagatggcctacatcaagctggaggacaggacgtcaggggagctctttgctcaggccccggtggatcagtttcctggcacagctgtggagagtgtgacggattccagcaggtacttcgtgatccgcatcgaagatggaaatgggcgacgggcgtttattggaattggcttcggggaccgaggtgatgcctttgacttcaatgttgcattgcaggaccatttcaagtgggtgaaacagcagtgtgaatttgcaaaacaagcccagaacccagaccaaggccctaaactggacctgggcttcaaggagggccagaccatcaagctcaacatcgcaaacatgaanaagaaggaaggagcagctgggaatccccgagtccggcctgccagcacaggaaggctgancctgcttcccctcccccaggggggaaaacctccaccctgatccctccccctggggaacaattggctgtggggggatccctcctccaaccancatttgctcccanttcaggaagtnctcctgtacctgggccaaangn

SEQ ID NO: 2468 - DNA, 742 bp, Homo sapiens
  misc_feature (30)..(30): "n" may be a, t, c, g, other or unknown
  misc_feature (381)..(381): "n" may be a, t, c, g, other or unknown
  misc_feature (465)..(465): "n" may be a, t, c, g, other or unknown
  misc_feature (575)..(575): "n" may be a, t, c, g, other or unknown
  misc_feature (578)..(578): "n" may be a, t, c, g, other or unknown
  misc_feature (628)..(628): "n" may be a, t, c, g, other or unknown
  misc_feature (689)..(689): "n" may be a, t, c, g, other or unknown
  misc_feature (709)..(709): "n" may be a, t, c, g, other or unknown
  misc_feature (724)..(724): "n" may be a, t, c, g, other or unknown
  misc_feature (726)..(726): "n" may be a, t, c, g, other or unknown
  misc_feature (742)..(742): "n" may be a, t, c, g, other or unknown
aaaaaaaaaaaaagcatccgctgggtgtanccgtggggatggcaggttcggggaggctggtcctacggccctggattcgggagctgattctggggtcagagacaccctccagtccacgagccgggcagctgcttgaggtactacaggacgccgaggccgcggtcgcgggcccatcccacgcccctgatacgtccgacgtcggggccacgctgcttgtgtctgacgggacccacagtgtccgatgcctggtgacgcgggaggccctggacacctcggactgggaggagaaggagttcggcttccgcgggacagagggccggctgctgctgctgcaggactgcggggttcatgtccaggtcgctgagggcggcgcgcccgcanagttctatctccaggtggaccgcttcagcctgctgcccacggagcagccccggctacgggtgcctggttgcaaccaagacttanatgttcagaaaaagctctatgactgccttgaggagcacctttcagagtccacctcgtccaatgcaggcctatcactgtcccagcttctggatgaaatgcgggaggaccangancatcagggggcactcgtgtgcctggctgaaactgcctgacactggaaggnccttgcacagcaccccctgtcacccactgggctgcctcacgatgcaaggccacgggaaaanctgtgttacacttgtcccanctcaattgctgttgnanccccccccccccaatn

SEQ ID NO: 2469 - DNA, 570 bp, Homo sapiens
  misc_feature (105)..(105): "n" may be a, t, c, g, other or unknown
  misc_feature (383)..(383): "n" may be a, t, c, g, other or unknown
  misc_feature (491)..(491): "n" may be a, t, c, g, other or unknown
  misc_feature (505)..(505): "n" may be a, t, c, g, other or unknown
  misc_feature (544)..(545): "n" may be a, t, c, g, other or unknown
  misc_feature (552)..(552): "n" may be a, t, c, g, other or unknown
aaaatagggtcactgggccgcttggcggtgtcgttgcggtaccaggtccgcgtgaggggttcgggggttctgggcaggcacaatggcgtctcgagcaggcccgcnagcggccggcaccgacggcagcgactttcagcaccgggagcgcgtcgccatgcactaccagatgagtgtgaccctcaagtacgaaatcaagaagctgatctacgtacatctggtcatatggctgctgctggttgctaagatgagcgtggaacacctggggctcttgtcacatgatcaggtggccatgccctatcagtgggaatacccgtatttgctgagcattttgccctctctcttgggccttctctcctttccccgcaacaacattagctacctgntgctctccatgatcagcatgggactcttttccatcgctccactcatttatggcagcatggagatgttccctgctgcacagcaactctaccgccatgggcaaggcctanccgtttcctctttnggtttttctgccgttttccaccatgcactgatgttggtnnttggcantgccaaatgccatgcctg

SEQ ID NO: 2470 - DNA, 738 bp, Homo sapiens
  misc_feature (440)..(440): "n" may be a, t, c, g, other or unknown
  misc_feature (504)..(504): "n" may be a, t, c, g, other or unknown
  misc_feature (601)..(601): "n" may be a, t, c, g, other or unknown
  misc_feature (605)..(605): "n" may be a, t, c, g, other or unknown
  misc_feature (631)..(631): "n" may be a, t, c, g, other or unknown
  misc_feature (694)..(694): "n" may be a, t, c, g, other or unknown
  misc_feature (703)..(703): "n" may be a, t, c, g, other or unknown
  misc_feature (707)..(707): "n" may be a, t, c, g, other or unknown
  misc_feature (735)..(735): "n" may be a, t, c, g, other or unknown
  misc_feature (737)..(737): "n" may be a, t, c, g, other or unknown
gtctctcgttttcggacggctgcagcatcgcggtggggatcgaaagcgggggcttctgggacgcagctctggagacgcggcctcggaccagccatttcggtgtagaagtggcagcacggcagattcatctgaaaactacattaagatgaagacctttgaaggtttctgtgctttgcatctcgctgcaagtcaaggacattggaaaatcgtacagattcttttagaagctggggcagatcctaatgcaactactttagaagaaacgacaccattgttttcagctgttgaaaatggacagatagatgtgttaaggctgttgcttcaacacggagcaaatgttaatggatcccattctatgtgtggatggaactccttgcaccaggcttcttttcaggaaaatgctgagatcataaaattgcttcttagaaaaggagcaaacnaggaatgccaggatgactttggaatcacacccttatttgtggctgctcattatggcaagcttanaaagcttgaaccatacttatttcatcggggtgcaaatgtcaattgtcaagccttggacaaagctacacccttgttcattgctgctcaagaagggacncacnaaatgtgtggaacttttgctctccantggggcaaatcctgatctttactgtcatgaagacagttggcatttaccttattcatgccgctngcacaaatnggcntaccaaaaaatcttgggaacttgtttantnc

SEQ ID NO: 2471 - DNA, 842 bp, Homo sapiens
  misc_feature (631)..(631): "n" may be a, t, c, g, other or unknown
  misc_feature (694)..(694): "n" may be a, t, c, g, other or unknown
  misc_feature (703)..(703): "n" may be a, t, c, g, other or unknown
  misc_feature (745)..(745): "n" may be a, t, c, g, other or unknown
  misc_feature (778)..(778): "n" may be a, t, c, g, other or unknown
  misc_feature (796)..(796): "n" may be a, t, c, g, other or unknown
  misc_feature (807)..(807): "n" may be a, t, c, g, other or unknown
  misc_feature (809)..(809): "n" may be a, t, c, g, other or unknown
gctgtcagctttctccgtggtctgagtttgtggctgcatttttatctctggtggctctgctacggcggcgcagaaatgaggcagaagcggaaaggagatctcggccctgctgagctgatgatgctgactataggagatgttattaaacaactgattgaagcccacgagcaggggaaagacatcgatctaaataaggtgaaaaccaagacagctgccaaatatggcctttctgcccagccccgcctggtggatatcattgctgccgtccctcctcagtatcgcaaggtcttgatgcccaagttaaaggcgaaacccatcagaactgctagtgggattgctgtcgtggctgtgatgtgcaaaccccacagatgtccacacatcagttttacaggaaatatatgtgtatactgccctggtggacctgattctgattttgagtattccacccagtcttacactggctatgagccaacctccatgagagctatccgtgccagatatgaccctttcctacagacaagacaccgaatagaacagttaaaacaacttggtcatagtgtggataaagtggaatttattgtgatgggtggaacgtttatggcccttccagaagaataccgagattattttnttcgaaatttacatgatgccttatcaggacatacttccaacaatatttacgaaggcagtccantattctganaaaaacctcacaaagtgttattggaattactattgaaaaccngaccagattactgcatgaagcgacttttaagtnactgttaacctattgggntgcaccaaggntngaaaattgggggttcaaaatgtttatgaaaaat

SEQ ID NO: 2472 - DNA, 640 bp, Homo sapiens
  misc_feature (4)..(4): "n" may be a, t, c, g, other or unknown
  misc_feature (22)..(22): "n" may be a, t, c, g, other or unknown
  misc_feature (303)..(303): "n" may be a, t, c, g, other or unknown
  misc_feature (572)..(572): "n" may be a, t, c, g, other or unknown
  misc_feature (577)..(577): "n" may be a, t, c, g, other or unknown
  misc_feature (608)..(608): "n" may be a, t, c, g, other or unknown
  misc_feature (623)..(623): "n" may be a, t, c, g, other or unknown
  misc_feature (631)..(631): "n" may be a, t, c, g, other or unknown
gcanacacgtgatgcggggganggcggggcgtggcaggagcaagcgtctgccgcggtggccgggtgccggtaagggtttccagcgcccccggcctaggttttggaggcgcgggaatgcgttcgttgctcagtgtcggacttccccctattcccatcggccgaggctgtcactttacgctcataaccgtttttctttactgcactcgtgtcgggaggaaagggacttgcgtggcacccccagacctccccgtctccgcttccacgtttggtacatcctgcctgaggcaggaagccgcagctganggacggcctgtcgtacggtgcggatggtggtggcctgcgaggctcatttctagcaaggaacaaggctttcccgctttgattttataaatattatgtttacaaagctgtaatatatagaaattgataagacgtgtccctgtccctggaaacgcaggcaccgcgtgtttggaaagacattcatctgggctgtttgacagactccccagttggtgccatgctctgtgcttagggaactgtgagaccctggaagggtgggtaccgggaccgcnctcancctggggtttggaggcggctcctataagaancaactgggacctaanatttttanactgactgt

SEQ ID NO: 2473 - DNA, 881 bp, Homo sapiens
  misc_feature (425)..(425): "n" may be a, t, c, g, other or unknown
  misc_feature (460)..(460): "n" may be a, t, c, g, other or unknown
  misc_feature (489)..(489): "n" may be a, t, c, g, other or unknown
  misc_feature (557)..(557): "n" may be a, t, c, g, other or unknown
  misc_feature (593)..(593): "n" may be a, t, c, g, other or unknown
  misc_feature (608)..(608): "n" may be a, t, c, g, other or unknown
  misc_feature (626)..(626): "n" may be a, t, c, g, other or unknown
  misc_feature (635)..(635): "n" may be a, t, c, g, other or unknown
  misc_feature (740)..(740): "n" may be a, t, c, g, other or unknown
  misc_feature (753)..(753): "n" may be a, t, c, g, other or unknown
  misc_feature (800)..(800): "n" may be a, t, c, g, other or unknown
  misc_feature (812)..(812): "n" may be a, t, c, g, other or unknown
  misc_feature (875)..(877): "n" may be a, t, c, g, other or unknown
gaggctcggccgcctgagccgcggacggtttgctgagcccgttagtgcgcccggccgagacacgccgccgccatgtcccgctacctgcgtccccccaacacgtctctgttcgtcaggaacgtggccgacgacaccaggtctgaagacttgcggcgtgaatttggtcgttatggtcctatagttgatgtgtatgttccacttgatttctacactcgccgtccaagaggatttgcttatgttcaatttgaggatgttcgtgatgctgaagacgctttacataatttggacagaaagtggatttgtggacggcagattgaaatacagtttgcccagggggatcgaaagacaccaaatcagatgaaagccaaggaagggaggaatgtgtacagttcttcacgctatgatgattatgacagatacggacnttctacaagccgaagttatgagaggaggagatcangaagtcggtcttttgattacaactatagnaagatcgtatagtcctagaaacagtataccgactgggaagaccacggcgtacataagccattccgacnatgatagaccaaactgcagctggaatacccagtacngttctgcttactacncttcaagaaagatctganagcggaaanagaaccaaagaagggcagtccaagcgaccaaagggtgggtggaaggtctgcaatatgaatactgttcgaatatttgactctggtctgaaaagattaaaaatgttntcgaaaaactacntgggaaataattgaatcccttccaagttttgttagttagcctttttnggaaccaatttnaaggacattccactttgttcttgttggaaactattcttaaatttgaaataggtctcaaactgnnncccg

SEQ ID NO: 2474 - DNA, 669 bp, Homo sapiens
  misc_feature (627)..(627): "n" may be a, t, c, g, other or unknown
  misc_feature (633)..(633): "n" may be a, t, c, g, other or unknown
ttcaactagcaaaagaaagctttctgcacagattggcccaagagagagaagcagcaaaagctaagaaagaagaatcaacaacaggtaacgccaacttgttagaaaagacaggaggagtggatttccatatgaaagctgtgccagggacagaagtgccagggcataagaattgggttgtgagcaaatttggaagagtcttacctgttcttcaccttaaaaatcaacataaacgtaaaatcatcaaatatgatccctcaaaatactgccacaacctgaagaagataggggaggatttctcaaacaccattcctatatccagcctgacttgggaattagaaggagggaatgaccctatgagtaagaaacggcgaggagagttctctgactttcatggccctcccaagaagataataaaagtgcagaaggatgagagttccactgggtctctggccatgagtacaaggcccaggagggtaatagagagaccacccttaacacagcaacaggctgcacaaaaaagaacttgtgattccattactccttctaaatcatctcctgtacctgtttctgatactcagaaacttaaaaatctaccttttaagacttctggcttgggaaactgccaanaaaganaaacagcattttctgatgaattttggggaaaaaatt

SEQ ID NO: 2475 - DNA, 692 bp, Homo sapiens
  misc_feature (598)..(598): "n" may be a, t, c, g, other or unknown
  misc_feature (603)..(603): "n" may be a, t, c, g, other or unknown
  misc_feature (671)..(671): "n" may be a, t, c, g, other or unknown
  misc_feature (679)..(679): "n" may be a, t, c, g, other or unknown
  misc_feature (690)..(690): "n" may be a, t, c, g, other or unknown
ttcctagccaggcctggcggtaaccttgggggcctcactgcagccgccgctgctgttggagtgggctttgcgagtctgaacgttggcggggctaggctcgttaactgccgagagcctccgggtttgcggtggaggacgctgaggcccgtggggggcaggcacccgggcgccgggcctcccagccgacatgtctctagtggcggaagccttcgtctcccagattgcagctgcagaaccttggcctgaaaatgctacattatatcagcaattgaaaggggagcaaattttactttctgacaatgcagcttctcttgcagtgcaggcctttttgcaaatgtgtaacttgcctatcaaagtagtttgtagggcaaatgcagaatatatgtctccatctggtaaagtaccttttattcatgtgggaaatcaagtagtatcaggacttggtccaatagtccaatttgttaaagccaagggccattctcttagtgatgggctggaggaagtccaaaaagcagaaatgaaagcttacatggaattagtcaacaatatgctgttgactgcagagctgtatcttcagtggtgtgatgaactacagtanggganatcactcatgctaggtatggatctccttacccttggcctctgaatcatattttggcctatcaaaaacnctgggaantcaaacgtaanat

SEQ ID NO: 2476 - DNA, 795 bp, Homo sapiens
  misc_feature (732)..(732): "n" may be a, t, c, g, other or unknown
  misc_feature (742)..(743): "n" may be a, t, c, g, other or unknown
  misc_feature (786)..(786): "n" may be a, t, c, g, other or unknown
  misc_feature (794)..(794): "n" may be a, t, c, g, other or unknown
acttcagttctcggagagaagaggcgggagtggacctggtcagccctaccccactgaccccaccggacccaggcgcggcctccgccacagccacagcccctgcccctgctgcggcgcggcgaggcgaggcgatggccaaggtgtcggtgctgaacgtggcggccctggagaacccgagccctttccacagccccttccggttcgagatcagcttcgagtgcagtgaagccctggcggacgacctggagtggaagatcatttatgttggctcggctgagagtgaggaatttgatcagatcctagactcggtgctggtgggccctgtgccagcagggagacacatgtttgtctttcaggccgacgcccccaacccatccctcatcccagagactgatgccgtgggtgtgactgtggtcctcatcacctgcacctaccatggacaggagttcatccgagtgggctactacgtcaacaacgagtacctcaaccctgagctgcgtgagaacccgcccatgaagccagatttctcccagctccagcggaacatcttggcctcgaacccccgggtgaccgcttccatatcaactgggacaacaacatggacaggctggaggccatagagaccaggaccctccctgggctgcggcctcccactcaactgcactcctatcaagggcttggggctcctggctgcatccctgggcctcctccctgagaactccatggactgcntctaactgcnnggaacccaaattttccacccccccgggaaggggcaaccaaggnctccccanc

SEQ ID NO: 2477 - DNA, 665 bp, Homo sapiens
  misc_feature (446)..(446): "n" may be a, t, c, g, other or unknown
  misc_feature (484)..(484): "n" may be a, t, c, g, other or unknown
  misc_feature (633)..(633): "n" may be a, t, c, g, other or unknown
  misc_feature (649)..(649): "n" may be a, t, c, g, other or unknown
  misc_feature (651)..(651): "n" may be a, t, c, g, other or unknown
  misc_feature (654)..(654): "n" may be a, t, c, g, other or unknown
  misc_feature (660)..(660): "n" may be a, t, c, g, other or unknown
aagtgaccctagagaaacgagttgtggctgaggaccccggcggcagacgcaggttcgggaccatgagctggattccttttaagattgggcagcccaagaaacagattgtgcccaaaacaccatgtcaaaatctgccgtgaagatatccttggacttactctccaatcccctctgtgagcaagaccaggaccttctgaacatggtgacggccctggacacggccatgaagcggatggatgccttcaatcaggaaaaggtgaaccagatccagaagactgtgatcgagcccttaaaaaagttcggcagtgtcttcccgagcctcatcatggctgtgaagaggcgggaacaggccttgcaggactacaggaggctgcaggccaaggtggagaagtatgaggaaaaggagaagacggggccagtgctggccaagctccaccaggcacganaggagctgcggcctgtgcgggaggactttgaagccaanaacaggcagctgctggaggagatgccgcgcttctacggcagccgcctcgactacttccagcccagctttgaatccctcatccgagctcaggttgtgtactactcggaaatgcacaagatctttggagacctgtccatcagcttgaccanccaggccactccgatnancancgggancggga

SEQ ID NO: 2478 - DNA, 423 bp, Homo sapiens
  misc_feature (77)..(77): "n" may be a, t, c, g, other or unknown
  misc_feature (147)..(147): "n" may be a, t, c, g, other or unknown
  misc_feature (273)..(273): "n" may be a, t, c, g, other or unknown
  misc_feature (280)..(280): "n" may be a, t, c, g, other or unknown
  misc_feature (285)..(285): "n" may be a, t, c, g, other or unknown
  misc_feature (362)..(362): "n" may be a, t, c, g, other or unknown
  misc_feature (371)..(371): "n" may be a, t, c, g, other or unknown
  misc_feature (382)..(382): "n" may be a, t, c, g, other or unknown
  misc_feature (389)..(389): "n" may be a, t, c, g, other or unknown
  misc_feature (408)..(408): "n" may be a, t, c, g, other or unknown
accaaaacactagcatccccacccgcggactctgtaactttttaatgtctgatgaagagtatgatgacagaactgcncgggtgctgattggacatatctcaaagaagatgaacaaacagactttccctgagcactgtagtttgtgtnaagagatcttgccattcacagatcgcaaacaggcagtctgttccaatggccacatttggctccggtgcttcttaacctaccagtcctgccagagttggatatatagaaggtgtttgctccctgaangcattgnccggnatccagctccagaagatccgactggattaagaagttactgcaaaacccctgccctttctgtgattctcctgtcttcnaaataatcngtgacgggaanatggaanggcatgatgaactctgccntaaaaaacttcctcc

SEQ ID NO: 2479 - DNA, 804 bp, Homo sapiens
  misc_feature (100)..(100): "n" may be a, t, c, g, other or unknown
  misc_feature (192)..(192): "n" may be a, t, c, g, other or unknown
  misc_feature (223)..(223): "n" may be a, t, c, g, other or unknown
  misc_feature (628)..(628): "n" may be a, t, c, g, other or unknown
  misc_feature (730)..(730): "n" may be a, t, c, g, other or unknown
  misc_feature (762)..(762): "n" may be a, t, c, g, other or unknown
  misc_feature (767)..(767): "n" may be a, t, c, g, other or unknown
  misc_feature (781)..(781): "n" may be a, t, c, g, other or unknown
  misc_feature (783)..(783): "n" may be a, t, c, g, other or unknown
gatgctgcagccgtccagcagcccgctctgggggaagcttcgtgtggacatcaaggcttacctgggctcggccatacagctggtgtcctgtctgtcgganacgacggtgttggcggccgtgctgcggcacatcagcgtgctggtgccctgcttcctgaccttccccaagcagtgccgcatgctgctcaaganaatggtggtcgtatggagcactggggaggantctctgcgggtgctggctttcctggtcctcagcagagtctgccggcacaagaaggacactttccttggccccgtcctcaagcaaatgtacatcacgtatgtgaggaactgcaagttcacctcgcctggtgccctccccttcatcagtttcatgcagtggaccttgacggagctgctggccctggagccgggtgtggcctaccagcacgccttcctctacatccgccagctcgccatacacctgcgcaacgccatgaccacccgcaagaaggaaacataccagtctgtgtacaactggcagtatgtgcactgcctcttcctgtggtgccgggtcctgagcactgcgggccccatcgaaccctccagcccttggtctacccccttgcccaagtcatcattggctgtntcaagctcatccccactgcccgcttctaccccgcttgcgaatgcactgcatcccgttgccctgacgctgctctcgggggaactcgggggggctttcatcccngtgccgcctttccatccttggaaaattttccnaccanggtcgaacttccancnagggaaacccaggggggcatt

SEQ ID NO: 2480 - DNA, 758 bp, Homo sapiens
  misc_feature (52)..(52): "n" may be a, t, c, g, other or unknown
  misc_feature (63)..(63): "n" may be a, t, c, g, other or unknown
  misc_feature (114)..(114): "n" may be a, t, c, g, other or unknown
  misc_feature (454)..(454): "n" may be a, t, c, g, other or unknown
  misc_feature (474)..(474): "n" may be a, t, c, g, other or unknown
  misc_feature (478)..(478): "n" may be a, t, c, g, other or unknown
  misc_feature (597)..(597): "n" may be a, t, c, g, other or unknown
  misc_feature (653)..(653): "n" may be a, t, c, g, other or unknown
  misc_feature (662)..(662): "n" may be a, t, c, g, other or unknown
  misc_feature (686)..(686): "n" may be a, t, c, g, other or unknown
  misc_feature (703)..(703): "n" may be a, t, c, g, other or unknown
  misc_feature (720)..(720): "n" may be a, t, c, g, other or unknown
  misc_feature (757)..(757): "n" may be a, t, c, g, other or unknown
gaagatgcacctagcaccaagctccatggagaggtgctagccctggaagaanagcgggctcangtgctggggcacgtggagcagctcaaggtccgtgtgaaggagctagagcancagctgcaggagtcagcccgagaggaggcagaggccctggggactgagacaaagctctttgaggacttggagttccagcagttggagcgggagagccgcgtggaggaggagcgcgagctggccggccaggggctgctccggagcaaggctgagctgctccgcagcatcgccaagaggaaggagcgcctggccatcctggacagtcaggctgggcagatccgggctcaggccgtgcaggaatcagaacgcctggcccgggacaagaatgcctccttacagctgctgcaaaaggagaaggagaagctgactgtgctggaaaggagataccactcactcacanggggcaggcctttcccgaanaccncatcgaccctcaaagaggtttaccgctccaagatggatggcgaggccaccatcccccttccccggacccgcagcggccccctcccctcctcctctggctcttcctcctcctcctcccanctcagcgtggctaccctggggcgtacccctccccaaagaacgctctactcacccanaatggcacnggcaccttcctcgcaacctggcanccacactgcaggactcnaaaacaacgccaactanctctgcacagaaaggacaacaagtgattgaaaaacanc

SEQ ID NO: 2481 - DNA, 877 bp, Homo sapiens
  misc_feature (548)..(548): "n" may be a, t, c, g, other or unknown
  misc_feature (736)..(736): "n" may be a, t, c, g, other or unknown
  misc_feature (797)..(797): "n" may be a, t, c, g, other or unknown
  misc_feature (829)..(829): "n" may be a, t, c, g, other or unknown
  misc_feature (833)..(833): "n" may be a, t, c, g, other or unknown
  misc_feature (853)..(853): "n" may be a, t, c, g, other or unknown
  misc_feature (873)..(873): "n" may be a, t, c, g, other or unknown
tgctgtccagggtgacaattctcaggtgctgcagctccttggaaggaacgcagtggctggcctgaaccaggtgaataaccaagggctgaccccgctgcacctggcctgccagctggggaagcaggagatggtccgcgtgctgctgctgtgcaatgctcggtgcaacatcatgggccccaacggctaccccatccactcggccatgaagttctctcagaaggggtgtgcggagatgatcatcagcatggacagcagccagatccacagcaaagacccccgttacggagccagccccctccactgggccaagaacgcagagatggcccgcatgctgctgaaacggggctgcaacgtgaacagcaccagctccgcggggaacacggccctgcacgtggcggtgatgcgcaaccgcttcgactgtgccatagtgctgctgacccacggggccaacgcggatgcccgcggagagcacggcaacaccccgctgcacctggccatgtcgaaagacaacgtggagatgatcaaggccctcatcgtgttcggagcanaagtggacaccccgaatgactttggggagactcctacattcctagcctccaaaatcggcagacttgtcaccaggaaggcgatcttgactctgccgagaaccgtgggggccgaatactgcttcccacccatccacggggtcccgcggaacaaggctctgcacgccacatcatcccttctccctggaaanaactcacccccaccgatcacctaaacaacctaaaactacaggatctcatgcacatctcacngggccccgaaaaccacgttcatccctggggtncatnaaagggacaaaaaaccgaanccccaaacaccttgcttttncctg

SEQ ID NO: 2482 - DNA, 724 bp, Homo sapiens
  misc_feature (212)..(212): "n" may be a, t, c, g, other or unknown
  misc_feature (231)..(231): "n" may be a, t, c, g, other or unknown
  misc_feature (470)..(470): "n" may be a, t, c, g, other or unknown
  misc_feature (473)..(473): "n" may be a, t, c, g, other or unknown
  misc_feature (520)..(520): "n" may be a, t, c, g, other or unknown
  misc_feature (550)..(550): "n" may be a, t, c, g, other or unknown
  misc_feature (666)..(666): "n" may be a, t, c, g, other or unknown
  misc_feature (673)..(673): "n" may be a, t, c, g, other or unknown
  misc_feature (694)..(694): "n" may be a, t, c, g, other or unknown
  misc_feature (710)..(710): "n" may be a, t, c, g, other or unknown
  misc_feature (715)..(715): "n" may be a, t, c, g, other or unknown
ggctccaaatgtccacttgcacattctacaaaaagagtgtttcaaagctgctcaatgaaaagtaaggttcaactctatgagatgaatgcacaaatcacaaagaagtctgtcagaatgcttctgtctaggttttatgtgaagatatttccttttccatgataggccccaaagcactccacaggtccagttgcagattctacaaaaagagtgtntcaaagctgctcaatcaanagaaacgttcatctctgtgacatgaatgcacacatcacaatgaaatttatcagaatgcttctgtctagtttttttgtgaaaatatttccttttccaccataggcctcaaagtgctccaaatgtccacttgtagattctacaaacagagtgtttaaaaactgctaaatgaaaagaaagattcaactctgtgagatgaatacacacatcaagaagaagtttgtcagaatgcttctgtctanttnttatatgatgatatgtccttttccacaataggccagaaagtgctccnaatgtccacttgcagattcaacaaaaagantgtttcaaagctgctcaatgttaaagaaaggttcaacactgtgagctgaatgcccacatctcaaagaagtttgtaagaatgcttctgtctagtttttatgtgaacatattcctttncccccantaggcctccaaaagggctccncattgttcctcctgcngattnctaccaaaa

SEQ ID NO: 2483 - DNA, 894 bp, Homo sapiens
  misc_feature (586)..(586): "n" may be a, t, c, g, other or unknown
  misc_feature (685)..(685): "n" may be a, t, c, g, other or unknown
  misc_feature (703)..(703): "n" may be a, t, c, g, other or unknown
  misc_feature (750)..(750): "n" may be a, t, c, g, other or unknown
  misc_feature (757)..(757): "n" may be a, t, c, g, other or unknown
  misc_feature (799)..(799): "n" may be a, t, c, g, other or unknown
  misc_feature (811)..(811): "n" may be a, t, c, g, other or unknown
  misc_feature (832)..(832): "n" may be a, t, c, g, other or unknown
  misc_feature (870)..(870): "n" may be a, t, c, g, other or unknown
  misc_feature (894)..(894): "n" may be a, t, c, g, other or unknown
attgcacactgcactttctgagttatgcttctctataaattatgtaccaaacatggtggtatgggaacatacctttaccccacgagaatatttgacttctcatctggaaatacgctttaccaagtcaattgttgggatgactatgtataatcaagccacacaggaaattgcaaaaccttcagaacttctaacaagtgtaagagcatacatgaccgtactccagtcaatagaaaactatgtgcagattgatattacaagagtatttaataatgtgcttcttcaacaaacacaacatttagacagtcatggagagccaaccattacaagtctatacacaaattggtatttggaaactttgttacgacaagtcagcaatggccatatagcatattttcctgcaatgaaagcgtttgtgaacttacctacagaaaatgaattaacattcaatgcagaggaatattctgacatatcagaaatgaggtcattatcagaactactaggcccatatggtatgaagtttctaagtgaaagccttatgtggcatatttcatcacaagttgctgaacttaagaaacttgtggtgganaatgttgatgtgttaacacaaatgaggaccagctttgacaaaccagaccagatggctgcactgtttaaaagattatcatctgttgacagtgtcttgaanaagatgggctactggganaatttctggggcttgcatcctccagtctactgaaaattgggcagganaccgatnaaactaccaccagaaatagaaaatctgtttatttactgctanatatgaatggtncagaatcccattcctacaatnggatcttttgggaaactggtttccctaagttctggctnaaaaatgcttaccagcttgtctcn

SEQ ID NO: 2484 - DNA, 873 bp, Homo sapiens
  misc_feature (787)..(787): "n" may be a, t, c, g, other or unknown
  misc_feature (793)..(793): "n" may be a, t, c, g, other or unknown
  misc_feature (800)..(800): "n" may be a, t, c, g, other or unknown
  misc_feature (815)..(815): "n" may be a, t, c, g, other or unknown
  misc_feature (840)..(840): "n" may be a, t, c, g, other or unknown
ctattttagtacaagtgaaacagcctcgaaaaaaggtcatggcttgcaaaaccgcttttaataaaaccgggttccaagaagtgtttgatcctcctcattatgaactgttttcactaagggacaaagagatttctgcagacctggcagacttgtcggaagaattggacaactaccagaagatgcggcgctcctccaccgcctcccgctgcatccacgaccaccactgtgggtcgcaggcctccagcgtcaaacaaagcaggaccaacctcagttccatggaacttcctttccgaaatgactttgcacaaccacagccaatgaaaacatttaatagcaccttcaagaaaagtagttacactttcaaacagggacatgagtgccctgagcaggccctggaagaccgagtaatggaggagattccctgtgaaatttatgtcagggggcgagaagattctgcacaagcatccatatccattgacttctaatcttctgctaatggtgatgtgaattcttagggtgtgtacgtacgcagcctccagggcaccatactgtttccagcagccaacccttttctcccatcacaactacgaagaccttgatttaccgttaacctattgtatggtgatgtttttattctctcaggcagtctatatatgttaaaccaatcaaggacttactctattcagtggaaacaataatcatctctattgcttgggtgtcatttataggaagcactgccagtttaaagaccttaaaaaaaaggtggttgggatggaaccaagctcanggctgnctcttcntttttaccaaccaanaaaaatgctcttgaatgaataacanctctgttcaatattttggatgccccaataaaac

SEQ ID NO: 2485 - DNA, 788 bp, Homo sapiens
  misc_feature (263)..(263): "n" may be a, t, c, g, other or unknown
  misc_feature (290)..(290): "n" may be a, t, c, g, other or unknown
  misc_feature (417)..(417): "n" may be a, t, c, g, other or unknown
  misc_feature (637)..(637): "n" may be a, t, c, g, other or unknown
  misc_feature (708)..(708): "n" may be a, t, c, g, other or unknown
  misc_feature (726)..(726): "n" may be a, t, c, g, other or unknown
  misc_feature (737)..(737): "n" may be a, t, c, g, other or unknown
  misc_feature (740)..(740): "n" may be a, t, c, g, other or unknown
  misc_feature (743)..(743): "n" may be a, t, c, g, other or unknown
gtctaccttccggaggcccacatcttgcccactccgcgcgcggggctagcgcgggtttcagcgacgggagccctcaagggacatggcaactacagcggcgccggcgggcggcgcccgaaatggagctggcccggaatggggagggttcgaagaaaacatccagggcggaggctcagctgtgattgacatggagaacatggatgatacctcaggctctagcttcgaggatatgggtgagctgcatcagcgcctgcgcgaggaanaagtagacgctgatgcagctgatgcanctgctgctgaagaggaggatggagagttcctgggcatgaagggctttaagggacagctgagccggcaggtggcagatcagatgtggcaggctgggaaaagacaagcctccagggccttcagcttgtncgccaacatcgacatcctcagaccctactttgatgtggagcctgctcaggtgcgaagcaggctcctggagtccatgatccctatcaagatggtcaacttcccccagaaaattgcaggtgaactctatggacctctcatgctggtcttcactctggttgctatcctactccatgggatgaagactctgacactattatccgggaaggcaccctgatgggcncagccattggcacctgcttccgctactggctgggaatctcatccttcatttacttccttgcctaccctgtngcaacgcccaaatcaccntgctgcaaatnttngcnctgctggggctattgcctctttggggcattgcattgtccctgttc

SEQ ID NO: 2486 - DNA, 795 bp, Homo sapiens
  misc_feature (703)..(703): "n" may be a, t, c, g, other or unknown
  misc_feature (734)..(734): "n" may be a, t, c, g, other or unknown
  misc_feature (740)..(740): "n" may be a, t, c, g, other or unknown
  misc_feature (749)..(749): "n" may be a, t, c, g, other or unknown
  misc_feature (792)..(792): "n" may be a, t, c, g, other or unknown
tcagagattcgggcgcccattgttactgttggtgttaataacgatccagctgatgtaagaaagaaagaactcaagatggctgaaataaaagttaagcttatcgaagccaaagaagctttggaaaattgcattaccttacaggattttaatcgggcaccagaattaaaagaagaaataaaagcattagaagatgccagaataaaccttttgaaagagacagagcaacttgaaattaaagaagtccacatagagaagaatgatgctgaaacattgcagaaatgtcttattttgtgctatgaactgttgaagcagatgtccatttcaacaggcttaagtgcaaccatgaatggaatcatcgaatctttgattcttcctggaataataagtattcatcctgttgtaagaaacctggctgttttatgcttgggatgctgtggactacagaatcaggattttgcaaggaaacacttcgtattactattgcaggttttgcaaattgatgatgtcacaataaaaataagtgctttaaaggcaatctttgaccaactgatgacgttcgggattgaaccatttaaaactaaaaaaatcaaaacacttcattgtgaaggtacagaaataaacagtgatgatgagcaagaatcaaaagaagttgaagagactgctacagctaagaatgttctgaaactcctttctgatttcttanatagtgaagtatctgaacttaggactggganctgcanaaggactancccaagctgatgttctctgggcttttggtccgcagcaaggatnctt

SEQ ID NO: 2487 - DNA, 656 bp, Homo sapiens
  misc_feature (61)..(61): "n" may be a, t, c, g, other or unknown
  misc_feature (135)..(135): "n" may be a, t, c, g, other or unknown
  misc_feature (265)..(265): "n" may be a, t, c, g, other or unknown
  misc_feature (441)..(441): "n" may be a, t, c, g, other or unknown
  misc_feature (534)..(534): "n" may be a, t, c, g, other or unknown
  misc_feature (577)..(577): "n" may be a, t, c, g, other or unknown
  misc_feature (579)..(579): "n" may be a, t, c, g, other or unknown
  misc_feature (602)..(602): "n" may be a, t, c, g, other or unknown
  misc_feature (640)..(640): "n" may be a, t, c, g, other or unknown
  misc_feature (651)..(651): "n" may be a, t, c, g, other or unknown
ctctctgacgaaggactggaaggtggcggtggtgaaggtgcaggccgttggggcggctcanaggcaggtgactatgaaaggcttatatttccaacagagttccacaggatgaagaaataacatttgtatttcaanaaaaggaagatcttcctgttacagaggataactttgtgaaacttcaagttaaagcttgtgctctgagccagataaatacaaagcttctggcagaaatgaagatgaaaaaggatttatttcctgttggganagaaattgctggaattgtattagatgttggaagcaaggtaccattctttcaaccagatgatgaagtagttggaactttgcccctggactctgaagaccctggactttgtgaagttgttagagtacatgagcattacttggttcataaaccagaaaaggtcacatggacggaagcancaggaagcattcgggatggagtgcgtgcctatacagctctgcattatctttctcatctctctcctggaaaatcagtgctgataatggatggancaagtgcatttggtacaatagctattcagttagcacatcatanangagcccaaatgatttcaacagcntgcagccttgaagataagcagtgccttgaaagattcanacctcccatancccga

SEQ ID NO: 2488 - DNA, 892 bp, Homo sapiens
  misc_feature (85)..(85): "n" may be a, t, c, g, other or unknown
  misc_feature (537)..(537): "n" may be a, t, c, g, other or unknown
  misc_feature (600)..(600): "n" may be a, t, c, g, other or unknown
  misc_feature (619)..(619): "n" may be a, t, c, g, other or unknown
  misc_feature (659)..(659): "n" may be a, t, c, g, other or unknown
  misc_feature (666)..(666): "n" may be a, t, c, g, other or unknown
  misc_feature (680)..(680): "n" may be a, t, c, g, other or unknown
  misc_feature (728)..(728): "n" may be a, t, c, g, other or unknown
  misc_feature (786)..(786): "n" may be a, t, c, g, other or unknown
  misc_feature (807)..(807): "n" may be a, t, c, g, other or unknown
  misc_feature (810)..(810): "n" may be a, t, c, g, other or unknown
  misc_feature (852)..(852): "n" may be a, t, c, g, other or unknown
  misc_feature (862)..(862): "n" may be a, t, c, g, other or unknown
gcagctgagaaggagccagtcccagttccagtccaggaaatagagattgactccaccacagaattggatgggcatcaggaagtanagaaagtgcagcctccaggccctgtgaaggagatggcccatggttcacaggaggcagaagctccaggagcagttgctggtgctgctgaagtccctagggaaccaccaattcttcccaggattcaggagcagttccagaaaaatcccgacagttacaatggtgctgtccgagagaactacacctggtcacaggactatactgacctggaggtcagggtgccagtacccaagcacgtggtgaagggaaagcaggtctcagtggcccttagcagcagctccattcgtgtggccatgctggaggaaaatggggagcgcgtcctcatggaagggaagctcacccacaagatcaacactgagagttctctctggagtctcgagcccgggaagtgcgttttggtgaacctgagcaaggtgggcgagtattggtggaacgccatcctggagggagaagancccatcgacattgacaagatcaacaaggagcgctccatggccaccgtggatgaagaagaacangcggtgttggacaggcttncctttgactaccaccagaagctgcagggcaagccacaganccatganctgaaatccatganatgctgaaaaaagggtgggatgctgaaggtctcccttccgaaggccancgattcaccctgccatgttccacatctcccccgggggctgttgcagtttaatgaccanaaaggaaaggaaacctccccngtngggaagcaaaaccttatcctccggttgccttccttggctccntgcattccanggaattgctccctcttgttttacccctaac

SEQ ID NO: 2489 - DNA, 684 bp, Homo sapiens
  misc_feature (5)..(5): "n" may be a, t, c, g, other or unknown
  misc_feature (10)..(10): "n" may be a, t, c, g, other or unknown
  misc_feature (73)..(73): "n" may be a, t, c, g, other or unknown
  misc_feature (88)..(88): "n" may be a, t, c, g, other or unknown
  misc_feature (165)..(165): "n" may be a, t, c, g, other or unknown
  misc_feature (172)..(172): "n" may be a, t, c, g, other or unknown
  misc_feature (202)..(202): "n" may be a, t, c, g, other or unknown
  misc_feature (271)..(271): "n" may be a, t, c, g, other or unknown
  misc_feature (280)..(280): "n" may be a, t, c, g, other or unknown
  misc_feature (443)..(443): "n" may be a, t, c, g, other or unknown
  misc_feature (552)..(552): "n" may be a, t, c, g, other or unknown
  misc_feature (555)..(555): "n" may be a, t, c, g, other or unknown
  misc_feature (577)..(577): "n" may be a, t, c, g, other or unknown
  misc_feature (639)..(639): "n" may be a, t, c, g, other or unknown
  misc_feature (645)..(645): "n" may be a, t, c, g, other or unknown
  misc_feature (659)..(659): "n" may be a, t, c, g, other or unknown
  misc_feature (682)..(683): "n" may be a, t, c, g, other or unknown
agcancggcnacaggatggcaggcttcgcggcatctcgggctgtcatcgtggctcgtggaacaatgtcggcanctgggtttgaagaancccacgcccgtgcagctcggctgcatccccgccatcctggagggtcgagactgcttgggctgtgctaagacaggcantgggaanacagcagcgtttgtccttcccatcttgcanaagctgtctgaggatccctatggcatcttctgcctcgtcctgacacccaccagggagctggcctaccanatcgcacancggttccgggtcctggggaagcctctagggctgaaagactgcatcatcgtcggtggcatggacatggtggcccaggcgctggagctctctcggaaaccacacgtggtcatcgccacgccggggcgcctggcagatcacctgcgcagctccaacacttttagtntaaagaagatccgcttcctggtgatggatgaggcagaccggctgctggaacagggctgcactgacttcaccgtggacctggaagccatcctggcggctgtgccggcccncangcagacactgctgttcacgccncgctgaccgacacactccgggagctgcagggtctggccaccaaaccagcccttcttctgggnaagcanggccccggtgaacnccgttggaacaactggaaccaanng

SEQ ID NO: 2490 - DNA, 490 bp, Homo sapiens
  misc_feature (342)..(342): "n" may be a, t, c, g, other or unknown
  misc_feature (394)..(394): "n" may be a, t, c, g, other or unknown
  misc_feature (449)..(449): "n" may be a, t, c, g, other or unknown
  misc_feature (465)..(465): "n" may be a, t, c, g, other or unknown
  misc_feature (474)..(474): "n" may be a, t, c, g, other or unknown
  misc_feature (478)..(478): "n" may be a, t, c, g, other or unknown
agttgccgctgtcgtccgcagaacagttcctagcgcagaacgcgcccgccatgagggagatcgtgcacatccaggcgggccagtgcgggaaccaaatcggcaccaagttttgggaaatgatcagcgatgaacacggcatccacccggccggaggctacgtgggagactcggcgctgcagctggagagaatcaacgtctactacaatgagtcatcgtctcacgaaatatgtgcccacggccgccctggtggacttagaaccacgcaccatggacagcgtgcggtctgggccttttgggcagcttttccggcctgacaacttcatctttggccaaaccggtgcngggaacaactgggcgaaagggcctacacggaaggcgcggaactggtggaccnatgctggacgttgtgcggaaagatgcgaacactgcgactgcctgcagggcttccngctcacccactccctnggcggcggngccnggctctccgcgt

SEQ ID NO: 2491 - DNA, 585 bp, Homo sapiens
  misc_feature (83)..(83): "n" may be a, t, c, g, other or unknown
  misc_feature (98)..(98): "n" may be a, t, c, g, other or unknown
  misc_feature (100)..(100): "n" may be a, t, c, g, other or unknown
  misc_feature (319)..(319): "n" may be a, t, c, g, other or unknown
  misc_feature (342)..(342): "n" may be a, t, c, g, other or unknown
  misc_feature (360)..(360): "n" may be a, t, c, g, other or unknown
  misc_feature (362)..(362): "n" may be a, t, c, g, other or unknown
  misc_feature (430)..(430): "n" may be a, t, c, g, other or unknown
  misc_feature (490)..(490): "n" may be a, t, c, g, other or unknown
  misc_feature (516)..(516): "n" may be a, t, c, g, other or unknown
  misc_feature (558)..(558): "n" may be a, t, c, g, other or unknown
  misc_feature (570)..(570): "n" may be a, t, c, g, other or unknown
  misc_feature (583)..(583): "n" may be a, t, c, g, other or unknown
aggggaaatgttctaagcagagcccgtcaggagcccacgggacacattttggagatgacagatttgaagatctggaagaggcnaatccattctctttnanagagtttctgaagaccaataacctcggcctctcgaaagaggatccggccagcagaatttatgcaaaggaagcctcgaggcattccctgggacttgaccactactccccaccctcccaaaccggcgggtatggcctggagtatcagcagccatttttcgaggatccgacaggggctggtgacctcctggatgaggaggaggatgaggacaccggatggantggggcctacctgccgtccgccntcgagcagactcaccccnanagggtccctgccggcacgtcgccctgcagcacatacctttcctttttctccaccccgtcggaactggnagggcctgagtctctgccctcgtgggcgttgagtgacactgattctcgcgtgtctccggnctctccggcatggaatcctaccgcanactttgcggttcatggaagagtctctgggagacaggcacctncggacgctgcanataaattacgacnca

SEQ ID NO: 2492 - DNA, 646 bp, Homo sapiens
  misc_feature (611)..(611): "n" may be a, t, c, g, other or unknown
  misc_feature (617)..(617): "n" may be a, t, c, g, other or unknown
  misc_feature (627)..(627): "n" may be a, t, c, g, other or unknown
  misc_feature (638)..(639): "n" may be a, t, c, g, other or unknown
gatgcctacatcattgtgtctttcgtgaatgccaccctagtgttgtccattggagaaactgtagaagaagtgactgactctgggttcctggggaccaccccgaccttgtcctgctccttattaggagatgatgccttggtgcaggtctatccagatggcatccggcacatacgagcagacaagagagtcaatgagtggaagacccctggaaagaaaacaattgtgaagtgtgcagtgaaccagcgacaagtggtgattgccctgacaggaggagagctggtctatttcgagatggatccttcaggacagctgaatgagtacacagaacggaaggagatgtcagcagatgtggtgtgcatgagtctggccaatgtaccccctggagagcagcggtctcgcttcctggctgtggggcttgtggacaacactgtcagaaatcatctccctggatccctcagactgtttgcaacctctaagcatgcaggctctcccagcccagcctgaagtccttgtgtatcgtggaaatgggtgggactgagaagcaggatgagctggggtgagaagggctcgattggcttcctatacctgaatattgggctacagaacggggntggtgntgagggaacntttcccccccnnccccccc

SEQ ID NO: 2493 - DNA, 679 bp, Homo sapiens
  misc_feature (418)..(418): "n" may be a, t, c, g, other or unknown
  misc_feature (594)..(594): "n" may be a, t, c, g, other or unknown
  misc_feature (622)..(622): "n" may be a, t, c, g, other or unknown
  misc_feature (647)..(647): "n" may be a, t, c, g, other or unknown
  misc_feature (650)..(650): "n" may be a, t, c, g, other or unknown
  misc_feature (675)..(675): "n" may be a, t, c, g, other or unknown
ctcggcgtcgctctggactggcgcaggcgcaagccggcaagatggcggcggctggggctttccgtctgaggcgggcggcatcggctctgctgctgcggagcccccgcctgcccgcccgggagctgtcggccccggcccgactctatcacaagaaggtagggacaaaagaggggacgcgcggaatgccgactcagcggaggcctgggctggaggggcggccgcggggttctgcgcagctaggactgggagctgtcccctcccacgtctttgccctgactcgctttcccttgctgcgcagtgaggctcactgcaactgataaacaacagttaccgctcatcgggcggcgacttccagggggccccgccgctggccgcgacttcgtgcgtcccaattttaaattcgccaacagcccaggangcagggtcctgttgggacttgtctttctgagtccagggacagacacacccccggagcgggctccggcttcagccactccgctgcccttggccagatgaccttgggctagtcactgcgcctctctgaacctgtttcccaaggtgtaaatggggggctctcagctgtcccttacaaangatactgtgcgttggagtcctggcatcngttccccccccccatgttttttttnccnaagaaaattgttttcttgttactgnttta

SEQ ID NO: 2494 - DNA, 521 bp, Homo sapiens
  misc_feature (118)..(118): "n" may be a, t, c, g, other or unknown
  misc_feature (284)..(284): "n" may be a, t, c, g, other or unknown
  misc_feature (314)..(314): "n" may be a, t, c, g, other or unknown
  misc_feature (364)..(364): "n" may be a, t, c, g, other or unknown
  misc_feature (372)..(372): "n" may be a, t, c, g, other or unknown
  misc_feature (389)..(389): "n" may be a, t, c, g, other or unknown
  misc_feature (443)..(443): "n" may be a, t, c, g, other or unknown
  misc_feature (447)..(447): "n" may be a, t, c, g, other or unknown
  misc_feature (486)..(486): "n" may be a, t, c, g, other or unknown
  misc_feature (498)..(498): "n" may be a, t, c, g, other or unknown
  misc_feature (502)..(502): "n" may be a, t, c, g, other or unknown
gtgtgcggcggcggcggcggcggccgagggggatggagcgagcgccgagccgggtcagagttgaacaatgaccatagttgacaaagcttctgaatcttcagacccatcagcctatcanaatcagcctggcagctccgaggcagtctcacctggagacatggatgcaggttctgccagctggggtgctgtgtcttcattgaatgatgtgtcaaatcacacactttctttaggaccagtacctggtgctgtagtttattcgagttcatctgtacctgataaatcanaaccatcaccacaaaaggatcaagccctangtgatggcatcgctcctccacagaaagttcttttcccatctgagaagatntgtcttangtggcaacaaactcatngagttggagctgggctccagaatttgggcaatacctgttttgccaatgcacacngcantgtttaacctacacaccaccctcttgccaattacctgcnatcacatgaacncccncaaaatatgtcctgcacaa

SEQ ID NO: 2495 - DNA, 860 bp, Homo sapiens
  misc_feature (677)..(677): "n" may be a, t, c, g, other or unknown
  misc_feature (680)..(680): "n" may be a, t, c, g, other or unknown
  misc_feature (715)..(715): "n" may be a, t, c, g, other or unknown
  misc_feature (832)..(832): "n" may be a, t, c, g, other or unknown
  misc_feature (850)..(851): "n" may be a, t, c, g, other or unknown
cccaggctgcaacggaggcagagccaacgcctcgcgggcttccacgtacgcactccaacgcgtgttcccggagaagaacgcatccgggtcacgggagccggtgtctcaggctccgccccttcaccccccgaaatgctaatccccacttccgaccctctcaggccttttccgcttctcttttacctccccaggtccgcccgtctgcgcccctcacaggaagccggagggtcgctctgatcccgaatctcccacaggcgtgaacctgctctgctgtgtatctttgcggggtggcctgcgctgaggcctgccgcgcgcggtgagtccgcgcagacctgaccctgcgtctcgcagctcggttgaggccgccgccgccttctcgggatgccgcggccggggtccgcgcagcgctgggcggccgtcgcgggccgttgggggtgcaagctgctcgcactgctgctactggtgcctggacccggcggcgcctctgagatcaccttcgagcttcctgacaacgccaagcagtgcttctacgaagacatcgctcaaggcaccaagtgcaccctggaattccaggtgattactggtggtcactatgatgtagattgtcgattagaagatcctgatggtaaagtgttataccaaagagatgaagaaacagtatgatagttttaccttcncancctccaaaaatggggacatacaaattttgcttcancaatgaattttctactttcacacataaaaatgtatatttttgattttcaaattggaaaaaaaaccaaccttttgtttcctaattgaaaaaacgaattcattgctctttacccaaaantggaaatcttgccttgtnnttttccatt

SEQ ID NO: 2496 - DNA, 868 bp, Homo sapiens
  misc_feature (10)..(10): "n" may be a, t, c, g, other or unknown
  misc_feature (259)..(259): "n" may be a, t, c, g, other or unknown
  misc_feature (504)..(504): "n" may be a, t, c, g, other or unknown
  misc_feature (512)..(512): "n" may be a, t, c, g, other or unknown
  misc_feature (514)..(514): "n" may be a, t, c, g, other or unknown
  misc_feature (539)..(539): "n" may be a, t, c, g, other or unknown
  misc_feature (559)..(559): "n" may be a, t, c, g, other or unknown
  misc_feature (665)..(665): "n" may be a, t, c, g, other or unknown
  misc_feature (685)..(685): "n" may be a, t, c, g, other or unknown
  misc_feature (738)..(738): "n" may be a, t, c, g, other or unknown
  misc_feature (750)..(750): "n" may be a, t, c, g, other or unknown
  misc_feature (797)..(797): "n" may be a, t, c, g, other or unknown
  misc_feature (830)..(830): "n" may be a, t, c, g, other or unknown
  misc_feature (832)..(832): "n" may be a, t, c, g, other or unknown
  misc_feature (845)..(845): "n" may be a, t, c, g, other or unknown
  misc_feature (863)..(863): "n" may be a, t, c, g, other or unknown
atcacggggnagtctagggaaagggggaaagtcttccagcctgtgaactttaaccagattcctacttgtgcaagaagcagaagcacaatttgaagttaatagaagctttctcatggagaactttattccgtccctgagctcttctagcaagttgttttggagttgactacgcagtgacgacggagattacccagtcaactatttttgaacgctgaaagggaaaatcacctttaaattgaaaagataattttcagaaganatttgactgtattttgtgctcctcagcattcatgcaaaggtgttcgcggagtacagaaacggagtatgatgactggacttctctgttctctttcaggtttattaatgccagaagaagaatagtacagcccatgattgaccagtcaaatcgagcagtgagccaaggagcagcatatagtccagagggtcagcccatggggagctttgtgttggatggtcagcaacacatggggatccggcctgcangtttgcanancatgccaggggactacgtttctcanggtggtcctatgggaatgantatggcacagccaagttacactcctccccagatgacccacaccctactcaattaagacatggacccccaatgcattcatatttgccaagccatccccaccacccancccatgatgatgcacgggangacccctacccccctggaaatgactatgtcagcacagaacccccccaatgttnaaattctgttanatcccaatgtttggcggacaggtttatggacattccatgccccattnatttttaaggggaactccccgggggaaaaaggnanacccccccccaanaacttatttttaaaaaanttcct

SEQ ID NO: 2497 - DNA, 778 bp, Homo sapiens
  misc_feature (428)..(428): "n" may be a, t, c, g, other or unknown
  misc_feature (466)..(466): "n" may be a, t, c, g, other or unknown
  misc_feature (539)..(539): "n" may be a, t, c, g, other or unknown
  misc_feature (579)..(579): "n" may be a, t, c, g, other or unknown
  misc_feature (586)..(586): "n" may be a, t, c, g, other or unknown
  misc_feature (594)..(594): "n" may be a, t, c, g, other or unknown
  misc_feature (619)..(619): "n" may be a, t, c, g, other or unknown
  misc_feature (685)..(685): "n" may be a, t, c, g, other or unknown
  misc_feature (736)..(736): "n" may be a, t, c, g, other or unknown
  misc_feature (745)..(745): "n" may be a, t, c, g, other or unknown
  misc_feature (761)..(761): "n" may be a, t, c, g, other or unknown
  misc_feature (776)..(776): "n" may be a, t, c, g, other or unknown
agttgctgctgcaactgaggtacagcggcggtttctgaggttcttcactcgcgactgacggagctgcggtggcgtctccacacgatggacagatggatgacttggtgtgctttgaggaattgacagattaccagttggtctcccctgccaagaatccctccagtctcttctcaaaggaagcacccaagagaaaggcacaagctgtttcagaagaagaggaggaggaggagggaaagtctagctcaccaaagaaaaagatcaagttgaagaaaagtaaaaatgtagcaactgaaggaaccagtacccagaaagaatttgaagtgaaagatcctgagctggaggcccagggagatgacatggtttgtgatgatccggaggctggggagatgacatcagaaaacctggtccaaactgctccaaaaaagaanaaaaataaagggaaaaaagggttggagccttctcagancactgctgccaaggtgcccaaaaaagcgaagacatggattcctgaagttcatgatcagaaagcagatgtgtcngcttggaaggacctgtttgttcccaggccggttctccgancactcanctttctangcttctctgcacccacaccaatccnagccctgaccttggcacctgccatccgtgacaaactggacatccttggggctgctgaaacaggaantgggaaaactcttgccttttgccatcccaatgaattcatgcggtgtttgcnattggccanaaaaaagaaatgctgncccctccctcccaantt

SEQ ID NO: 2498 - DNA, 714 bp, Homo sapiens
  misc_feature (100)..(100): "n" may be a, t, c, g, other or unknown
  misc_feature (197)..(197): "n" may be a, t, c, g, other or unknown
  misc_feature (269)..(269): "n" may be a, t, c, g, other or unknown
  misc_feature (490)..(490): "n" may be a, t, c, g, other or unknown
  misc_feature (516)..(516): "n" may be a, t, c, g, other or unknown
  misc_feature (548)..(548): "n" may be a, t, c, g, other or unknown
  misc_feature (577)..(577): "n" may be a, t, c, g, other or unknown
  misc_feature (632)..(632): "n" may be a, t, c, g, other or unknown
  misc_feature (676)..(676): "n" may be a, t, c, g, other or unknown
  misc_feature (679)..(680): "n" may be a, t, c, g, other or unknown
  misc_feature (684)..(684): "n" may be a, t, c, g, other or unknown
gtgtcctgctcgctccatgttgccgcctctcccggtacctgctgctgctcccggggcttcgggaaatgcgagagtctgagccggggaggaggaacccgancagcggcggcggcggccgcggcggcgggagccccccaagaggaggaccgggatccatgtgtctttcctggtgactaggatgtcgtcggaggagaacnagtgcgtggagcagccgcagccaccaccccccgaggagcctggagccccggccccgagccccccagccgcanacaaaagacctcggggccggcctcgcaaggcgcttcccctttccagagagccagaaagaaactatttggagttttcctggtcttactggatgtcactctcgtccttgccgacctaattttcactgacagcaaactttatattccttcggagtatcgttctatttctctagctattgccttattttttctcatggatgttcttcttcgagtatttgtagaangctcatccacaccgctcagcacgaangccttgttctcaggggcctgcttctcaatgangcggatctgctttgaggttggcatggggnccaatgccaaccgggatcccgatgaccttcttcttcttcaggccctggacgttancggacaaattcccggggacatccgttggggctcctggctggccntcnngaancagggcgattcgggaaagggcttccagggg

SEQ ID NO: 2499 - DNA, 596 bp, Homo sapiens
  misc_feature (12)..(12): "n" may be a, t, c, g, other or unknown
  misc_feature (507)..(507): "n" may be a, t, c, g, other or unknown
  misc_feature (515)..(515): "n" may be a, t, c, g, other or unknown
  misc_feature (546)..(546): "n" may be a, t, c, g, other or unknown
  misc_feature (561)..(561): "n" may be a, t, c, g, other or unknown
  misc_feature (588)..(588): "n" may be a, t, c, g, other or unknown
gatctatttccngtaccagatcatcatgaccatgatcgtccataagaactgggtggacctggcctgggccgtcagctactacatccggttcttcatcacctacatccctttctacggcatcctgggagccctccttttcctcaacttcatcaggttcctggagagccactggtttgtgtgggtcacacagatgaatcacatcgtcatggagattgaccaggaggcctaccgtgactggttcagtagccagctgacagccacctgcaacgtggagcagtccttcttcaacgactggttcagtggacaccttagcttgcagattgagcaccacctcttccccaccatgccccggcacaacttacacaagatcgccccgctggtgaagtctctatgtgccaagcatggcattgaataccaggagaagccgctactgagggccctgctggacatcatcaggtccctgaagaagtctgggaagctgtggctggacgcctaccttcacaaatnaagccacngcccccgggacactgtggggaaagggtgcangtggggtgatggccncaaggaatgatgggcctttgttctgangggtgtcc

SEQ ID NO: 2500 - DNA, 651 bp, Homo sapiens
  misc_feature (8)..(8): "n" may be a, t, c, g, other or unknown
  misc_feature (11)..(11): "n" may be a, t, c, g, other or unknown
  misc_feature (14)..(14): "n" may be a, t, c, g, other or unknown
  misc_feature (459)..(459): "n" may be a, t, c, g, other or unknown
  misc_feature (472)..(472): "n" may be a, t, c, g, other or unknown
  misc_feature (474)..(474): "n" may be a, t, c, g, other or unknown
  misc_feature (490)..(490): "n" may be a, t, c, g, other or unknown
  misc_feature (498)..(498): "n" may be a, t, c, g, other or unknown
  misc_feature (590)..(590): "n" may be a, t, c, g, other or unknown
  misc_feature (600)..(600): "n" may be a, t, c, g, other or unknown
  misc_feature (609)..(609): "n" may be a, t, c, g, other or unknown
  misc_feature (613)..(613): "n" may be a, t, c, g, other or unknown
  misc_feature (642)..(642): "n" may be a, t, c, g, other or unknown
aacgccancantcnccaccgtcgctgccgccgccaccgccctcggccgctgccgaagcctcctgcagccatcatgtccgccagcgccgtctacgtgctggacctgaagggcaaggtgctcatctgccggaactaccgtggcgacgtggacatgtcagaggtggagcacttcatgcccatcctgatggagaaggaggaggaggggatgctgtcgcccatcctggcccacgggggggtccgtttcatgtggatcaaacacaacaacctgtatctggttgccacatccaagaagaacgcgtgcgtgtcgctggtcttttctttcctctataaggtggtgcaggtgttttccgagtacttcaaggagctggaggaggagaacatccgggacaactttgttatcatctacgagctgctggacgagctcatggacttcggctacccccagaccaccgacagcaanatcctgcaggaantncatcactccaggaaangccacaanctggaaaacaggggccccgcggccaccacccacccgtcaccaacgcggtgtccttggcggtccgaaggcatcaagttatccgaagaaatgangttgttcttnggaacgtcntccnaattctgttcaaccctcttggtcaacccncccaaccgg

SEQ ID NO: 2501 - DNA, 808 bp, Homo sapiens
  misc_feature (132)..(132): "n" may be a, t, c, g, other or unknown
  misc_feature (213)..(213): "n" may be a, t, c, g, other or unknown
  misc_feature (291)..(291): "n" may be a, t, c, g, other or unknown
  misc_feature (330)..(330): "n" may be a, t, c, g, other or unknown
  misc_feature (357)..(357): "n" may be a, t, c, g, other or unknown
  misc_feature (373)..(373): "n" may be a, t, c, g, other or unknown
  misc_feature (443)..(443): "n" may be a, t, c, g, other or unknown
  misc_feature (513)..(513): "n" may be a, t, c, g, other or unknown
  misc_feature (616)..(616): "n" may be a, t, c, g, other or unknown
  misc_feature (659)..(659): "n" may be a, t, c, g, other or unknown
  misc_feature (717)..(717): "n" may be a, t, c, g, other or unknown
  misc_feature (720)..(720): "n" may be a, t, c, g, other or unknown
  misc_feature (769)..(769): "n" may be a, t, c, g, other or unknown
  misc_feature (788)..(788): "n" may be a, t, c, g, other or unknown
  misc_feature (797)..(797): "n" may be a, t, c, g, other or unknown
aaaaaaaaaaaaaaaataaagactattactaaggctgcacctgctgcccctccagtcccagctgccaatgaaattgccaccaacaagcccaaaataacttggcaggctttaaacctgccagtcattacccanatcagccaggctttacctaccactgaggtaaccaatactcaggcttcttcagtcactgctcagcctaaaaaagccaacaanatgaaaaaagttactgccaaggcagcccaaggctcccaatccccaactggccatgagggtggcactatacagctgaantcacccttgcaggtcctaaagctaccagtcatctcacanaatattcacgctccaattgccaatgantcagccagttcccaanccttgataacctctatcaagcctaaaaaagcttccaaggctaaaaaggctgcaaataaggccatagctantgccaccgaggtctcgctggctgcaactgccacccatacagctaccacccaaggccaaattaccaatganacagccagtatccacaccacagcagcctccatccgaaccaagaaagcctccaaagccaggaaaacaattgctaaggtcataaatactgacactgagcatatanaagctctaaatgtcactgacgcagctaccaagcaaattgaagnctcagtaatggctatcaggcccaaaaaatccaagggcaaaaaggctgccaacaagggnccnaattctgtctctgaaattctgaagccccacttgccactccaaatattcncaaaccaagccctgggcancaccctgcnggtcaaaaaaa

SEQ ID NO: 2502 - DNA, 460 bp, Homo sapiens
  misc_feature (304)..(304): "n" may be a, t, c, g, other or unknown
  misc_feature (314)..(314): "n" may be a, t, c, g, other or unknown
  misc_feature (372)..(372): "n" may be a, t, c, g, other or unknown
  misc_feature (406)..(406): "n" may be a, t, c, g, other or unknown
  misc_feature (448)..(448): "n" may be a, t, c, g, other or unknown
  misc_feature (450)..(450): "n" may be a, t, c, g, other or unknown
  misc_feature (459)..(459): "n" may be a, t, c, g, other or unknown
agacaatgagggagagtctccgccgaccgcctgctgcttattgttccgggactggagactgcagccggctgctgcctagtcctccggggctccgctcctgactagctcctccgtccctctagggacggttcggggtcacctaaccctggtccccggggcgctgggacgctagccccaagccgcagccgctcttcgctgaccgccctctttctgctttgcaggtcggcagcttcactcccgagggtgccgcgagcccaggcggcgaacacccggtacccctggcgcagcgaggtgggatgctgtncggacagcancgctaagtgcccccccacccccggcgcagggtgcactcgctcctggccgcgggcccancggcggcggcggcggcggcggcggaagggattancccgggacgcgcgaagcgcctgcctcaagctaccgcccggananggacccgant

SEQ ID NO: 2503 - DNA, 439 bp, Homo sapiens
  misc_feature (372)..(372): "n" may be a, t, c, g, other or unknown
  misc_feature (407)..(407): "n" may be a, t, c, g, other or unknown
  misc_feature (410)..(410): "n" may be a, t, c, g, other or unknown
  misc_feature (429)..(429): "n" may be a, t, c, g, other or unknown
  misc_feature (433)..(433): "n" may be a, t, c, g, other or unknown
tactaataccagctgtaatcccagctacttgggaggctgaggcagaagaatcgcttgaacccgggaggcggaggttgagcaactacactgcgctgcatcggactcgacgcccgctggtgacgcacacgctgcgccggaagtgtgaactgtctgcctccaggctttgtcatggcggctgctgctgcacgctggaaccatgtgtgggtcggcaccgaaactgggatcttgaaaggggtaaatcttcagcgaaaacaggcggcgaacctcacggccggaggacagccgcggcgcgaggaagcagtgagcgccctgtgttggggcaccggcggcgaaacccacatgctggtgggctgcgcggacaggacggtgaancacttcagcaccgaggatggcatattccagggtcnganacactgcccgggcgggganggcntgttcc

SEQ ID NO: 2504 - DNA, 928 bp, Homo sapiens
  misc_feature (74)..(74): "n" may be a, t, c, g, other or unknown
  misc_feature (157)..(157): "n" may be a, t, c, g, other or unknown
  misc_feature (314)..(314): "n" may be a, t, c, g, other or unknown
  misc_feature (442)..(442): "n" may be a, t, c, g, other or unknown
  misc_feature (496)..(496): "n" may be a, t, c, g, other or unknown
  misc_feature (505)..(505): "n" may be a, t, c, g, other or unknown
  misc_feature (639)..(639): "n" may be a, t, c, g, other or unknown
  misc_feature (753)..(753): "n" may be a, t, c, g, other or unknown
  misc_feature (757)..(757): "n" may be a, t, c, g, other or unknown
  misc_feature (805)..(805): "n" may be a, t, c, g, other or unknown
  misc_feature (845)..(845): "n" may be a, t, c, g, other or unknown
  misc_feature (868)..(868): "n" may be a, t, c, g, other or unknown
  misc_feature (877)..(877): "n" may be a, t, c, g, other or unknown
cggcggcgctcccatggcgcacattaccattaaccagtacctgcagcaggtgtacgaagccatcgacagcaganatggagcatcttgtgcagagttggtgtcttttaaacatcctcatgttgcaaacccacgacttcaaatggcctctccagagganaagtgtcaacaagtcttggaacccccttatgatgaaatgtttgcagctcatttaaggtgcacttatgcagtggggaatcatgacttcatagaggcatacaagtgccagaccgtgatagtccaatcattcttgcgagcattccaggcccacaaagaanaaaactgggctctgcctgtcatgtatgcagtagcgcttgaccttcgagtgtttgccaataatgcagatcaacagttggtaaagaaaggaaaaagcaaagttggggacatgttggaaaaagcagcaaanttactgatgagctgtttccgggtctgtgccagcgacacccgtgctggtatagangactctaanaagtggggcatgctgtttctggtgaaccagctgtttaaaatctacatcaagatcaacaaactccatttatgtaaacccctaattagagcaattgacagctcaaacctgaaagacgattacagcactgcacaganaataacatacaaatactacgttggacgcaaggctatgtttgacagccgattttaagcaagctgaagaatacctgtcatttgcctttgaaacattgtcaccgttctagtccgaanaacnaaaggatgattctgatctattgcttccaattaaaatgctattgggtcncatgcccctgtggaactcctgaaaaaatttccctgatgcnatttgcggaaattacccaaactnttaaccaanggcaacctgctcttctgcccaaggccttggcaaaaccacaaggcctcctcc

SEQ ID NO: 2505 - DNA, 659 bp, Homo sapiens
  misc_feature (111)..(111): "n" may be a, t, c, g, other or unknown
  misc_feature (135)..(135): "n" may be a, t, c, g, other or unknown
  misc_feature (157)..(157): "n" may be a, t, c, g, other or unknown
  misc_feature (554)..(554): "n" may be a, t, c, g, other or unknown
  misc_feature (592)..(592): "n" may be a, t, c, g, other or unknown
  misc_feature (624)..(624): "n" may be a, t, c, g, other or unknown
  misc_feature (648)..(648): "n" may be a, t, c, g, other or unknown
  misc_feature (653)..(653): "n" may be a, t, c, g, other or unknown
  misc_feature (655)..(655): "n" may be a, t, c, g, other or unknown
acctgcaggctcttctcccgccgcggcccggcgctctccgagtcgcccctgcggactggtctcgcacagtgcctgggcaccgggcgccagacagacactggccatgacgancggcgcaaccaggtaccggctganctgctcgctccggggccacganctggacgtacggggcctggtgtgctgcgcctatccgccgggagcctttgtgtccgtgtcccgagaccgcaccacccgcctctgggccccagacagtccaaacaggagctttacagaaatgcactgtatgagtggccattccaattttgtatcttgtgtatgcatcataccctcaagtgacatctaccctcatggcctaattgccaccggtggaaatgaccacaatatatgcattttctcactggacagtccaatgccactttatattctaaaaggccacaaaaatactgtttgtagtctatcatctggaaaatttgggacattacttagtggttcatgggacaccactgctaaagtctggctgaatgacaagtgcatgatgaccttgcagggtcatncagctgcagtgtgggcggtaaagatcttacctgaacanggcttaatgttgactggatcagcagacaagantgttaaactgtggaaagctggaanatgtnanaaga

SEQ ID NO: 2506 - DNA, 451 bp, Homo sapiens
  misc_feature (79)..(79): "n" may be a, t, c, g, other or unknown
  misc_feature (117)..(117): "n" may be a, t, c, g, other or unknown
  misc_feature (120)..(120): "n" may be a, t, c, g, other or unknown
  misc_feature (171)..(171): "n" may be a, t, c, g, other or unknown
  misc_feature (297)..(297): "n" may be a, t, c, g, other or unknown
  misc_feature (358)..(358): "n" may be a, t, c, g, other or unknown
  misc_feature (383)..(383): "n" may be a, t, c, g, other or unknown
  misc_feature (396)..(396): "n" may be a, t, c, g, other or unknown
  misc_feature (412)..(412): "n" may be a, t, c, g, other or unknown
  misc_feature (414)..(414): "n" may be a, t, c, g, other or unknown
aactgcgggcggcgcagggcaggggcagtcagggagcagcggcggcagaaacagggccgggcgggcgccgcctgcgganagcaccgggaggcgggccctgcgtggggccgcgcgcancancggcgacgactttatctgggccgcgggggacagcgcagggccatggaggangcggccgcagctccgatttctccgtggacgatggcagccacgattcaggccatggagaggaagattgaatcgcaggctgctcacctgctttccctagaaggtcaaaccgggatggccgaaaaaaanctggctgattgcgaaaagacagccgtggagttcgggaaccagctggagggcaagtgggccntgctggggaccctgctgcaggagtncgggctgctgcanaagcggctggagaacntngagaacctgctgcacaacaggaacctctggatcctgc

SEQ ID NO: 2507 - DNA, 827 bp, Homo sapiens
  misc_feature (205)..(205): "n" may be a, t, c, g, other or unknown
  misc_feature (449)..(449): "n" may be a, t, c, g, other or unknown
  misc_feature (451)..(451): "n" may be a, t, c, g, other or unknown
  misc_feature (592)..(592): "n" may be a, t, c, g, other or unknown
  misc_feature (636)..(636): "n" may be a, t, c, g, other or unknown
  misc_feature (670)..(670): "n" may be a, t, c, g, other or unknown
  misc_feature (689)..(689): "n" may be a, t, c, g, other or unknown
  misc_feature (713)..(713): "n" may be a, t, c, g, other or unknown
  misc_feature (752)..(752): "n" may be a, t, c, g, other or unknown
  misc_feature (776)..(776): "n" may be a, t, c, g, other or unknown
  misc_feature (801)..(801): "n" may be a, t, c, g, other or unknown
  misc_feature (806)..(806): "n" may be a, t, c, g, other or unknown
  misc_feature (822)..(822): "n" may be a, t, c, g, other or unknown
atcgttttctctcgtgcaatggcgtccgggctggtaagattgctgcagcaggggacatcgctgcctcctggctccagtcgcccccaagctggtccctccggttcggggagtgaagaagggattccgcgccgccttccgcttccagaaggagttagagcggcagcgccttctgcggtgcccgccgccgcccgtgcgccgttcaganaagccgaactgggattaccatgcagaaatacaagcttttggacatcggttacaggaaaacttttccttagatcttctcaaaactgcttttgttaatagctgctatattaaaagtgaggaggccaaacgccaacaacttgggatagagaaagaagctgttcttctgaatcttaaaagtaatcaagaactatccgaacaagggacatctttttcacagacttgccttacacagtttcttgaagacnantacccagacatgcccactgaaggcataaaaaatcttgttgactttctcactggtgaggaagtcgtgtgtcacgtggctagaaacttggctgtggagcagttaacactgagtgaagaattcccagtgcccccagctgtgttncagcagactttctttgcagttattggagccctgttacagaacantggacctgaaaaggactgcacttttcatcagggnacttcttaattactccaantgaatgggaaaagaactctttganatgtggaaaaaaaataaatcccatgggggctattggttnaaaaaacttgaaaaaaaaggaatntttccacctccctgaatccaaaaantttcntaaggcctttcttggntggcc

SEQ ID NO: 2508 - DNA, 501 bp, Homo sapiens
  misc_feature (121)..(121): "n" may be a, t, c, g, other or unknown
  misc_feature (177)..(177): "n" may be a, t, c, g, other or unknown
  misc_feature (263)..(263): "n" may be a, t, c, g, other or unknown
  misc_feature (274)..(274): "n" may be a, t, c, g, other or unknown
  misc_feature (295)..(295): "n" may be a, t, c, g, other or unknown
  misc_feature (300)..(300): "n" may be a, t, c, g, other or unknown
  misc_feature (372)..(372): "n" may be a, t, c, g, other or unknown
  misc_feature (446)..(446): "n" may be a, t, c, g, other or unknown
  misc_feature (448)..(448): "n" may be a, t, c, g, other or unknown
  misc_feature (490)..(490): "n" may be a, t, c, g, other or unknown
  misc_feature (494)..(494): "n" may be a, t, c, g, other or unknown
  misc_feature (501)..(501): "n" may be a, t, c, g, other or unknown
agctgctgccgccgcagttgcgaatgcagcatcggcgcttagctgcctccgcggtgcagctaaggttcgtgtcgctaccccttggcccttcgctcttgctgccttaaccccgccggtggancccgctcttctggcctgttgagcccgctccctcactgccacacagcaagttccganaccatggattcgggcagcagcagcagcgactcggcgcccgattgctgggaccaggtggacatggaatccccggggttggccccgancggggatggantctcctctgcggtggccgaancccancgcgagccctcagctcggctttcagccgtaagctcaacgtcaacgccaagcccttcgtgcctaacgtacacnccgcggaattcgtgccgtccttcctgcgggggccgaatcaaccgcccacctcccgggcgggtccgggagcaacnantaaacctgcacccgcgcgggattacctccaagttaaaagatnggancgggggn

SEQ ID NO: 2509 - DNA, 662 bp, Homo sapiens
  misc_feature (7)..(7): "n" may be a, t, c, g, other or unknown
  misc_feature (17)..(17): "n" may be a, t, c, g, other or unknown
  misc_feature (129)..(129): "n" may be a, t, c, g, other or unknown
  misc_feature (273)..(273): "n" may be a, t, c, g, other or unknown
  misc_feature (409)..(409): "n" may be a, t, c, g, other or unknown
  misc_feature (444)..(444): "n" may be a, t, c, g, other or unknown
  misc_feature (489)..(489): "n" may be a, t, c, g, other or unknown
  misc_feature (603)..(603): "n" may be a, t, c, g, other or unknown
  misc_feature (606)..(606): "n" may be a, t, c, g, other or unknown
  misc_feature (616)..(616): "n" may be a, t, c, g, other or unknown
  misc_feature (628)..(628): "n" may be a, t, c, g, other or unknown
  misc_feature (660)..(660): "n" may be a, t, c, g, other or unknown
tagcganggacgcgtangtgtcttcataagatgccggggcagcggcgcgcgctttcccccaagatggcgtccatgcgggagagcgacacgggcctgtggctgcacaacaagctgggggccacggacganctgtgggcgccgcccagcatcgcgtccctgctcacggccgcggtcatcgacaacatccgtctctgcttccatggcctctcgtcggcagtgaagctcaagttgctactcgggacgctgcacctcccgcgccgcacggtggacganatgaggggcgccctaatggagatcatccagctcgccagcctcgactcggacccctgggtgctcatggtcgccgacatcttgaagtcctttccggacacaggctcgcttaacctggagctggaggagcagaatcccnacgttcaggatattttgggagaacttagagaaaangtgggtgagtgtgaaacgtctgccatgctgccactggagtgccantacttgaaacaaaaacgccctgacgaccctcgcggggaccctcactcccccggtgaagcattttcagttaaagcggaaacccaagaacgccacgctgcgggcggactgctgcanaantccacggganaccgcccagcanttgaaacggaacgcccgggtgccccttccacncc

SEQ ID NO: 2510 - DNA, 581 bp, Homo sapiens
  misc_feature (12)..(12): "n" may be a, t, c, g, other or unknown
  misc_feature (537)..(537): "n" may be a, t, c, g, other or unknown
  misc_feature (552)..(552): "n" may be a, t, c, g, other or unknown
  misc_feature (556)..(556): "n" may be a, t, c, g, other or unknown
  misc_feature (560)..(560): "n" may be a, t, c, g, other or unknown
  misc_feature (577)..(577): "n" may be a, t, c, g, other or unknown
acgtggattcancgcgatgcccaaatccaagcgcgacaagaaagtctccttaaccaaaactgccaaggaaaggcttggaattgaaacaaaacctgatagaagagcttcggaaatgtgtggacacctacaagtaccttttcatcttctctgtggccaacatgaggaacagcaagctgaaggacatccggaacgcctggaagcacagccggatgttctttggcaaaaacaaggtgatgatggtggccttgggtcggagcccatctgatgaatacaaagacaacctgcaccaggtcagcaaaaggttgaggggtgaggtgggtctcctgttcaccaaccgcacaaaggaggaggtgaatgagtggttcacgaaatacacagaaatggactacgcccgagctggtaacaaagcagctttcactgtgagcctggatccagggcccctggagcagttcccccactccatggagccacagctcaggcagctgggcctgcccaccgccctcaagagaggtgtggtgactctgctgtctgactacnaaggtgtgcaagganggcnatgntgctgaccccagagcangctc

SEQ ID NO: 2511 - DNA, 648 bp, Homo sapiens
  misc_feature (227)..(227): "n" may be a, t, c, g, other or unknown
  misc_feature (271)..(271): "n" may be a, t, c, g, other or unknown
  misc_feature (279)..(279): "n" may be a, t, c, g, other or unknown
  misc_feature (329)..(329): "n" may be a, t, c, g, other or unknown
  misc_feature (381)..(381): "n" may be a, t, c, g, other or unknown
  misc_feature (392)..(392): "n" may be a, t, c, g, other or unknown
  misc_feature (450)..(450): "n" may be a, t, c, g, other or unknown
  misc_feature (497)..(497): "n" may be a, t, c, g, other or unknown
  misc_feature (512)..(512): "n" may be a, t, c, g, other or unknown
  misc_feature (536)..(536): "n" may be a, t, c, g, other or unknown
  misc_feature (594)..(594): "n" may be a, t, c, g, other or unknown
  misc_feature (596)..(596): "n" may be a, t, c, g, other or unknown
  misc_feature (615)..(615): "n" may be a, t, c, g, other or unknown
  misc_feature (638)..(638): "n" may be a, t, c, g, other or unknown
  misc_feature (643)..(643): "n" may be a, t, c, g, other or unknown
acattgcagccttctgcaaggatggggtggtactgtccttctcacttctcattctcttccattttaaaatgataaacctgggtcagaggatatttaggaagaggcattgtcattaagtccaagacaagatggtcagatttgttatcctagtgggttacaatccaaaatactctggagcatgctgagattaaggtggttgccaagggaacagaaaacagccatgagtnaataaatcaagactttaaaggatttagatcgggtctatggccanttgcagantgggcaggatcttaagacccgataggtgcagaacccatctggacacgganaccaggaatggagttccatggaggcctggctggcactgcacccgggcatgangacacatccantaagaagacctgcctcaagaggtgcactgcggtgaccagtggaggtgactggttggancctggaattggaagcagattccaagctctggtggacaaactctccangcctggtgggaatcncagctggggcagacctcatcctgnctgcctggccacaagcccccactctctgccactggtggtagaccatgcctgtgtggananctggcttctctgctccccncctggtcccccacttggctaganttcanaaaca

SEQ ID NO: 2512 - DNA, 711 bp, Homo sapiens
  misc_feature (524)..(524): "n" may be a, t, c, g, other or unknown
  misc_feature (624)..(624): "n" may be a, t, c, g, other or unknown
  misc_feature (626)..(626): "n" may be a, t, c, g, other or unknown
  misc_feature (650)..(650): "n" may be a, t, c, g, other or unknown
  misc_feature (658)..(658): "n" may be a, t, c, g, other or unknown
  misc_feature (705)..(705): "n" may be a, t, c, g, other or unknown
gctgcggggagcgccgcgcaggccgtgcagttcctagcgaggaggcgccgccgccattgccgctctctcggtgagcgcagccccgctctccgggccgggccttcgcgggccaccggcgccatgggccagtgcggcatcacctcctccaagaccgtgctggtctttctcaacctcatcttctggggggcagctggcattttatgctatgtgggagcctatgtcttcatcacttatgatgactatgaccacttctttgaagatgtgtacacgctcatccctgctgtagtgatcatagctgtaggagccctgcttttcatcattgggctaattggctgctgtgccacaatccgggaaagtcgctgtggacttgccacgtttgtcatcatcctgctcttggtttttgtcacagaagttgttgtagtggttttgggatatgtttacagagcaaaggtggaaaatgaggttgatcgcagcattcagaaagtgtataagacctacaatggaaccaaccctgatgctgctanccgggctattgattatgtacagagacagctgcattgttgtggaattcacaactactcagactgggaaaatacagattggttcaaagaaaccaaaaaccanantgtcctcttagctgctgcagaaanactgccancaattgttatggcaagcctggccccacccttccgaactctatgcttnaagggt

SEQ ID NO: 2513 - DNA, 794 bp, Homo sapiens
  misc_feature (631)..(631): "n" may be a, t, c, g, other or unknown
  misc_feature (636)..(636): "n" may be a, t, c, g, other or unknown
  misc_feature (638)..(638): "n" may be a, t, c, g, other or unknown
  misc_feature (664)..(664): "n" may be a, t, c, g, other or unknown
  misc_feature (729)..(729): "n" may be a, t, c, g, other or unknown
  misc_feature (750)..(750): "n" may be a, t, c, g, other or unknown
  misc_feature (764)..(764): "n" may be a, t, c, g, other or unknown
  misc_feature (791)..(791): "n" may be a, t, c, g, other or unknown
  misc_feature (793)..(793): "n" may be a, t, c, g, other or unknown
acaaattccagccttctgtggtcgctgcggcctgtgttggggcctccaggatttgcctgcagctttctccctactggaccagagacctgcagaggatctcaagctattccctggagcacctcagcacgtgtattgaaatcctgctggtagtgtatgacaacgtcctcaaggatgccgtagccgtcaagagccaggccttggcaatggtgcccggcacaccccccacccccactcaagtgctgttccagccaccagcctacccggccctcggccagccagcgaccaccctggcacagttccagacccccgtgcaggacctatgcttggcctatcgggactccttgcaggcccaccgttcagggagcctgctctcggggagtacaggctcatccctccacaccccgtaccaaccgctgcagcccttggatatgtgtcccgtgcccgtccctgcatcccttagcatgcatatggccattgcagctgagcccaggcactgcctcgccaccacctatggaagcagctacttcagtgggagccacatgttccccaccggctgctttgacagataggccacctccagacctcacgaagaaccttgggagatgtgggcagaaggaagaagacactgaanaagananctcaccaagtgaggcagcaggaaggncatccctgaaaaaccttggaacgtgggaaggtctgtgctccttttaaaataaaactgacccagancaaaacattccattaacatanctccacccgaaaancattcctcctgaaaaacgttctggccncnt

SEQ ID NO: 2514 - DNA, 680 bp, Homo sapiens
  misc_feature (125)..(125): "n" may be a, t, c, g, other or unknown
  misc_feature (416)..(416): "n" may be a, t, c, g, other or unknown
  misc_feature (468)..(468): "n" may be a, t, c, g, other or unknown
  misc_feature (553)..(553): "n" may be a, t, c, g, other or unknown
  misc_feature (627)..(627): "n" may be a, t, c, g, other or unknown
  misc_feature (661)..(661): "n" may be a, t, c, g, other or unknown
  misc_feature (663)..(663): "n" may be a, t, c, g, other or unknown
  misc_feature (670)..(670): "n" may be a, t, c, g, other or unknown
  misc_feature (672)..(672): "n" may be a, t, c, g, other or unknown
acgtccggggaggggccaggtgagcggcagacccggcacgcaggtgggggccggcggggtccgtggccagagctgcagagagacaaggcggcggcggctgctgtgctgggtgcagtgaggaagangccctcggtggtgcccatggctggccaggatcctgcgctgagcacgagtcacccgttctacgacgtggccagacatggcattctgcaggtggcaggggatgaccgctttggaagacgtgttgtcacgttcagctgctgccggatgccgccctcccacgagctggaccaccagcggctgctggagtatttgaagtacacactggaccaatacgttgagaacgattataccatcgtctatttccactacgggctgaacagccggaacaagccttccctgggctggctccagancgcatacaaggaagttcgataggaaagacggggatctcactatgtggcccangctggtctcgaactccaagctcaagcgatcctcccacctcagcctcccaaagtactgggattacaggtacaagaagaacttgaangccctctacgtggtgcacccaccagcttcatcaaggtcctgtggaacatcttgaaacccctcatcagtcacaantttgggaaaaaaatctctatttcaactacctgantnaactccncnaacacctt

SEQ ID NO: 2515 - DNA, 700 bp, Homo sapiens
  misc_feature (616)..(616): "n" may be a, t, c, g, other or unknown
  misc_feature (633)..(633): "n" may be a, t, c, g, other or unknown
  misc_feature (655)..(655): "n" may be a, t, c, g, other or unknown
  misc_feature (672)..(672): "n" may be a, t, c, g, other or unknown
  misc_feature (695)..(695): "n" may be a, t, c, g, other or unknown
aaaaaaaagcccgagtgcagccgccgggcgcaggatgggatccggctcctccagctaccggcccaaggccatctacctggacatcgatggacgcattcagaaggtaatcttcagcaagtactgcaactccagcgacatcatggacctgttctgcatcgccaccggcctgcctcggaacacgaccatctccctgctgaccaccgacgacgccatggtctccatcgaccccaccatgcccgcgaattcagaacgcactccgtacaaagtgagacctgtggccatcaagcaactctccgagagagaagaattaatccagagcgtgctggcgcaggttgcagagcagttctcaagagcattcaaaatcaatgaactgaaagctgaagttgcaaatcacttggctgtcctagagaaacgcgtggaattggaaggactaaaagtggtggagattgagaaatgcaagagtgacattaagaagatgagggaggagctggcggccggaagcagcaggaccaactgcccctgtaagtacagttttttggataaccacaagaagttgactcctcgacgcgatgttcccacttaccccaagtacctgctctctccagagaccatcgangccctgcggaagccganctttgacgtctggctttgggancccaatgagatgctganctgcctggaacacatgttccacnaactc

SEQ ID NO: 2516 - DNA, 748 bp, Homo sapiens
  misc_feature (148)..(148): "n" may be a, t, c, g, other or unknown
  misc_feature (384)..(384): "n" may be a, t, c, g, other or unknown
  misc_feature (387)..(387): "n" may be a, t, c, g, other or unknown
  misc_feature (594)..(594): "n" may be a, t, c, g, other or unknown
  misc_feature (630)..(630): "n" may be a, t, c, g, other or unknown
  misc_feature (663)..(663): "n" may be a, t, c, g, other or unknown
  misc_feature (669)..(669): "n" may be a, t, c, g, other or unknown
  misc_feature (672)..(672): "n" may be a, t, c, g, other or unknown
  misc_feature (698)..(698): "n" may be a, t, c, g, other or unknown
  misc_feature (746)..(746): "n" may be a, t, c, g, other or unknown
tttgcaggctgctgggctggggctaagggctgctcagtttccttcagcggggcactgggaagcgccatggcactgcagggcatctcggtcatggaactgtccggcctggccccgggcccgttctgtgctatggtcctggctgacttcngggcgcgtgtggtacgcgtggaccggcccggctcccgctacgacgtgagccgcttgggccggggcaagcgctcgctagtgctggacctgaagcagccgcggggagccgccgtgctgcggcgtctgtgcaagcggtcggatgtgctgctggagcccttccgccgcggtgtcatggagaaactccagctgggcccagagattctgcagcgggaaaatccaaggcttatttatgccagnctnagtggatttgggcagtcaggaagcttctgccggttagctggccacgatatcaactatttggctttgtcaggtgttctctcaaaaattggcagaagtggtgagaatccgtatgccccgctgaatctcctggctgactttgctggtggtggccttatatgtgcactgggcattataatggctctttttgaccgcacacgcactgacaanggtcaggtcattgatgcaaatatggtggaaagaacngcatatttaagttcttttctgtggaaaactcanaaatcnaantctgtggggaacacctccaaggacanaacatgttggatggttggaacacctttctataccactttactggacanca

SEQ ID NO: 2517 - DNA, 847 bp, Homo sapiens
  misc_feature (637)..(637): "n" may be a, t, c, g, other or unknown
  misc_feature (639)..(639): "n" may be a, t, c, g, other or unknown
  misc_feature (655)..(655): "n" may be a, t, c, g, other or unknown
  misc_feature (698)..(698): "n" may be a, t, c, g, other or unknown
  misc_feature (712)..(712): "n" may be a, t, c, g, other or unknown
  misc_feature (791)..(791): "n" may be a, t, c, g, other or unknown
  misc_feature (810)..(810): "n" may be a, t, c, g, other or unknown
  misc_feature (816)..(816): "n" may be a, t, c, g, other or unknown
  misc_feature (828)..(828): "n" may be a, t, c, g, other or unknown
  misc_feature (841)..(841): "n" may be a, t, c, g, other or unknown
caatgaatggggagtaaatacacagataatccaaaattgatgtaagcattggaaggggaaagagggaacgcttctttccctctgggcttggtcatttcctcccaagcaaaccccgcgacgttcagccgtcttcctcctatgccacgtgctctcaccagaactgcagcaaaactgcattttatgtcctgtgtctaaagctaaacacatgttcctgtctacttttgctttgttcctgtttcccttctgtgaggaccttcccctcctcagatgtggggagttgccgcctccacttgcattacatgtatttcagagtaggtcctaggctccccttacacctctggtcacgttgccattattcctatggtagataaaggggatgagaaagaacagagctccaggcctttttcaaacaaactggttttctcagtatagccctatgctcaaaaggagtgaggacaggtatgtgactgccataaggagctgtttgctttgcacagagaaatctaatctttctcctgctgggcagctcagtacagatgtcccctcactgctggaagaaacacctgcccttgcttgttctcctgatggcccctcacagtcaggtgtgggatggcacatttctaggtgctcctcgccnanctgtcatgggcttcantcttgggcctctgcagctggctgtgaacaggtggaaactgtanccttggctgaccanaaaaaggaaaggaagcatctgccgcttggctgatttaagaattgtgctgaattcctgccccatcttgttctcccacttnaaccaaaggccaaagcttntcttanctttttggccancccttagggaatnaacccc

SEQ ID NO: 2518 - DNA, 840 bp, Homo sapiens
  misc_feature (554)..(554): "n" may be a, t, c, g, other or unknown
  misc_feature (595)..(595): "n" may be a, t, c, g, other or unknown
  misc_feature (760)..(760): "n" may be a, t, c, g, other or unknown
  misc_feature (784)..(784): "n" may be a, t, c, g, other or unknown
  misc_feature (790)..(790): "n" may be a, t, c, g, other or unknown
  misc_feature (796)..(796): "n" may be a, t, c, g, other or unknown
  misc_feature (823)..(823): "n" may be a, t, c, g, other or unknown
ttgaacattcctttagtttccagcttcataatttggttcttattaaaataattctagaattttcatgttttttttaaccagctctctaaattgtgttacatgcacataaaatatgccattttaaccattttcaggtgtgtggttcagtggccttgggtacagacccagtgttacacagccaccaccaccaccatcatctccagagcctttttatcttcccaaactgaagctctgcccccattaaacactcactccccaccccgctcccccagcagggttagatcgcagaggggcctgccgggggctctgaggtgatggaaaccatctgagactgccatggcgatgatcgagaaagtctgtgaatttacggaaaattattgcattatatacataaaagaggtgtgtgtaaactgtgccataataaagcctaaaaattagaagcatgcttgtaacttagtgtatttaaataggtaattcgttcagtcctgaggttagtattattgaaaaggtttaattttgttctcatctctgccgctgtctgtagtgacctatanagaaccactgtgatcacctcctgtatgtatgcaaatctgancaaacgtaaacatattttcttcttgttttccttccacaatcccccccactcccacccccgcccatgtgtgtctgcgttttccccgcaggtgcatgcaggcccgcgttcatctgttgcaacccttcctgctgccctgcggggcccatgcactgcaaaccccgctgnctcaaactgttgcctgcgttggtnggacanctgttncctgaatccgaaaagggggttgccttnttaaaggcagggtgcct

SEQ ID NO: 2519 - DNA, 826 bp, Homo sapiens
  misc_feature (244)..(244): "n" may be a, t, c, g, other or unknown
  misc_feature (363)..(363): "n" may be a, t, c, g, other or unknown
  misc_feature (387)..(387): "n" may be a, t, c, g, other or unknown
  misc_feature (510)..(510): "n" may be a, t, c, g, other or unknown
  misc_feature (521)..(521): "n" may be a, t, c, g, other or unknown
  misc_feature (612)..(612): "n" may be a, t, c, g, other or unknown
  misc_feature (694)..(694): "n" may be a, t, c, g, other or unknown
  misc_feature (776)..(776): "n" may be a, t, c, g, other or unknown
  misc_feature (790)..(790): "n" may be a, t, c, g, other or unknown
  misc_feature (812)..(812): "n" may be a, t, c, g, other or unknown
  misc_feature (817)..(817): "n" may be a, t, c, g, other or unknown
  misc_feature (821)..(821): "n" may be a, t, c, g, other or unknown
aagcagcgtcctgaggagacagcggcacgttctagctgcgtctgcggccagcccgtgccagtggagtgggctccgcgttgctcattctctccgacaggttgtcagcctctgtccccgctgcacagggtcttgccccttctccggggcctgtgccagctcccttccccccccgttgtcctgtccccacagccattctgggagctggggaacctggtctcaaggcaggccctgcagttccacagangtggcaggtcttgccctttggccaacagatttcttgtcctgccttctagatgcctctgagctccaaacccagggcagccatggcttctcatttacaccaacaggtttcagttccaacanaaaggtcggggtaggttcgtgcanaaatggggctggcaggggggctatgggaggattattttaacagatcaagaaaatgaagccaaatcaagtgaattaaattcctcacaattattttctttccctgaggtttgattggcacagcancaaaagttgangccaccccacttgtgtccactgtttttagaaaaaaatgaatgggcttcctgccattgtgggggctggactcttgggctttcttggtgggancggaaaaagggcctcccacccttgtccaaattgcctcccactggaagtcaggaattctacacttgcaacctcgggcactgtnggggaattgcattgccttggggcctcttgggttggggaaccatggaacaggccctgggtcccttttcctaaccctttgttcngggaaaaaaggttnccaaaaaagaatttcctggccnggttngggnaaaag

SEQ ID NO: 2520 - DNA, 697 bp, Homo sapiens
  misc_feature (407)..(407): "n" may be a, t, c, g, other or unknown
  misc_feature (466)..(466): "n" may be a, t, c, g, other or unknown
  misc_feature (534)..(534): "n" may be a, t, c, g, other or unknown
  misc_feature (569)..(569): "n" may be a, t, c, g, other or unknown
  misc_feature (610)..(610): "n" may be a, t, c, g, other or unknown
  misc_feature (635)..(635): "n" may be a, t, c, g, other or unknown
  misc_feature (637)..(637): "n" may be a, t, c, g, other or unknown
  misc_feature (645)..(645): "n" may be a, t, c, g, other or unknown
  misc_feature (696)..(696): "n" may be a, t, c, g, other or unknown
aaaaaaggccgtgcagttcctagcgaggaggcgccgccgccattgccgctctctcggtgagcgcagccccgctctccgggccgggccttcgcgggccaccggcgccatgggccagtgcggcatcacctcctccaagaccgtgctggtctttctcaacctcatcttctggggggcagctggcattttatgctatgtgggagcctatgtcttcatcacttatgatgactatgaccacttctttgaagatgtgtacacgctcatccctgctgtagtgatcatagctgtaggagccctgcttttcatcattgggctaattggctgctgtgccacaatccgggaaagtcgctgtggacttgccacgtttgtcatcatcctgctcttggtttttgtcacagaagttgttgtantggttttgggatatgtttacagagcaaaggtggaaaatgaggttgatcgcagcattcanaaagtgtataagacctacaatggaaccaaccctgatgctgctagccgggctattgattatgtacaganacagctgcattgttgtggaattcacaactactcanactgggaaaatacagattggttcaaagaaaccaaaaaccanaatgtccctcttagctgctgcagananactgccancaattgttatggcagcctgggccaccttccgaactctatgcttgaagggtnt

SEQ ID NO: 2521 - DNA, 853 bp, Homo sapiens
  misc_feature (450)..(450): "n" may be a, t, c, g, other or unknown
  misc_feature (630)..(630): "n" may be a, t, c, g, other or unknown
  misc_feature (703)..(703): "n" may be a, t, c, g, other or unknown
  misc_feature (778)..(778): "n" may be a, t, c, g, other or unknown
  misc_feature (830)..(830): "n" may be a, t, c, g, other or unknown
  misc_feature (834)..(834): "n" may be a, t, c, g, other or unknown
  misc_feature (852)..(852): "n" may be a, t, c, g, other or unknown
atttttcccgctcagccctggagcgcgtagctctaccaagaatggccactgtgccagatgcccctgaccagcgttgcccatttgaatttcctagcaggccccccaaagtaggtatttcagtaccctgttagagctgaggcgcaggtaaaatgactggcccaggccggtcccaccccgtaaggatttgaacgttggctccacaactcgggagcctgcgcctttcctcctcccaacgtggactcctgcccggcgaagtgcctcacttccttctcccgggagtcatcaagctttggtgtatgtgttggccggttctgaagtcttgaagaagctctgctgaggaagaccaaagcagcactcgttgccaattagggaatggaccgtttgggttcctttagcaatgatccctctgataagccaccttgccgaggctgctcctcctacctcatgganccttatatcaagtgtgctgaatgtgggccacctccttttttcctctgcttgcagtgtttcactcgaggctttgagtacaagaaacatcaaagcgatcatacttatgaaaataatgacttcagattttcctgtccttgatcccagctgggactgctcaagaagaaatggcccttttagaanctgtgatggactgtggctttgggaaattggcagggatgtaccaatcaaatgttgcaccaagaccaaggaagantgtgagaaacactatgtgaagcatttcatcaataacctctgtttgcatctaccctgctgaacctgaaaacaagcngaagaaccaaaaactggctgaaaaaagcccattccattttccactcctacanaatnaaccctccccgaacctanc

SEQ ID NO: 2522 - DNA, 784 bp, Homo sapiens
  misc_feature (723)..(723): "n" may be a, t, c, g, other or unknown
  misc_feature (746)..(746): "n" may be a, t, c, g, other or unknown
  misc_feature (748)..(748): "n" may be a, t, c, g, other or unknown
  misc_feature (752)..(752): "n" may be a, t, c, g, other or unknown
  misc_feature (782)..(782): "n" may be a, t, c, g, other or unknown
atcttctttaacatcaaggcctgtggaaaccactttggaaaataatgaaggtggacaagagcaaggaccaagtgtggaaggtcttaatgtaccaacaaaggctactttagaggtatcctctatcataaaaaagaaaccaaatcaagctaaaaaaggccttggggccaaaaaaggaagtttgggagctcagaaactggcaaacacatgctttaatgaaattgaaaaacaagctcaagctgcggataaaatgaaggagcaggaagacctggccaaggtggtatctaaagaagaatcaattgtttcatcattacgattagcctataaggatcttgaaattcaaatgaagaaagacgaaaagatgaacattagtggcaaaaaaaatgttgactcagacagactcggcatgggatttggaaattgcagaagtgttatttcacattcagtgacttcagatatgcagaccatagagcaggaatcacccattatggcaaaaccaagaaaaaagtataatgatgacagtgacgattcatattttacttccagctcaaggtactttggacgagccagtggagttaagggagcagttctttctctagctgggatgacagttcagattcctattgggaaaaaagagaccagcaaagatactgaaacagttctgaaaaccacagggctattcagacagacctactgctcgccgcaaagcccagattatgaacccanttgaaaattacagatgaaggccnanaaanaaatttgggcaatgttcaagggccatttcntc

SEQ ID NO: 2523 - DNA, 690 bp, Homo sapiens
  misc_feature (522)..(522): "n" may be a, t, c, g, other or unknown
  misc_feature (626)..(626): "n" may be a, t, c, g, other or unknown
  misc_feature (644)..(644): "n" may be a, t, c, g, other or unknown
  misc_feature (666)..(666): "n" may be a, t, c, g, other or unknown
  misc_feature (678)..(678): "n" may be a, t, c, g, other or unknown
  misc_feature (683)..(683): "n" may be a, t, c, g, other or unknown
aatatatgcacctttcagttcacacgtggcgccagcggaggcaggttgatgtgtttgtgcttccttctacagccaatatgaaaaggcctagtaagtggggtcgggaggcgggcgtggagggacccacgtctggaagttgctgcagccaccacgacgctcttctacggctacggctttgtctctgctgagttaaagaaagcaagtaaacgcatgacctgccataagcggtataaaatccaaaaaaaggttcgagaacatcatcgaaaattaagaaaggaggctaaaaagcggggtcacaagaagcctaggaaagacccaggagttccaaacagtgctccctttaaggaggctcttcttagggaagctgagctaaggaaacagaggcttgaagaactaaaacagcagcagaaacttgacaggcagaaggaactagaaaagaaaagaaaacttgaaactaatcctgatattaagccatcaaatgtggaacctatggaaaaggagtttgggctttgcaaaactganaacaaagccaagtcgggcaaacagaattcaaagaagctgtactgccaagaacttaaaaaggtgattgaagcctccgatgttgtcctaaaagtgttggatgccanaaatcctcttggttgcanatgtcctcaggttaaaaaaagncattgtccaaantgganaaaaaaa

SEQ ID NO: 2524 - DNA, 684 bp, Homo sapiens
  misc_feature (611)..(611): "n" may be a, t, c, g, other or unknown
  misc_feature (613)..(613): "n" may be a, t, c, g, other or unknown
  misc_feature (615)..(615): "n" may be a, t, c, g, other or unknown
  misc_feature (628)..(628): "n" may be a, t, c, g, other or unknown
  misc_feature (651)..(651): "n" may be a, t, c, g, other or unknown
ctcttctctaagctgcacagcctgaatagaagggctggtccagcggcggcggaggctggcgctgtcctgagagggagggctctgtgcggaagagatgaatcggacaaagggtgatgaggaggagtattggaacagctccaagttcaaggcttttacctttgacgatgaagacgatgagctttcacagttaaaggagtccaagcgggcggtgaacagcctccgagacttcgtggatgatgatgacgatgatgacctggagcgagtcagctggagtggggaacctgtgggaagtatctcatggtccatcagagagactgctggtaatagcggctcaacccacgaggggcgtgaacagctaaagagccgaaacagcttctcctcctatgcacaactacccaagcctacttctacctactccctgagcagcttttttagaggtagaactagacctggaagtttccagtccctttctgatgctctgtcagacacacctgccaaaagctatgctccagagctggggagacccaaaggggagtatagggattacagcaatgactggagccccagtgatacagtgcgacgtctccggaagggcaaggtttgctcactanananattccgctccttncaggacaaactacaactcctaanaagaagcagtaagcatgcattgatggaaacttc

SEQ ID NO: 2525 - DNA, 843 bp, Homo sapiens
  misc_feature (630)..(630): "n" may be a, t, c, g, other or unknown
  misc_feature (646)..(646): "n" may be a, t, c, g, other or unknown
  misc_feature (648)..(648): "n" may be a, t, c, g, other or unknown
  misc_feature (650)..(650): "n" may be a, t, c, g, other or unknown
  misc_feature (664)..(664): "n" may be a, t, c, g, other or unknown
  misc_feature (769)..(769): "n" may be a, t, c, g, other or unknown
  misc_feature (776)..(776): "n" may be a, t, c, g, other or unknown
  misc_feature (798)..(798): "n" may be a, t, c, g, other or unknown
  misc_feature (808)..(808): "n" may be a, t, c, g, other or unknown
  misc_feature (816)..(816): "n" may be a, t, c, g, other or unknown
ctctggagccgcgactgcccggggttgtgccggccgccgctgccgcccaggccgcctcagctctcctctgcgccggcccgctcactccgcccggccccagccctagcgctggccgcgaccccggcggagatcatgaatcagacagataaaaatcaacaagaaatcccatcataccttaatgatgaaccaccagaaggttcaatgaaagatcacccacagcagcagccaggcatgttgtcccgtgtgactgggggtatcttcagtgttacaaagggagctgttggtgccaccattggtggtgtggcttggattggtggaaagagtctggaagtgaccaaaacagctgttacaactgtgccttccatgggaatagggctggtgaaagggggtgtctctgctgtggctggaggtgttacagctgttgggtctgctgttgtaaacaaagtgcccttaacaggaaagaagaaagacaaatctgactgaaatatagagatacacttgcgctccacagcactgtaatgccagtggcattgaattgctaaattatggactacaaccaagtcaactgttttgggacgtttatcttctaaactgctgtgttgaaagtattgatgactggctttcatctanaaagaaaaaaccaatncnancacagtatatgaangttctcatactttaagttccaaggtttttatcttggtaaaatgttacccttactccggttgttaactgaaaaaaatggtatgttttgaaataatttaataaaaantctttcnagtttgaactaaaaaattgttnaaaaatttgnaaatttanttaaaaatgaatcttccccagttccca

SEQ ID NO: 2526 - DNA, 293 bp, Homo sapiens
  misc_feature (6)..(6): "n" may be a, t, c, g, other or unknown
  misc_feature (74)..(74): "n" may be a, t, c, g, other or unknown
  misc_feature (205)..(205): "n" may be a, t, c, g, other or unknown
  misc_feature (223)..(223): "n" may be a, t, c, g, other or unknown
  misc_feature (235)..(235): "n" may be a, t, c, g, other or unknown
  misc_feature (237)..(237): "n" may be a, t, c, g, other or unknown
  misc_feature (250)..(250): "n" may be a, t, c, g, other or unknown
accatnccatgacttcccaccgcgccctcgctcctacctccccacacctctctctcagtccccaggaacacacngaggtgcacatcacattcccttgtccacactgcccgcctctcccacatgacacccccttccctgtccttccccaactccccagctccaagagtggaagaaatccccaagatcatctgggtctccctctccnaacccagaactgaggctnggatatcttctncnacatccttggcangacttctccaccctctcgcatacctccagggacagagagctta

SEQ ID NO: 2527 - DNA, 567 bp, Homo sapiens
  misc_feature (135)..(135): "n" may be a, t, c, g, other or unknown
  misc_feature (167)..(167): "n" may be a, t, c, g, other or unknown
  misc_feature (315)..(315): "n" may be a, t, c, g, other or unknown
  misc_feature (411)..(411): "n" may be a, t, c, g, other or unknown
  misc_feature (423)..(423): "n" may be a, t, c, g, other or unknown
  misc_feature (454)..(454): "n" may be a, t, c, g, other or unknown
  misc_feature (521)..(521): "n" may be a, t, c, g, other or unknown
  misc_feature (527)..(527): "n" may be a, t, c, g, other or unknown
  misc_feature (542)..(542): "n" may be a, t, c, g, other or unknown
  misc_feature (546)..(546): "n" may be a, t, c, g, other or unknown
  misc_feature (563)..(563): "n" may be a, t, c, g, other or unknown
agcagggaggaagacaggcaatccctccggctgtccgaccaagagaggccggccgagcccgaggcttgggcttttgctttctggcggagggatctgcggcggtttaggaggcggcgctgatcctgggaggaagangcagctacggcggcggcggcggtggcggctanggcggcggcgaataaaggggccgccgccgggtgatgcggtgaccgctgcggcaggcccaggagctgagtgggccccggccctcagcccgtcccgccggacccgctttcctcaactctccatcttctcctgccgaccgagatcgccgangcggcctcaggctccctagccccttccccgtcccttccccgcccccgtccccgccccgggggccgccgccacccgcctcccaccatggctctgaanaaaatccacaangaattgaatgatctggcacgggaccctccancacagtgttcaacaagtcctgttgggaaatgatatgttccattgggcaagcttacaataattggggnccaatnaacagtccctatcanggtngaatttttttcttgacnattc

SEQ ID NO: 2528 - DNA, 679 bp, Homo sapiens
  misc_feature (444)..(444): "n" may be a, t, c, g, other or unknown
  misc_feature (513)..(513): "n" may be a, t, c, g, other or unknown
  misc_feature (529)..(529): "n" may be a, t, c, g, other or unknown
  misc_feature (609)..(609): "n" may be a, t, c, g, other or unknown
  misc_feature (636)..(636): "n" may be a, t, c, g, other or unknown
  misc_feature (644)..(644): "n" may be a, t, c, g, other or unknown
  misc_feature (647)..(647): "n" may be a, t, c, g, other or unknown
  misc_feature (666)..(666): "n" may be a, t, c, g, other or unknown
agcggaggttccgggctccgggatgaaaggagggaacgcagctggcagagagagaagttggctagcatggaatcaccagaggagcctggagcatccatggatgagaactactttgtgaactacactttcaaagatcggtcacattcaggccgtgtggctcaaggcatcatgaaactgtgtctagaggaggagctctttgctgatgtcaccatttcggtggaaggccgggagtttcagctccatcggctggtcctctcagctcagagctgcttcttccgatccatgttcacttccaacctgaaggaggcccacaaccgggtgattgtgctgcaggatgtcagcgagtctgttttccagctcctggttgattatatctaccatgggactgtgaaacttcgagctgaggagttgcaggaaatttatgaggtgtcagacatgtatcanctgacatctctctttgaggaatgctctcggtttttggcccgcacagtgcaagtgggaaactgccttcangtgatgtggctggcanatcggcacagtgatcctgaactctatacgggtgccaagcactgtgccaagacccaccttggccccagctgcagaatacanaaggaatttctccacttgccccaccgntttactcncanatatcacctccggatgganttccgtgtttctc

SEQ ID NO: 2529 - DNA, 654 bp, Homo sapiens
  misc_feature (459)..(459): "n" may be a, t, c, g, other or unknown
  misc_feature (461)..(461): "n" may be a, t, c, g, other or unknown
  misc_feature (582)..(582): "n" may be a, t, c, g, other or unknown
  misc_feature (591)..(591): "n" may be a, t, c, g, other or unknown
  misc_feature (600)..(600): "n" may be a, t, c, g, other or unknown
  misc_feature (612)..(612): "n" may be a, t, c, g, other or unknown
  misc_feature (649)..(649): "n" may be a, t, c, g, other or unknown
ttgtgcttccttctacagccaatatgaaaaggcctaagttaaagaaagcaagtaaacgcatgacctgccataagcggtataaaatccaaaaaaaggttcgagaacatcatcgaaaattaagaaaggaggctaaaaagcggggtcacaagaagcctaggaaagacccaggagttccaaacagtgctccctttaaggaggctcttcttagggaagctgagctaaggaaacagaggcttgaagaactaaaacagcagcagaaacttgacaggcagaaggaactagaaaagaaaagaaaacttgaaactaatcctgatattaagccatcaaatgtggaacctatggaaaaggagtttgggctttgcaaaactgagaacaaagccaagtcgggcaaacagaattcaaagaagctgtactgccaagaacttaaaaaggtgattgaagcctccgatgttgtcctanangtgttggatgccagagatcctcttggttgcagatgtcctcaggtagaaaaagccattgtccagagtggacagaaaaagctggtacttatattaaataaatcagatctggtaccaaaagganaatttgganaactggctnaattatttgaanaaagaattgccaacagttggtgttcagaacctccacnaaacc

SEQ ID NO: 2530 - DNA, 327 bp, Homo sapiens
  misc_feature (88)..(88): "n" may be a, t, c, g, other or unknown
  misc_feature (178)..(178): "n" may be a, t, c, g, other or unknown
  misc_feature (201)..(201): "n" may be a, t, c, g, other or unknown
  misc_feature (203)..(203): "n" may be a, t, c, g, other or unknown
  misc_feature (280)..(280): "n" may be a, t, c, g, other or unknown
  misc_feature (288)..(288): "n" may be a, t, c, g, other or unknown
  misc_feature (301)..(301): "n" may be a, t, c, g, other or unknown
  misc_feature (303)..(303): "n" may be a, t, c, g, other or unknown
  misc_feature (326)..(326): "n" may be a, t, c, g, other or unknown
agcttctctcgccatgcgtcctcgtggaaggttcgtgtgctaattagatgggcgccaggggtctccggcgggaacatggaggggtctntgggggcctttgggaacatggagtcctattctgttccgcctggggcctcggtggcggcttgcactccccgacatgacggccgctgccctntgcagggccggccggcgattgcncntgtcctgctcctcttaagcccgggaccgcgggatgggtgtcggcgtgaccatcccttaactccctgtctctcctcantgacatcntctttaaaccctncntggtaatccctgactcaccgccnt

SEQ ID NO: 2531 - DNA, 355 bp, Homo sapiens
  misc_feature (286)..(286): "n" may be a, t, c, g, other or unknown
  misc_feature (331)..(331): "n" may be a, t, c, g, other or unknown
  misc_feature (334)..(334): "n" may be a, t, c, g, other or unknown
  misc_feature (345)..(346): "n" may be a, t, c, g, other or unknown
agaggaggatgacgagggacgagggatgaggatgaagatgaaattgaaccagcagcgatgaaagcagcagctgctgcccctgcctcagaggatgaggacgatgaggatgacgaagatgatgaggatgacgatgacgatgaggaagatgactctgaagaagaagctatggagactacaccagccaaaggaaagaaagctgcaaaagttgttcctgtgaaagccaagaacgtggctgaggatgaagatgaagaagaggatgatgaggacgaggatgacgacgacgacnaagatgatgaagatgatgatgatgaagatgatgaggaggaggaanaanaggaggaggannagcctgtcc

SEQ ID NO: 2532 - DNA, 758 bp, Homo sapiens
  misc_feature (584)..(584): "n" may be a, t, c, g, other or unknown
  misc_feature (718)..(718): "n" may be a, t, c, g, other or unknown
  misc_feature (725)..(725): "n" may be a, t, c, g, other or unknown
  misc_feature (747)..(747): "n" may be a, t, c, g, other or unknown
  misc_feature (754)..(754): "n" may be a, t, c, g, other or unknown
  misc_feature (757)..(757): "n" may be a, t, c, g, other or unknown
aaaaaaaagaatagtagaggatcctgaatccctaaacatgaaaaacattctatctattcttcatacttactcttctctcaatcatgtctacaaatgccagaacaaagaacagttcgtggaagttatggctagtgctctgactggttatcttcacactatttcttctgaaaacttattggatgcagtatattcattttgcttgatgaattactttcccctggctccttttaatcagcttctgcaaaaagacatcatcagtgagctgctgacatcagatgacatgaagaatgcttacaagctgcatactttggatacttgtctaaaacttgatgatactgtctatctgagggacatagccttgtcactcccacagctgccgcgggagctgccatcgtcacatacaaatgcaaaggtggcagaggtgctgagcagccttctgggaggtgaaggacacttctcaaaggatgtgcacttgccacacaattatcatattgattttgaaatcagaatggacactaacaggaatcaagtgctaccactttctgatgtggatacaacttctgctacagatattcaaagagtanctgtgctatgtgtttccagatctgcttattgtttgggttcaagccaccccagaaggatccttgctatgaaaatgcggcatttgaatgcaatgggttttcatgttgatcttggtcaataactgggaaaatggacnaacttanaaaatgggaagatgcagtcccntttttgnaana

SEQ ID NO: 2533 - DNA, 780 bp, Homo sapiens
  misc_feature (98)..(98): "n" may be a, t, c, g, other or unknown
  misc_feature (543)..(543): "n" may be a, t, c, g, other or unknown
  misc_feature (570)..(570): "n" may be a, t, c, g, other or unknown
  misc_feature (649)..(649): "n" may be a, t, c, g, other or unknown
  misc_feature (658)..(658): "n" may be a, t, c, g, other or unknown
  misc_feature (674)..(674): "n" may be a, t, c, g, other or unknown
  misc_feature (701)..(701): "n" may be a, t, c, g, other or unknown
  misc_feature (721)..(721): "n" may be a, t, c, g, other or unknown
  misc_feature (752)..(752): "n" may be a, t, c, g, other or unknown
  misc_feature (763)..(763): "n" may be a, t, c, g, other or unknown
  misc_feature (776)..(776): "n" may be a, t, c, g, other or unknown
gagtgcaagatcgttttctcagtggtggtggaagttgcctcatcgcaggcagatgttggggctttgtccgaacagctcccctctgccagcttctgtanataagggttaaaaactaatatttatatgacagaagaaaaagatgtcattccgtaaagtaaacatcatcatcttggtcctggctgttgctctcttcttactggttttgcaccataacttcctcagcttgagcagtttgttaaggaatgaggttacagattcaggaatcgtagggcctcaacctatagactttgtcccaaatgctctccgacatgcagtagatgggagacaagaggagattcctgtggtcatcgctgcatctgaagacaggcttgggggggccattgcagctataaacagcattcagcacaacactcgctccaatgtgattttctacattgttactctcaacaatacagcagaccatctccggtcctggctcaacagtgattccctgaaaagcatcagatacaaaattgtcaattttgaccctaaacttttgggaangaaaagtaaaaggaagatcctgaccanggggaatccatgaaacctttaacctttgcaaggttctacttgccaattctggttccccaacgcaaaaaaaggcctatcnttggatgangaatttattgtgcaanggtgatattcttgccctttacaatacnagcacttgaaacccaggaanttgccacttgcatttttccaaaaaaattgtnaatcccccccnctacttaaatttnttct

SEQ ID NO: 2534 - DNA, 591 bp, Homo sapiens
  misc_feature (215)..(215): "n" may be a, t, c, g, other or unknown
  misc_feature (535)..(535): "n" may be a, t, c, g, other or unknown
  misc_feature (545)..(545): "n" may be a, t, c, g, other or unknown
  misc_feature (579)..(579): "n" may be a, t, c, g, other or unknown
  misc_feature (582)..(582): "n" may be a, t, c, g, other or unknown
  misc_feature (590)..(590): "n" may be a, t, c, g, other or unknown
gggcgccatcatggacgagggactactacgggagcgcggccgagtggggcgacgaggctgacggcggccagcaggaggatgattctggagaaggagaggatgatgcggaggttcagcaagaatgcctgcataaattttccacccgggattatatcatggaaccctccatcttcaacactctgaagaggtattttcaggcaggagggtctccaganaatgttatccagctcttatctgaaaactacaccgctgtggcccagactgtgaacctgctggccgagtggctcattcagacaggtgttgagccagtgcaggttcaggaaactgtggaagatcacttgaagagtttgctgatcaaacattttgacccccgcaaagcagattctatttttactgaagaaggagagaccccagcgtggctggaacagatgattgcacataccacgtggcgggaccttttttataaactggctgaagcccatccagactgtttgatgctgaacttcaccgttaagcttatttctgacgcagggtnccaggggganatcaccagtgtgtccacagcatgccagcagctanaantgttctcna

SEQ ID NO: 2535 - DNA, 731 bp, Homo sapiens
  misc_feature (549)..(549): "n" may be a, t, c, g, other or unknown
  misc_feature (680)..(680): "n" may be a, t, c, g, other or unknown
  misc_feature (689)..(689): "n" may be a, t, c, g, other or unknown
  misc_feature (698)..(698): "n" may be a, t, c, g, other or unknown
  misc_feature (708)..(708): "n" may be a, t, c, g, other or unknown
  misc_feature (718)..(718): "n" may be a, t, c, g, other or unknown
ggcttctgtactgcgcgcgcacatgcgcgcaaacccggaagcggattatgtggagtgaaagttacaccgtggcggaatggggtgtattgattctgagcaataaacaacacatttttaacattcaggattgacttctaaggactcttggtacatgaggaagaaacccggaaggggaagaggaaagcaaaggcgtcaggaatggttcttcctcaggtattttttctaaatgtgagatcaaggaattaccaccaaaaaaggagagtaatacaggagaaatattccagacagtaatgttggaaagacatgaaagccacgacatacaagatttttgcttcagagaaacccagaaaaatgtacatgactctcagtgtctgtggaaacatgattgaagacattataagcgagtgcgtgtgacctataaggaaagtctcattggtagaagagacatgcatggtagaaaggatgatgcacaaaagcagcctgttaaaaatcagcttggattaaacccgcagtcacatctaccagaactgcagctatttcaagctgaanggaaaatatataaatatgatcacatggaaaaatccgtcaacagtagttccttaatttccccaccccaacgtatttcttctactgtcaaaacccacatttctcatacatatgaatgttattttgtggattcnttattcccnccaaaaganaaagccaatnttggggacanaacactaccaatt

SEQ ID NO: 2536 - DNA, 696 bp, Homo sapiens
  misc_feature (191)..(191): "n" may be a, t, c, g, other or unknown
  misc_feature (410)..(410): "n" may be a, t, c, g, other or unknown
  misc_feature (460)..(460): "n" may be a, t, c, g, other or unknown
  misc_feature (513)..(513): "n" may be a, t, c, g, other or unknown
  misc_feature (547)..(547): "n" may be a, t, c, g, other or unknown
  misc_feature (574)..(574): "n" may be a, t, c, g, other or unknown
  misc_feature (614)..(614): "n" may be a, t, c, g, other or unknown
  misc_feature (617)..(617): "n" may be a, t, c, g, other or unknown
  misc_feature (651)..(651): "n" may be a, t, c, g, other or unknown
  misc_feature (688)..(688): "n" may be a, t, c, g, other or unknown
  misc_feature (692)..(692): "n" may be a, t, c, g, other or unknown
ggaccaagatggcggcgccctgtgagggacaagcgtttgccgtaggggttgaaaagaattggggtgcagtagttcgctccccagaagggaccccccagaaaatccggcagctgatagatgaggggattgccccggaagagggaggcgtggacgcaaccacacccgcttgaggctctctatgaatctctganagtcttagagaaggacacgtctgccacatcccagtcagttaatggatcaccccaagcggaacaaccttcattggaatctacaagcaaagaagccttctttagcagagtggaaacattttcttctttgaaatgggcaggtaagccctttgagctgtctccactcgtctgtgcaaaatatggctgggtcacagtggaatgtgatatgctcaagtgctctanctgtcaagcttttctctgtgccagtttacaaccagcttttgactttgacngatataagcaacgatgtgctgagctgaagaaagccttgtgtactgcccatganaaattctgtttctggccagacagcccatccccanaccgatttgggatgttgcccctggatnaacctgctattcttgttagtgaattcctaaaatcgtttcnaancctttgtcacttggaactccacttcctttccctnaaggccggaagaacttgaaaactattttccttgaacnaagnacaa

SEQ ID NO: 2537 - DNA, 715 bp, Homo sapiens
  misc_feature (12)..(12): "n" may be a, t, c, g, other or unknown
  misc_feature (630)..(630): "n" may be a, t, c, g, other or unknown
  misc_feature (654)..(654): "n" may be a, t, c, g, other or unknown
  misc_feature (657)..(657): "n" may be a, t, c, g, other or unknown
  misc_feature (664)..(664): "n" may be a, t, c, g, other or unknown
  misc_feature (699)..(699): "n" may be a, t, c, g, other or unknown
agctggagcgtncggtggacagtgagcatgcgtaccatatctgaagttcgtaaattgaaattgaacatgcgtaattaatctttctgaataggaaaaaatatatacacaacaaaactctccgtttatggaacatgcgcatttgttctcagtaagtttttcgttttgaaagtgagcatgcgcatggtgagtaggttggtccgaagtttgaaccggacagaagcgctggtcggcgtctggcggttgtttttagagtgactcacacagttcccaggggactctgctctatgagagagaatgaggcatatcaagcatcttgcaaagaaagattcttcagtgaggaggagaatggagttccaattgcccgggctgttcttgttgacatggaacccaaagttatcaatcaaacgctgtcaaaggctgcccagtctggccaatggaaatatggtcaacatgcatgcttctgtcaaaaacaaggttctggaaacaactgggcatatggttactctgttcatggacccaggcatgaagaatctataatgaacataatccggaaggaagtggagaaatgtgactctttcagtggttttttcatcataatgagtatggctgggggcacaggatcaggattangaactttcgttacacagaatttanaanatcagtnctcaaactcattgaaaatgaatcagattatttggncttatgggaactggtg

SEQ ID NO: 2538 - DNA, 451 bp, Homo sapiens
  misc_feature (438)..(438): "n" may be a, t, c, g, other or unknown
  misc_feature (440)..(440): "n" may be a, t, c, g, other or unknown
  misc_feature (449)..(449): "n" may be a, t, c, g, other or unknown
aggccacttccggcgtacatggcggctaacgctactaccaacccgtcgcagctgctgccgttagagcttgtggacaaatgtataggatcaagaattcacatcgtgaggaagagtgataaggaaattgttggtactcttctaggatttgatgactttgtcaatatggtactggaagatgtcactgagtttgaaatcacaccagaaggaagaaggattactaaattagatcagattttgctaaatggaaataatataacaatgctggttcctggaggagaaggacctgaagtgtgaatgagtttccttgacttacactagattttgttttggctataatgacaagaaaatggaattttttttcccactttctaatgtttaaatcccataaagctaagtttcccgttaaaaggggaagtgctttgaagaggtgtaccccantnttgtaagtnaa

SEQ ID NO: 2539 - DNA, 569 bp, Homo sapiens
  misc_feature (531)..(531): "n" may be a, t, c, g, other or unknown
  misc_feature (554)..(554): "n" may be a, t, c, g, other or unknown
  misc_feature (557)..(557): "n" may be a, t, c, g, other or unknown
ttttttgccttcctcctcgtcctttagccgggagcctgtctttgcttgcctttgcctttgaggctctgtggctgtggggctgagtggcatcatggcggctcagaaagatctctgggacgccattgtgattggggcggggatccagggctgcttcactgcataccacctggccaaacacaggaagaggatcctcctgctggagcagttctttctaccacactcccgaggaagctcccatggacaaagccggataatccgaaaggcgtacctggaagacttttacacccggatgatgcatgagtgctatcagatatgggcccagctggagcacgaggctggaacccaattgcacaggcagactggattactgctgctgggaatgaaagagaatcaagaattaaagacaatccaggccaatctgtcgagggcagagggtagaacaccagtgttctttcatctgaggaactgaagcaacgtttcccaaatattcgggttgcccaaggggagaagtggggctcttggaaaaattcnggagggagttaatctaatgcatnatnagggccctcaga

SEQ ID NO: 2540 - DNA, 542 bp, Homo sapiens
  misc_feature (488)..(488): "n" may be a, t, c, g, other or unknown
  misc_feature (514)..(514): "n" may be a, t, c, g, other or unknown
  misc_feature (519)..(519): "n" may be a, t, c, g, other or unknown
aactgagcagcgccatggaggactctgaagcactgggcttcgaacacatgggcctcgatccccggctccttcaggctgtcaccgatctgggctggtcgcgacctacgctgatccaggagaaggccatcccactggccctagaagggaaggacctcctggctcgggcccgcacgggctccgggaagacggccgcttatgctattccgatgctgcagctgttgctccataggaaggcgacaggtccggtggtagaacaggcagtgagaggccttgttcttgttcctaccaaggagctggcacggcaagcacagtccatgattcagcagctggctacctactgtgctcgggatgtccgagtggccaatgtctcagctgctgaagactcagtctctcagagaagctgtgctgatggagaagccagatgtggtagtagggaccccatctcgcacttaagccacttgcagcaagacagcctgaaacttcgtgantccctggagcttttgtggtggacgangtganccttcttttttcctttggctttg

SEQ ID NO: 2541 - DNA, 470 bp, Homo sapiens
  misc_feature (423)..(423): "n" may be a, t, c, g, other or unknown
  misc_feature (465)..(466): "n" may be a, t, c, g, other or unknown
aaaaaaaaagctccccgccccgccgcggccatggaggacgagcggaaaaacggagcctacggaacgccacagaagtatgatcccactttcaaaggacccatttacaataggggctgcacggatatcatatgctgtgtgttcctgctcctggccattgtgggctacgtggctgtaggcatcatagcctggactcatggagaccctcgaaaggtgatctaccccactgatagccggggcgagttctgcgggcagaagggcacaaaaaacgagaacaaaccctatctgttttatttcaacactgtgaaatgtgccagccccctggttctgctggaattccaatgtcccactccccagatctgcgtggaaaaatgccccgaccgctacctcacgtacctgaatgctcgcagctcccgggactttganactataagcagttctgggttcctggcttcaagaaaataaggnntggt

SEQ ID NO: 2542 - DNA, 584 bp, Homo sapiens
  misc_feature (508)..(508): "n" may be a, t, c, g, other or unknown
  misc_feature (566)..(566): "n" may be a, t, c, g, other or unknown
  misc_feature (572)..(572): "n" may be a, t, c, g, other or unknown
aaagtgtgatgagaggtcaggggaacatcccagtaaaagagaagagtcacaggaagctcatctcctccctggattctggattaggagcttctgaatcttttccagggataggcaggtagctcactcttggtgcaatttcttgaggatgggaacatgtagagctgctggaaggagtaattctgtgcttgacaaaggacgatttctcctttatcgtgaccagtgctgccgatttcctgacagaggagcttacactctgagcaccttgttttagcgaactctagcaaaacttgtttagcttagcaaaaacaaacacacaaaaaactgagaactctgctgtttcagatatgccataacatacatctgaaacacatgtgtaacaatcaaaatggtgggctctagaatggttttggagctcgagatcttcatgggttagacttgctggtcagacccaggagcacctgtggctcacaccttctgttcccctcctggcctgtgcagaatgtaaacngcagactcatactcaatgggcactacaggccttatcagacgtttaacaagctgggatngctagnggggaataaagg

SEQ ID NO: 2543 - DNA, 472 bp, Homo sapiens
  misc_feature (391)..(391): "n" may be a, t, c, g, other or unknown
  misc_feature (417)..(417): "n" may be a, t, c, g, other or unknown
  misc_feature (439)..(439): "n" may be a, t, c, g, other or unknown
agagaactgccgcttgccgccattgacacgcacagatagaacccaaagaaaggcaaagagtcctgcccggcgccggcgccgcgtgggccaaacctgcgcccgtggaggggcgcgcagagggcaccgggcgccgggagcaggcggcgcacaccagcattgtgttagtgccgggaggccactgtgtcagcaagctgagagggaaactgaagcaagatgtcgggccggagtgggaagaagaaaatgtccaagctgtcccgttcagctagggcaggtgtcatctttccagtggggaggctgatgcgttatctgaagaaagggacgttcaagtaccggatcagcgtgggcgcccctgtctacatggcggcagtcattgagtacctggcagcggaanttctagaattggccggcaatgccganaaggacaacaagaaggcccggntagccccgagacacatcttgctggcagttgcca

SEQ ID NO: 2544 - DNA, 517 bp, Homo sapiens
  misc_feature (494)..(494): "n" may be a, t, c, g, other or unknown
  misc_feature (500)..(500): "n" may be a, t, c, g, other or unknown
  misc_feature (513)..(513): "n" may be a, t, c, g, other or unknown
gttgtgccatgctgctctgtcatgtttggtacgtgaatcgtccctttgtgcagcctatctatgctatgtgggctacctgcccgttagtagtcacctagggtatccaatcagctgtcctgatatcagagtgcctgtgttcaagtaactcttattttgctcagtggccccagattgcaagagtagtgatgctggcatgtcataatagttctattttagtatttgttattattgttgatctgttactatgcctagctcataaattaaactttctcataagtatgtatgtatagggaaaaaaacaacatatatatgggtttcggttctatctacggtttcaggcatccactggggtcttggaatgtatcctccaaggataaggaaggactagtgtattccccacacccctccctcttgctaccttttgctgcttttctttaatcaccctctcctcctgtggcctgtttctatatacttggcattctgttggcttcctngtgtgnccatcacttcctncttc

SEQ ID NO: 2545 - DNA, 460 bp, Homo sapiens
  misc_feature (427)..(427): "n" may be a, t, c, g, other or unknown
  misc_feature (435)..(435): "n" may be a, t, c, g, other or unknown
  misc_feature (446)..(446): "n" may be a, t, c, g, other or unknown
aaaaatttaactcagaagactcacgtgactcttcatggaacagaactgtgtgatgaatcctacccggctttactcactgacattcctgttggagacttacatccaggggaacagctggaaaaaatgttgtatgttcgctgtggaacagtgggttccagaatgtttcttgtatatgtttcttacctgataaatacaaccattgaagaaaaagaaattgtttgcaagtgtcacaaggatgaaactgtaacaattgaaacagtctttccatttgatgttgcggttaaatttgtttctaccaagtttgagcacctggaaagggtttatgctgacatcccctttctgttgatgacggacctcttaagtgcctcaccctgggccctcactaatgtttccagtgagctccagcttgctcccatccatgaccacntggaccantcgagtctcangtgggccatggtaa

SEQ ID NO: 2546 - DNA, 167 bp, Homo sapiens
  misc_feature (85)..(85): "n" may be a, t, c, g, other or unknown
  misc_feature (94)..(94): "n" may be a, t, c, g, other or unknown
  misc_feature (143)..(143): "n" may be a, t, c, g, other or unknown
acacccagctgcctgagaccctccttcaacctccctagaggacagccccactctgcctcctgctcccacagggcagcaccatgtngcccctgtngctctgctgggcactctgggtgctgcccctggctggccccggggcggcngtgaccgaggagcagctcctgggg

SEQ ID NO: 2547 - DNA, 472 bp, Homo sapiens
  misc_feature (426)..(426): "n" may be a, t, c, g, other or unknown
  misc_feature (447)..(447): "n" may be a, t, c, g, other or unknown
  misc_feature (468)..(468): "n" may be a, t, c, g, other or unknown
tttccaaaatgaagcacccaaaagggtagtagaacgaacccttctggaacagtttgcagataaaaatcttagctatgatgaaagatcaatcagcattatgaaggtggctcaagcgaaactgaaggaaattggtccagatgacatgaatatggaagagtacaagaagtggcatgaagattatagtttgttccgaaaagtgtctgtgtatctcctaacaggcctagaactctatcaaaaaggaaagtaccaagaggcactttcctacctggtatatgcctaccagagcaatgctgccctgctgatgaaggggccccgccggggggtcaaagaatccgtgattgctttataccgaagaaaatgccttctggagctgaatgccaaagcagcttctctttttgaaacaatgatgatcactccgtaacctgnggggcataatggtgatggaanggaactgatcaatcccctgcnattc

SEQ ID NO: 2548 - DNA, 476 bp, Homo sapiens
  misc_feature (178)..(178): "n" may be a, t, c, g, other or unknown
  misc_feature (437)..(437): "n" may be a, t, c, g, other or unknown
  misc_feature (450)..(450): "n" may be a, t, c, g, other or unknown
  misc_feature (452)..(452): "n" may be a, t, c, g, other or unknown
gcagtcgctgcagccgccgcgggaggcgtccgtgacaagatgaagctcatcatcctggagcactattctcaggcgagcgagtgggcggctaaatacatcaggaaccgtatcatccagtttaacccagggccagagaagtacttcaccctggggctccccactggccttcctcgagacnacccggagagttaccactccttcatgtggaacaacttcttcaagcacattgacatccacccagaaaacgcccacattctggatgggaatgcagtcgacctacaggcagaatgtgatgcctttgaagagaagatcaaggctgcaggtgggatcgagctatttgttggaggcatcggccctgatggacacattgccttcaacgagccaggctccagtctggtgtccaggacccgtgtgaagacgctggccatggataccanctggccatgctangntcttcgatgggagaacttcaccaa

SEQ ID NO: 2549 - DNA, 465 bp, Homo sapiens
  misc_feature (406)..(407): "n" may be a, t, c, g, other or unknown
  misc_feature (418)..(418): "n" may be a, t, c, g, other or unknown
aatccgccgccgcctgggaggggacccgggctgccaggcgcccagctgtgcccagatggatgggacagagacccggcagcggaggctggacagctgtggcaagccaggggagctggggcttcctcaccccctcagcacaggaggactccctgtagcctcagaagatggagctctcagggcccctgagagccaaagcgtgacccccaagccactggagactgagcctagcagggagaccgcctggtccataggccttcaggtgaccgtgcccttcatgtttgcaggcctgggactgtcctgggccggcatgcttctggactatttccaggccaacactggacaaattgatgacccccaggagcagcacagagtcatcagcagcaacctggccctcatccaggtgcanngccactgtctnggggtcttggctgtgtggctgcgctgctgtttgggcgtgggtgtttc

SEQ ID NO: 2550 - DNA, 557 bp, Homo sapiens
  misc_feature (501)..(502): "n" may be a, t, c, g, other or unknown
  misc_feature (526)..(526): "n" may be a, t, c, g, other or unknown
agaagggcaacctcgtgctttctgcagaggagaccggagggcagaaggcagagtccaggcttagactgcagttcctcgcttacctgtgcagtctaattttgagctgcctctttgtagtcttaaaaggcaggagcttcgtgttgtgggtctgctaacccgtacgtttccgtgggcaagtcgtgtgtactcctcgccatggctcagctccaaacacgcttctacactgataacaagaaatatgccgtagatgatgttcccttctcaatccctgctgcctctgaaattgccgaccttagtaacatcatcaataaactactaaaggacaaaaatgagttccacaaacatgtggagtttgatttccttattaagggccagtttctgcgaatgcccttggacaaacacatggaagtggggaacatctcatcagaagaagttgtggaaatagatacgtggagaagtgtaccgcaccccagccagagcaagcaagttccagatgacggnncagttcaattaaagggcagagganggatctgactggtcctatgtaaggctctcgg

SEQ ID NO: 2551 - DNA, 591 bp, Homo sapiens
  misc_feature (474)..(474): "n" may be a, t, c, g, other or unknown
  misc_feature (554)..(554): "n" may be a, t, c, g, other or unknown
  misc_feature (560)..(560): "n" may be a, t, c, g, other or unknown
  misc_feature (576)..(576): "n" may be a, t, c, g, other or unknown
agaagggcaacctcgtgctttctgcagaggagaccggaggcagaaggcagagtccaggcttagactgcagttcctcgcttacctgtgcagtctaattttgagctgcctctttgtagtcttaaaaggcaggagcttcgtgttgtgggtctgctaacccgtacgtttccgtgggcaagtcgtgtgtactcctcgccatggctcagctccaaacacgcttctacactgataacaagaaatatgccgtagatgatgttcccttctcaatccctgctgcctctgaaattgccgaccttagtaacatcatcaataaactactaaaggacaaaaatgagttccacaaacatgtggagtttgatttccttattaagggccagtttctgcgaatgcccttggacaaacacatggaagtggagaacatctcatcagaagaagttgtggaaatagatacgtgggaagtgtacgcacccccagccngagcaatgcaggttccatgatgactggatcagtccattaaagggcaaggatggatcttgacgggtcctatgaaaagcctncggatngggcctggaaggaagncaaaatgccatgtgg

SEQ ID NO: 2552 - DNA, 443 bp, Homo sapiens
  misc_feature (435)..(435): "n" may be a, t, c, g, other or unknown
  misc_feature (439)..(440): "n" may be a, t, c, g, other or unknown
gggagcttcggacccggaagtggcgccctgggctcgcggcggtgtcgcggggatggcgggagccggagctggagccggagctcgcggcggacggcggcgggggtcgaggctcgagctcgcgatccaccgcccgcgcaccgcgcacatcctcgccaccctcggcctgcggctcagccctcggcccgcaggatggatggcgggtcagggggcctggggtctggggacaacgccccgaccactgaggctcttttcgtggcactgggcgcgggcgtgacggcgctcagccatcccctgctctacgtgaagctgctcatccaggtgggtcatgagccgatgccccccacccttgggaccaatgtgctggggaggaaggtcctctatctgccgagcttcttcacctacgccaagtacatcgtgcaattggatggtaagaangggnnttc

SEQ ID NO: 2553 - DNA, 503 bp, Homo sapiens
  misc_feature (443)..(443): "n" may be a, t, c, g, other or unknown
  misc_feature (453)..(453): "n" may be a, t, c, g, other or unknown
  misc_feature (469)..(469): "n" may be a, t, c, g, other or unknown
aaaaaaatgcttctgtgctctaagatatatatgtgtgtgtgtgtgctacatatatatttttaagaaaggaccatctctttaggatatatttttaaattctttgaaacacataaccaaaatggtttgattcactgactgactttgaagctgcatctgccagttacaccccaaatggctttaatcccctctcgggtctggttgccttttgcagtttgggttgtggactcagctcctgtgaagggtctggttaggagagagccatttttaaggacagggagttttatagcccttttctactttcctcccctcctcccagtccttatcaatcttttttcctttttcctgaccccctccttctggaggcagttgggagctatccttgtttatgcctcactattggcagaaaagaccccatttaaaacccagagaacactggaggggangccccaagtnggtccggggccaattnccccgggccaaaacagacagacagaagcgagaga

SEQ ID NO: 2554 - DNA, 573 bp, Homo sapiens
  misc_feature (548)..(548): "n" may be a, t, c, g, other or unknown
  misc_feature (551)..(551): "n" may be a, t, c, g, other or unknown
  misc_feature (567)..(567): "n" may be a, t, c, g, other or unknown
ctgggcgcgcggaacaaatccactcctggagcccgcggaccacgagcacgcgcctgacagcccctgctggcccggcgcgcggcgtcgccaggccagctatggcccccgacccggtggccgccgagaccgcggctcagggacctaccccgcgctacttcacctgggacgaggtggcccagcgctcagggtgcgaggagcggtggctagtgatcgaccgtaaggtgtacaacatcagcgagttcacccgccggcatccagggggctcccgggtcatcagccactacgccgggcaggatgccacggatccctttgtggccttccacatcaacaagggccttgtgaagaagtatatgaactctctcctgattggagaactgtctccagagcagcccagctttgagcccaccaagaataaagagctgacagatgagttccgggagctgcgggcaaaattggacggatgggctcatgaggcaaccagtcttcttcctgtgtactgctgcacatcttgctgctgatggtgcacctggctcacctttggctttggnggncttttgcctcctctcngggggg

SEQ ID NO: 2555 - DNA, 554 bp, Homo sapiens
  misc_feature (481)..(481): "n" may be a, t, c, g, other or unknown
  misc_feature (496)..(496): "n" may be a, t, c, g, other or unknown
cttgtagttcgtggtctgagaccaggcctcaagtggaaacggcgtcaccatgatcgcacggcggaacccagaacccttacggtttctgccggatgaggcccggagcctgcccccgcccaagctgaccgacccgcggctcctctacatcggcttcttgggctactgctccggcctgattgataacgtgatccggcggaggccgatcgcgacggctggtttgcatcgccagcttctatatattacggcctttttttttgctggatattatcttgtaaaacgtgaagactacctgtatgctgtgagggaccgtgaaatgtttggatatatgaaattacatccagaggattttcctgaagaagataagaaaacatatggtgaaatttttgaaaaattccatcccaataacgttgaaagtcttcaaaaatgcttgccccaagtttccactggaaaccgggcggttccggaaattagagggaaaagngttcctaatggcagntgaaagcctatgccaaatccgtaaggttgacacccttgtaattaaaatacgtaccatg

SEQ ID NO: 2556 - DNA, 456 bp, Homo sapiens
  misc_feature (439)..(439): "n" may be a, t, c, g, other or unknown
  misc_feature (447)..(447): "n" may be a, t, c, g, other or unknown
  misc_feature (455)..(455): "n" may be a, t, c, g, other or unknown
agccggctcgggaaagaatcccccaagctccatttcatgagtaagcgtgagagccgctcagtttcctccagctctgctgaagccagcacagaagtagcccaaactcttccctctgctgacagcaaattttaggcaaagtcatgagaaagaagaaattgggtccagaaagggaagtgaggagaatcagatcccagacctttggggagaaggagcaaccgcctctggcacagcccatcagggagaaagagcaggttgagaagagtcctaagctaacagccccaaacaggtgggcgttgctcagctccctgaggcatgtggttgtaaggcagaacccacagaccttgcaggaagaaggctctcggggccatggcccaggtcagcatcaacaatgactacagcgagtgggacttgagcacggatgccggggagcgggctcggntgttgcanaatcccgnt

SEQ ID NO: 2557 - DNA, 578 bp, Homo sapiens
  misc_feature (421)..(421): "n" may be a, t, c, g, other or unknown
  misc_feature (459)..(459): "n" may be a, t, c, g, other or unknown
  misc_feature (565)..(565): "n" may be a, t, c, g, other or unknown
  misc_feature (569)..(569): "n" may be a, t, c, g, other or unknown
cggaggtgacggagcggcggccccgcccggtgcgctggaggtcgaagcttccaggtagcggcccgcagagcctgacccaggctctgggcatcctgagcccaagtcccccacactcagtgcagtgatgagtgcggaagtgaaggtgacagggcagaaccaggagcaatttctgctcctagccaagtcggccaagggggcagcgctggccacactcatccatcaggtgctggaggcccctggtgtctacgtgtttggagaactgctggacatgcccaatgttagagagctggctgagagtgactttgcctctaccttccggctgctcacagtgtttgcttatgggacatacgctgactacttagctgaagcccggaatcttcctccactaacagaggctcagaagaataagcttcgacacctnctcagttgtcaccctggctgctaaagtaaaagtgtaancccatatgcagtgttgctggaggctcttgccctgggtaaatgttgcggcaactgggaaagaccttgtgattgaaggctgtgtaatgctgaacgtgcttcgtggctncccnggaacagcg

SEQ ID NO: 2558 - DNA, 571 bp, Homo sapiens
  misc_feature (532)..(532): "n" may be a, t, c, g, other or unknown
  misc_feature (566)..(566): "n" may be a, t, c, g, other or unknown
  misc_feature (568)..(568): "n" may be a, t, c, g, other or unknown
cgttccgcgctgtcgccgccgtcgtgcgtgccgctcggcggaggggacgggcctgcgttctctcctccttcctccccgcctccagctgccggcaggacctttctctcgctgccgctgggaccccgtgtcatcgcccaggccgagcacgatgccccctaaaaagggaggtgatggaattaaaccacccccaatcattggaaggtttggaacctcactgaaaattggtattgttggattgccaaatgctgggaaatctactttcttcaatgtgttaaccaatagtcaggcttcagcagaaaacttcccgttctgcactattgatcctaatgagagcagagtacctgtgccagatgaaaggtttgactttctttgtcaataccacaaaccagcaagcaaaattcctgcctttctaaatgtggtggatattgctggccttgtgaaaggagctcacaatgggcaaggccttggggaatgcctttttatctcatattaagtgcctgtggatggcatctttcatctaacacgtgctttngaaagatgatgatatcacgcacgttggaagggangngta

SEQ ID NO: 2559 - DNA, 481 bp, Homo sapiens
  misc_feature (131)..(131): "n" may be a, t, c, g, other or unknown
  misc_feature (396)..(396): "n" may be a, t, c, g, other or unknown
  misc_feature (410)..(410): "n" may be a, t, c, g, other or unknown
  misc_feature (472)..(472): "n" may be a, t, c, g, other or unknown
atttaccaatgactctgctccgtttttggagcagactgttttaagttgctcaggagcctgatggaaccatgaaccgagactcttctctgtttcctgccaagacctcatctgcactaatgccttctccctgnaccttgacacttccccctttagctataaaagcacttaccagccgaacgtggaacagtatcacaaaagattccatctcccaacgatttcagaactctgagctcagagagactccagattttaaaaaataatttgagtgcttggaaactattagctttttaagttccttccaaatatgttagtacctaccctttactttttccccaagaccatctcagggtggagcattctgtctaagagaagaaagataaggttgctcccacccanctctcccaagggcngacattaaacatctttgtgctttgaaggagagtggaattttgggatagtcctgtgatttccngactaactt

SEQ ID NO: 2560 - DNA, 417 bp, Homo sapiens
  misc_feature (394)..(394): "n" may be a, t, c, g, other or unknown
  misc_feature (413)..(413): "n" may be a, t, c, g, other or unknown
  misc_feature (416)..(416): "n" may be a, t, c, g, other or unknown
atttaccaatgactctgctccgtttttggagcagactgttttaagttgctcaggagcctgatggaaccatgaaccgagactcttctctgtttcctgccaagacctcatctgcactaatgccttctccctgaccttgacacttccccctttagctataaaagcacttaccagccgaacgtggaacagtatcacaaaagattccatctcccaacgatttcagaactctgagctcagagagactccagattttaaaaaataatttgagtgcttggaaactattagctttttaagttccttccaaatatgttagtacctaccctttactttttccccaagaccatctcagggtggagcattctgtctaagagggaaagataaggaggctcccacccanctctcccaagagcgggggnaana

SEQ ID NO: 2561 - DNA, 525 bp, Homo sapiens
  misc_feature (454)..(454): "n" may be a, t, c, g, other or unknown
  misc_feature (500)..(500): "n" may be a, t, c, g, other or unknown
  misc_feature (513)..(513): "n" may be a, t, c, g, other or unknown
acttccccgggagccggaagtcccgtctcacggttgccctggcagcgcgcgaggctggtgagtcggcagccctgtggcagccggcgggctggtttccatggttgcacgattaggaaccaccagctgctgcatcccatggccaggggtggcgtccaggtggcagagcagctaggaacgcaaggcctgaacctggggccagacaccctgctctcccggccatggtcaacgaccctccagtacctgccttactgtgggcccaggaggtgggccaagtcttggcaggccgtgcccgcaggctgctgctgcagtttggggtgctcttctgcaccatcctccttttgctctgggtgtctgtcttcctctatggctccttctactattcctatatgccgacagtcagccacctcagccctgtgcatttctactacaggaccgactgtgattcctccaccanctcactctgctccttcctgttgccaatgtctcgctgataagggtgnacgtaatcggggntgaagtatggaa

SEQ ID NO: 2562 - DNA, 547 bp, Homo sapiens
  misc_feature (494)..(494): "n" may be a, t, c, g, other or unknown
  misc_feature (518)..(518): "n" may be a, t, c, g, other or unknown
  misc_feature (521)..(521): "n" may be a, t, c, g, other or unknown
tctctttctcctccacgtggggacgcaggatggcggcagcagtggcggacgaggcggtggcgcgcgatgtgcagcggttgctagtgcagttccaggatgagggcgggcagctgctgggttccccgttcgacgtgcccgtggacatcaccccggacaggctgcagctcgtgtgcaacgcgctactggcccaggaggatcccctgccactggctttctttgtccacgatgctgagatcgtctcctcactggggaagacgttggagtcccaggcagtggagacagagaaggtcctagacatcatctaccagccacaggctatcttcagagtccgggctgtgactcgctgcaccagctccttggagggtcacagtgaggcagtcatttctgtggccttcagccctacgggaaagtacctggccagtggctctggagacaccaccgtgcgcttctgggatctcagcacagagacaccacatttcacatgcaaggacacngacactgggtccttaggaaatccnggntccaatggcaaaaactggctcaagct

SEQ ID NO: 2563 - DNA, 575 bp, Homo sapiens
  misc_feature (508)..(508): "n" may be a, t, c, g, other or unknown
  misc_feature (530)..(530): "n" may be a, t, c, g, other or unknown
  misc_feature (544)..(544): "n" may be a, t, c, g, other or unknown
gcttccggcaccggccgaggtcgggtcgcctccagagatcctgtgccttcaaaccctacgagtccatactttaaaacaaaatgaagaaagtaaggcttaaggaactagagagtcgcctgcaacaagtggatggatttgaaaagcccaagctacttctgggacagtatcctaccaggccgcacattgcagcatgtatgctctatacaatccataacacttatgatgacattgaaaataaagtcgttgcagatctaggatgtggttgtggagtacttagcatcggaactgcaatgttaggagcagggttgtgtgttggatttgacatagatgaagacgcattggaaatatttaataggaatgcagaagagtttgagttaacaaatattgacatggttcaatgtgatgtgtgcttattatctaacagaatgtccaagtcattcgatacagtaattatgaatcctccctttgggaccaaaaataataaagggacagtatggctttccaaagncgccttgggaatggcaagaccnccgtatatccctanaccaatccccactggggactgtccaagaaag

SEQ ID NO: 2564 - DNA, 496 bp, Homo sapiens
  misc_feature (480)..(481): "n" may be a, t, c, g, other or unknown
  misc_feature (488)..(488): "n" may be a, t, c, g, other or unknown
ggaaggtgcgtccgagccatggccgctgccaacccgtgggacccggcgtccgcgcctaacggcgctgggctagtgctaggccacttcatagcttcggggatggtcaatcaggagatgttaaacatgtctaagaaaacagtttcttgttttgtgaacttcaccagactacagcagatcacaaatattcaagctgaaatctaccagaaaaacctggaaattgaactcctgaaactagaaaaagatacagcagatgttgttcatcctttctttttggctcagaagtgtcatactctgcaaagcatgaataatcatttggaagcagtgctgaaagagaagagatcccttaggcaaagactgttgaaacccatgtgccaggaaaacttacctattgaagctgtttatcacagatatatggtacatttgctggagttggctgtgactttcattgagagattagaaacccaccttgaaacaattagnntattccncatttagc

SEQ ID NO: 2565 - DNA, 557 bp, Homo sapiens
  misc_feature (499)..(499): "n" may be a, t, c, g, other or unknown
  misc_feature (519)..(519): "n" may be a, t, c, g, other or unknown
  misc_feature (555)..(555): "n" may be a, t, c, g, other or unknown
atcttctcaccgaagcttagtacagcgggttgaaacaatttctctaggtgagcacccctgtgacagaggagaacaagtaactctcttcctcttcaatgattgcctagagatagcaagaaaacggcacaaggttattggcacttttaggagtcctcatggccaaacccgacccccagcttctcttaagcatattcacctaatgcctctttctcagattaagaaggtattggacataagagagacagaagattgccataatgcttttgccttgcttgtgaggccaccaacagagcaggcaaatgtgctactcagtttccagatgacatcagatgaacttccaaaagaaaactggctaaagatgctgtgtcgacatgtagctaacaccatttgtaaagcagatgctgagaatcttatttatactgctgatccagaatcctttgaagtaaatacaaaagatatggacagtacattgagtagagctcaagggcaataaaaaggncttcaaaaagggtacagggnattccctttctccaaactccaaaagggctcttcgangg

SEQ ID NO: 2566 - DNA, 471 bp, Homo sapiens
  misc_feature (436)..(436): "n" may be a, t, c, g, other or unknown
  misc_feature (439)..(439): "n" may be a, t, c, g, other or unknown
  misc_feature (468)..(468): "n" may be a, t, c, g, other or unknown
gaaagactggagccgtttccttgtggctggagcgcttcccgtagcctcggggaaggagcaggatttagaggaccactagttggaccccatcctcgtgctggaggaacaggaacctctttcaggagctataaaagaaaggggggaatcatgtccacaattgcagctttctatggcggcaagtccatcctcatcacgggggccacaggctttctgggcaaagtgctaatggagaagctgtttcgcaccagcccagacctgaaagtcatttacatccttgtgaggcccaaggctggccagacactgcagcagagggttttccagatcctagacagtaagctatttgagaaagtcaaagaagtttgtccaaatgtgcatgagaagatcagagctatttatgcagatctcaatcagaatgactttgcccatcagcaaaganganatgcaggagcttctctcctgtaacaaacnaga

SEQ ID NO: 2567 - DNA, 516 bp, Homo sapiens
  misc_feature (501)..(501): "n" may be a, t, c, g, other or unknown
  misc_feature (506)..(506): "n" may be a, t, c, g, other or unknown
  misc_feature (513)..(513): "n" may be a, t, c, g, other or unknown
cgcgatggaggccgccgcccagttcttcgtcgagagcccggacgtggtctacggccccgaggccatcgaggcgcaatacgagtaccggacgacgcgcgtcagccgcgagggtggcgttctcaaggtgcaccccacgtccacgcgcttcaccttccggaccgcccggcaggtgccccggctcggggtcatgcttgtcggctggggcgggaacaacggctccacactcaccgccgcggtgctggccaatcgactgcgtttgtcctggcccacgcgcagggccgcaaggaggccaactactacggctcgctgactcaggcgggcaccgtgagcctgggcctggacgccgagggccaggaggtgttcgtacccttcagcgcggtgctgcccatggtggcgcccaacgacctcgtgttcgatggctgggacatctcgtcgtgaacctggccgaagcgatgcggcgcgcgaaagtgctggaactggggcttcaagaagaaattttgncgaanatgaggncct

SEQ ID NO: 2568 - DNA, 529 bp, Homo sapiens
  misc_feature (20)..(20): "n" may be a, t, c, g, other or unknown
  misc_feature (488)..(488): "n" may be a, t, c, g, other or unknown
  misc_feature (524)..(524): "n" may be a, t, c, g, other or unknown
  misc_feature (528)..(528): "n" may be a, t, c, g, other or unknown
gttgccagggagcggcgcgngagccctgaggggactgcggcggctgcgcggaggagcgaggcgcttgctggggtcggggctgcgcgacggcgcaagggctgcggggagcgccgcgcaggccgtgcagttcctagcgaggaggcgccgccgccattgccgctctctcggtgagcgcaccccgctctccgggccgggccttcgcgggccaccggcgccatgggccagtgcggcatcacctcctccaagaccgtgctggtctttctcaacctcatcttctggggggcagctggcattttatgctatgtgggagcctatgtcttcatcacttatgatgactatgaccacttctttgaagatgtgtacacgctcatccctgctgtagtgatcatagctgtaggagccctgcttttcatcattgggctaattggctgctgtgccacaatccgggaaagtcgctgtggacttgccacgtttgtcatcatcctgcncttggtttttgtcacagaagttgtttagtgggtttnggana

SEQ ID NO: 2569 - DNA, 520 bp, Homo sapiens
  misc_feature (469)..(469): "n" may be a, t, c, g, other or unknown
  misc_feature (494)..(494): "n" may be a, t, c, g, other or unknown
  misc_feature (517)..(517): "n" may be a, t, c, g, other or unknown
accacgcgtctcatccatggcttccgcggactcgcgccggctggcagatggcggcggtgccgggggcaccttccagccctacctagacaccttgcggcaggagctgcagcagacggacccaacgctgttgtcagtagtggtggcggttcttgcggtgctgctgacgctagtcttctggaagttaatccggagcagaaggagcagtcagagagctgttcttcttgttggcctttgtgattccgggaaaacgttgctctttgtcaggttgttaacaggcctttatagagacactcagacgtccattactgacagctgtgctgtatacagagtcaacaataacaggggcaatagtctgaccttgattgaccttcccggccatgagagtttgaggcttcagttcttagagcggtttaagtcttcagccggggctattgtgtttgttgtggatagtgcagcattccagcgagangtgaaagatgtggctgagtttctgnatccaagtcccccattgacatanggg

SEQ ID NO: 2570 - DNA, 544 bp, Homo sapiens
  misc_feature (539)..(541): "n" may be a, t, c, g, other or unknown
actctgctgccggcttctcggagcggcgctgggcgaccagagcagggtcgagatgtcctacatcccgggccagccggtcaccgccgtggtgcaaagagttgaaattcacaagctgcgtcaaggtgagaacttaatcctgggtttcagcattggaggtggaatcgaccaggacccttcccagaatcccttctctgaagacaagacggacaaggtgagggggtctggggtcctgggaccgctccatggggcacaggggcctgagatggtgggtctctgcttcctgggcctgcatggaaggaacagacttcatctctcaaaccatgctctctaagaaggcatcggaagtgacctagtgagaataaggacgggtggggtgaggaagggctgctcagacagagcccaggaggagcaggaggcggccatcagcagggccggtgcatggtggtgcagcaactctgccccggctctctcagaacatcctcactgaccatatgtgctgggaaaagctgggttcaagggaaaaaggacggctaaaaatnnncca

SEQ ID NO: 2571 - DNA, 587 bp, Homo sapiens
  misc_feature (425)..(425): "n" may be a, t, c, g, other or unknown
  misc_feature (450)..(450): "n" may be a, t, c, g, other or unknown
  misc_feature (474)..(474): "n" may be a, t, c, g, other or unknown
aaaaaccatggatcctggaggtgcccgcgaacactgcttgtcgcctgggcaaccggagaggacgaagcaggacctaggtggcggcggtggtaccggctgcaatggtgtccaatcccgtgcatggcttgccctttcttccgggcacgtcctttaaggactctacgaaaacagccttccacagaagtcagacgctgagctacaggaacggctatgcaattgttcgacgtccaacagttgggataggcggagaccggctccagttcaaccagctgtcccaggctgagctggatgagttggccagtaaggcaccagtcttaacttatggccaacctaaacaagccccacctgcggattttattcctgcgcatgtggcctttgacaaaaaggtactgaaatttgatgcctatttccaagaagatgttccnatgtcaaactgaggaaccagtatangggttccgtcaggtgaacatttantaattaatctagaaagatgaccagcatgtctgtcataagagcctgttgtagaaaattctgggaatccttcaagggcaagttaattaaaaccgccagcggggtagccaagaatt

SEQ ID NO: 2572 - DNA, 690 bp, Homo sapiens
  misc_feature (12)..(12): "n" may be a, t, c, g, other or unknown
  misc_feature (231)..(231): "n" may be a, t, c, g, other or unknown
  misc_feature (422)..(422): "n" may be a, t, c, g, other or unknown
  misc_feature (544)..(544): "n" may be a, t, c, g, other or unknown
  misc_feature (574)..(574): "n" may be a, t, c, g, other or unknown
  misc_feature (612)..(612): "n" may be a, t, c, g, other or unknown
  misc_feature (635)..(635): "n" may be a, t, c, g, other or unknown
  misc_feature (644)..(644): "n" may be a, t, c, g, other or unknown
  misc_feature (677)..(677): "n" may be a, t, c, g, other or unknown
  misc_feature (687)..(687): "n" may be a, t, c, g, other or unknown
tcttccaacagnaacgttgggaagacgagcaatatctttgggctgcagaggatcttcccagccggctccattcccctaaccaggccagcccattccacttcagtgtccatgtccaggctgtcactgccctccaaaaatggttcaaagaagaaaggcctgaagcccaaggaactcttcaagaaggcagagcgaaagggcaaggagagttcagccttggggcctgctggccanttgagctataatctcatggacacatacagtcatcaggcactgaagacaggctctttccagaaagcaaagttcaacatcactggtgcctgcttgaatgactcagatgacgactcaccagacttggaccttgatggaaatgagagcccattggccctattgatgtctaacggcagtacgaaaagggtgaagantttatccaaatctcggcgaaaccaagatagcaaagaaagtagacaaggctaggctgatggcagaacaggtgatggaagacgaatttgacttggattcagatgatgagctgcagattgacganagattgggaaaggagaaagggaccctgatnataagacaaaatttccccgggaaattgcccgtgcgaanccttgctctgaacccaacccganttcgtgaancaggaaaaatttaattttgacatttgaaggaangactattccnacc

SEQ ID NO: 2573 - DNA, 760 bp, Homo sapiens
  misc_feature (622)..(622): "n" may be a, t, c, g, other or unknown
  misc_feature (663)..(663): "n" may be a, t, c, g, other or unknown
  misc_feature (686)..(686): "n" may be a, t, c, g, other or unknown
  misc_feature (708)..(708): "n" may be a, t, c, g, other or unknown
  misc_feature (712)..(712): "n" may be a, t, c, g, other or unknown
  misc_feature (749)..(749): "n" may be a, t, c, g, other or unknown
aattactatgaaattctgggagtttctcgagatgctagtgacgaagagcttaagaaagcttacagaaaactcgccctgaaatttcaccctgacaagaactgtgctcctggagcaacagatgctttcaaagcaataggaaatgcatttgcagtcctgagcaatcctgataagagacttcgctatgatgaatacggagatgaacaggtgactttcactgcccctcgagccagaccttataattattacaggggattttgaagctgacatcactccagaagagctgttcaacgtcttctttggaggacattttcctacaggaaatattcatatgttttcaaatgtgacagatgacacttactattaccgtcgacggcaccgacatgagaggacacagactcagaaggaggaggaagaagagaaacctcagactacatattctgcatttattcagctacttccagttcttgtgattgtgattatatctgtcattactcagctgctggctactaatcccccatatagtctgttctataaatcgaccttgggctacaccatttctagagaaactcataacctgcaggtgccttactttgtgggataaaaactttgacaagggctacangaaggagcttctctgccttgactttgggagaaaaccattanaaaaaggattacctttgattatntccagactagttgtttgggaangganaaaccacaaaagtccgaactgaacaaattttggggcngggatttttcc

SEQ ID NO: 2574 - DNA, 629 bp, Homo sapiens
  misc_feature (368)..(368): "n" may be a, t, c, g, other or unknown
  misc_feature (537)..(537): "n" may be a, t, c, g, other or unknown
  misc_feature (560)..(560): "n" may be a, t, c, g, other or unknown
  misc_feature (580)..(580): "n" may be a, t, c, g, other or unknown
  misc_feature (588)..(588): "n" may be a, t, c, g, other or unknown
  misc_feature (601)..(601): "n" may be a, t, c, g, other or unknown
gtgactgtggagtttgaattgggtggcggttgactgtagagccgctctctctcactggcacagcgaggttttgctcagcccttgtctcgggaccgcagcctccgccgagcgccatggctcctaggaagggcagtagtcgggtggccaagaccaactccttacggaggcggaagctcgcctcctttctgaaagacttcgaccgtgaagtggaaatacgaatcaagcaaattgagtcagacaggcagaacctcctcaaggaggtggataacctctacaacatcgagatcctgcggctccccaaggctctgcgcgagatgaactggcttgactacttcgcccttggaggaaacaaacaggccctggaagangcggcaacagctgacctggatatcaccgaaataaacaaactaacagcagaagctattcagacacccctgaaatctgccaaaacacgaaaggtaatacaggtagatgaaatgatagtggaagaggaagaagaagaagaaaatgaacgttagaatcttcaaactgcaagantcaaaaggtgtcctccatccaanaagaaaactcagtccatacnaggaaaangaaaagggaaaangtcaagccgtgctaacactgttacccca

SEQ ID NO: 2575 - DNA, 732 bp, Homo sapiens
  misc_feature (520)..(520): "n" may be a, t, c, g, other or unknown
  misc_feature (592)..(592): "n" may be a, t, c, g, other or unknown
  misc_feature (598)..(598): "n" may be a, t, c, g, other or unknown
  misc_feature (650)..(650): "n" may be a, t, c, g, other or unknown
  misc_feature (652)..(652): "n" may be a, t, c, g, other or unknown
  misc_feature (659)..(659): "n" may be a, t, c, g, other or unknown
  misc_feature (695)..(695): "n" may be a, t, c, g, other or unknown
  misc_feature (699)..(699): "n" may be a, t, c, g, other or unknown
cttccgggtgagggtcctgcagcccgtgaatccctggtcccgccgagacttggacctggtgcgaactggaggcgaagcgggtgcacccacaacctataggaagggctggcggcgagctctgagcactcgggcgtcggagggaacgctctgctttcaacactcttggccctttctcaagagaacatgaaaatgaaaaaatttcagataccagtttcattccaggacctgactgtgaacttcacccaagaggaatggcagcaactggaccctgctcagaggctcctgtacagggatgtgatgctggagaactacagcaacttggtctctgtggggtatcatgttagcaaaccagatgtgattttcaaattggagcaaggagaagagccatggatagtggaggaattctcaaatcagaactacccagacattgatgatgccttagagaagaacaaggaaatccaagataaacatttgacacaaactgtattcttcagcaacaaaacactgattacagaaaganagaatgtatttggggaaacacttaatctgggcatgaatagtgttccctcaagaaaaatgccctataaatgtnatccangaaggaaacagtttgaaaactaattcagaagttattgttgccaagaaaaccnanaaaacanaaagattcctgatggataccgtgggatttggggaancatnaaaaaaagtcctttggggaaatgaaaaaattcc

SEQ ID NO: 2576 - DNA, 825 bp, Homo sapiens
  misc_feature (647)..(647): "n" may be a, t, c, g, other or unknown
  misc_feature (689)..(689): "n" may be a, t, c, g, other or unknown
  misc_feature (770)..(770): "n" may be a, t, c, g, other or unknown
  misc_feature (784)..(784): "n" may be a, t, c, g, other or unknown
  misc_feature (792)..(792): "n" may be a, t, c, g, other or unknown
  misc_feature (807)..(807): "n" may be a, t, c, g, other or unknown
  misc_feature (819)..(819): "n" may be a, t, c, g, other or unknown
ttgttcagtcctcaattgttggacattttttttattataatgatgccatgatgatcgtttatgattcactgtttttattttttgatttctttgattttagtggaggtgaacatttccccataataatgagcttcattgatttgtaaattatattatctttgagattatattcaaagctataaaatcatcaactcttaggatcacaggcaacctcaaaagttgtctagttcccatctattcctcgaccctctctacggagtttgtataaaacccatattttcattacttcctaactctgataattataggggatatattttaaggattaaaactagtatcttaaatgtttttatatcagtcagtttaaaaactaatattcagtttagtctttcagaactttgagtcacgaaatgcatctttaaaagcagggtacatttattgaaataaaacactctacagtgatctggatctttttttaatttatttttttattatacttttaagttctgggatacatgtgcagaatgtgcaggcttgttacataggtatacacgtgccacggtggtttactgcacccatcaacctgtcatctacattaggtatttctcctaatgctatccctcccctaccatcccaccccctgacangcgccttgggtgtgtgatgtttggatcgttttttttccttgnaacattacaaacgttaggtacattacccttttcctgtttggtttgccaaacattattgaaattgttttttttcccgaaaanaaaggaattttccnctggtttncaacaccaccaggtncccttaccaggnttttaa

SEQ ID NO: 2577 - DNA, 755 bp, Homo sapiens
  misc_feature (265)..(265): "n" may be a, t, c, g, other or unknown
  misc_feature (334)..(334): "n" may be a, t, c, g, other or unknown
  misc_feature (368)..(368): "n" may be a, t, c, g, other or unknown
  misc_feature (380)..(380): "n" may be a, t, c, g, other or unknown
  misc_feature (434)..(434): "n" may be a, t, c, g, other or unknown
  misc_feature (510)..(510): "n" may be a, t, c, g, other or unknown
  misc_feature (671)..(671): "n" may be a, t, c, g, other or unknown
  misc_feature (681)..(681): "n" may be a, t, c, g, other or unknown
  misc_feature (688)..(688): "n" may be a, t, c, g, other or unknown
  misc_feature (727)..(727): "n" may be a, t, c, g, other or unknown
  misc_feature (736)..(736): "n" may be a, t, c, g, other or unknown
attctcatggtcagtagcaacttttggttcaaatatcccaaaacatgctcaaaagtagaacattttgtttcaatattaggaaagtgctttgaatccccttggacgacaaaagcgttgtctgagacagcatgcgaagactcagaggaaaacaagcagagaataacaggtgcccagactctaccaaagcatgtttctaccagcagtgatgaagggagccccagtgccagtacaccaatgatcaataaaactggctttaaattttcanctgagaagcctgtgattgaagttcccagcatgacaatcctggataaaaaggatggagagcaggccaaanccctgtttgagaaagtgaggaagttccgtgcccntgtggaagatantgacttgatctataaactctatgtggtccaaacagttatcaaaacagccaagtncatttttattctctgctatacagcgaactttgtcaacgcaatcagctttgaacacgtctgcaagcccaaagttgancatctgattggttatgaagtatttgagtgccccacaatatggcttacatgttgaaaaagcttctcatccagttacatatccattatttgtgtttatggctttatctgcctctacactctcttctggttattccggatacctttgaaaggaatattctttcnaaaaaagtcngaaaaanaaaaacagttttagtgacattccaaaatttcaaaaaacnaatttgggnttcctccttcccatgggta

SEQ ID NO: 2578 - DNA, 576 bp, Homo sapiens
  misc_feature (299)..(299): "n" may be a, t, c, g, other or unknown
  misc_feature (358)..(358): "n" may be a, t, c, g, other or unknown
  misc_feature (377)..(377): "n" may be a, t, c, g, other or unknown
  misc_feature (405)..(405): "n" may be a, t, c, g, other or unknown
  misc_feature (501)..(501): "n" may be a, t, c, g, other or unknown
  misc_feature (513)..(513): "n" may be a, t, c, g, other or unknown
  misc_feature (534)..(534): "n" may be a, t, c, g, other or unknown
  misc_feature (543)..(543): "n" may be a, t, c, g, other or unknown
  misc_feature (569)..(569): "n" may be a, t, c, g, other or unknown
agctgatcgcaagactaggcaacctccagccagtccctgggtcgggcggatcctcccagaggtggcacaatggagcgatctccaggagagggccccagccccagccccatggaccagccctctgctccctccgaccccactgaccagccccccgctgctcacgcaaagccagacccaggttctgggggccaacctgctggccctggcgcggcgggtgaggccctggcggtgctgacttcattcgggaggcggttgctggtgctgatacctgtgtatttggccggggcagtgggactcancgtgggtttcgtgctcttcggcctcgccctctacctgggctggcgccgggtccgcgacnagaaagaacggagccttcnagcagcgaggcagctactggacgacgangagcagctcactgcgaaaactctctatatgagtcatcgagagctacctgcctgggtcagcttcccagacgtggaaaaggctgaatggctcaataanattgtggcccangtctggcccttcctgggccantatatgganaacttctggctgaaactgtggctccngctgtta

SEQ ID NO: 2579 - DNA, 467 bp, Homo sapiens
  misc_feature (136)..(136): "n" may be a, t, c, g, other or unknown
  misc_feature (272)..(272): "n" may be a, t, c, g, other or unknown
  misc_feature (374)..(374): "n" may be a, t, c, g, other or unknown
  misc_feature (405)..(405): "n" may be a, t, c, g, other or unknown
  misc_feature (411)..(411): "n" may be a, t, c, g, other or unknown
  misc_feature (417)..(417): "n" may be a, t, c, g, other or unknown
  misc_feature (420)..(420): "n" may be a, t, c, g, other or unknown
agagtccccgggccaagatggctgcgcggtgctccacacgctggttgctggtggttgtggggaccccgcggctgccggctatatcgggtagaggggcccggccgcccagggagggcgtggtgggggcatggctganccgcaagctgagcgtccccgcctttgcgtcttccctgacctcttgcggcccccgagcgctgctgacattgagacctggtgtcagccttacaggaacaaaacataaccctttcatttgtactgcctccttccacacnagtgcccctttggccaaagaagattattatcagatattaggagtgcctcaaaatgccagccagaaagagatcaagaaagcctattatcagcttgccaagaantatcaccctgacacaaataaggatgatcccnaagccnaggganaanttctcccagctggcagaaacctatgaagttttgagtgatgaagtgaa

SEQ ID NO: 2580 - DNA, 593 bp, Homo sapiens
  misc_feature (343)..(343): "n" may be a, t, c, g, other or unknown
  misc_feature (477)..(477): "n" may be a, t, c, g, other or unknown
  misc_feature (507)..(507): "n" may be a, t, c, g, other or unknown
  misc_feature (525)..(525): "n" may be a, t, c, g, other or unknown
  misc_feature (550)..(550): "n" may be a, t, c, g, other or unknown
  misc_feature (582)..(582): "n" may be a, t, c, g, other or unknown
  misc_feature (589)..(589): "n" may be a, t, c, g, other or unknown
gctgcttggtaacaatggggaagataatggctgcctgagcaacgtctccgagcaggcgctgagctagaggcgggtctcaaccagctactcattggaggcgggcttgagagcggcggccagggaggtgcggagcagcctcggcggcggcggccgaaccaaccgagtcggatcctgaccctaaaacctagtattttccacttgttcatcaatatggaaaactcagattccaatgacaaaggaagtggtgatcagtctgcagcacagcgcagaagtcagatggaccgattggatcgagaagaagctttctatcaatttgtaaataacctgagtgaagaagattatnggcttatgagagataacaatttgctaggcaccccaggtgaaagtactgaggaagagttgctgagacgactacagcaaattaaagaagcccaccaccgcaaaactcagatgaaaatagaggaggagactcttcanatgatgtgtctaatggtgactctataatanactggcttaactctgtcngacaaactggaaatacaacaagaantgggcaaagaagaaaccaatcttggagaacantgaatcngact

SEQ ID NO: 2581 - DNA, 892 bp, Homo sapiens
  misc_feature (215)..(215): "n" may be a, t, c, g, other or unknown
  misc_feature (399)..(399): "n" may be a, t, c, g, other or unknown
  misc_feature (475)..(475): "n" may be a, t, c, g, other or unknown
  misc_feature (674)..(674): "n" may be a, t, c, g, other or unknown
  misc_feature (719)..(719): "n" may be a, t, c, g, other or unknown
  misc_feature (779)..(779): "n" may be a, t, c, g, other or unknown
  misc_feature (782)..(782): "n" may be a, t, c, g, other or unknown
  misc_feature (812)..(812): "n" may be a, t, c, g, other or unknown
  misc_feature (832)..(832): "n" may be a, t, c, g, other or unknown
  misc_feature (849)..(849): "n" may be a, t, c, g, other or unknown
  misc_feature (884)..(884): "n" may be a, t, c, g, other or unknown
  misc_feature (892)..(892): "n" may be a, t, c, g, other or unknown
ttttagatgtatttcaagctgtgaagagtttacgacttcagagaccacatatggtgcaaaccctggaacagtatgaattctgctacaaagtggtacaagattttattgatatattttctgattatgctaatttcaaatgaagattcctgccttaaaatattttttaatttaatggtcagtatattttgtaaaaatcatgttaatttatttcatanttgacattaatatcttccctaatttctttgtatatattttgttatgccttaaaggccacctgctatacagttgttaaatcttaaatatgctttttaaaaattggaataatgtattaaggtcaaataatatcccataaaatatatatttctgctaatattagtaaatatcttaatttttcattanattcatatcatttaatttcacatattcaacacctttaaatgttgtaatcttaatatgcgaagtgtgcctctgcaanatactaacacaaagctcatgttaagaaaacagttgaggactcggaagtcagttgaaaatgcactttcctaacagtgaattcacaaccctgaacagcagcatttttggaaggcaaactgttcgtgatggtacaatgtaaatgggggacttctgtaaagttctcagtttcggtccatgtggtttatctttacattttgaanatcaaaaaaatctttacaacctgaaatccaggtcctaaaacaccnctaaaattactggggactataaattaatattttaaaaaatgcctgtttctacacccatcnaanaacggttgtctacccctaatctttgggtgnaaccaaaaaaaaaaattttnaatgcctgggggtggtnccccgttgaaacccccgggggtttggggtttcaanaaaaaccn

SEQ ID NO: 2582 - DNA, 776 bp, Homo sapiens
  misc_feature (535)..(535): "n" may be a, t, c, g, other or unknown
  misc_feature (566)..(566): "n" may be a, t, c, g, other or unknown
  misc_feature (627)..(627): "n" may be a, t, c, g, other or unknown
  misc_feature (703)..(703): "n" may be a, t, c, g, other or unknown
  misc_feature (710)..(710): "n" may be a, t, c, g, other or unknown
  misc_feature (712)..(712): "n" may be a, t, c, g, other or unknown
  misc_feature (719)..(719): "n" may be a, t, c, g, other or unknown
  misc_feature (737)..(737): "n" may be a, t, c, g, other or unknown
agttttgtttacttaccatggcaatagtggccttttagccactaaaagtgatgaaactggatggacaacgttttttgactatgacagtgaaggtcgtctgacaaatgttacgtttccaactggagtggtcacaaacctgcatggggacatggacaaggctatcacagtggacattgagtcatctagccgagaagaagatgtcagcatcacttcaaatctgtcctcgatcgattctttctacaccatggttcaagatcagttaagaaacagctaccagattggttatgacggctccctcagaattatctacgccagtggcctggactcacactaccaaacagagccgcacgttctggctggcaccgctaatccgacggttgccaaaagaaacatgactttgcctggcgagaacggtcaaaacttggtggaatggagattccgaaaagagcaagcccaagggaaagtcaatgtctttggccgcaagctcagggttaatggcagaaacctcctttcagttgactttgatcgaacaacnaagacagaaaagatctatgacgaccaccgtnaatttctactgaggatcgcctacgacacgtctgggcacccgactctctggctgccaagcancaagctgatgggccgtcaatgtcacctattcctccacaggtccaattgccagcatccagcgaaggcaccactagcnaaaaaantnaattatnacggacaggggaagatcntgtctcgggtctttggctgatggttaaacatggaatttc

SEQ ID NO: 2583 - DNA, 597 bp, Homo sapiens
  misc_feature (163)..(163): "n" may be a, t, c, g, other or unknown
  misc_feature (283)..(283): "n" may be a, t, c, g, other or unknown
  misc_feature (328)..(328): "n" may be a, t, c, g, other or unknown
  misc_feature (380)..(380): "n" may be a, t, c, g, other or unknown
  misc_feature (403)..(403): "n" may be a, t, c, g, other or unknown
  misc_feature (442)..(442): "n" may be a, t, c, g, other or unknown
  misc_feature (470)..(470): "n" may be a, t, c, g, other or unknown
  misc_feature (508)..(508): "n" may be a, t, c, g, other or unknown
  misc_feature (523)..(523): "n" may be a, t, c, g, other or unknown
  misc_feature (539)..(539): "n" may be a, t, c, g, other or unknown
  misc_feature (566)..(566): "n" may be a, t, c, g, other or unknown
  misc_feature (572)..(572): "n" may be a, t, c, g, other or unknown
agcaagcaggaagaggaggctttctaaggcggtcgctccgggaaatccgggccctaggattgtccactcatcccagtatcagcgagatacggggaagatagagttagcgacagcgtgagccagagctggagcacgtttggtgagagaccagaaagcaatggangccggagaggggaaggagcgcgttccgaaacaaaggcaagtcctgatattctttgttttgctgggcatagctcaggctagttgccagcctaggcactattcagtggccgaggaaacgganagtggctcctttgtggccaatttgttaaaagacctggggctgganataggaaaacttgctgtgaggggggccagggtcttttccaaaggaaaaaaantgcatttgcagttcgataggcanaccggggatttgttgttaaatgaaaaattggaccgggangagctttgcggccccacaaaaccctgtntcctacctttccaggttttactaaaaaatcccttgcanttttttcaggcgganctacggattagggacntaaatgatcattccccagttttcctanacaaanaaatacttttgaaaaattccaaaaa

SEQ ID NO: 2584 - DNA, 710 bp, Homo sapiens
  misc_feature (603)..(603): "n" may be a, t, c, g, other or unknown
  misc_feature (638)..(638): "n" may be a, t, c, g, other or unknown
  misc_feature (690)..(690): "n" may be a, t, c, g, other or unknown
  misc_feature (697)..(697): "n" may be a, t, c, g, other or unknown
  misc_feature (700)..(700): "n" may be a, t, c, g, other or unknown
  misc_feature (704)..(704): "n" may be a, t, c, g, other or unknown
agtgatggaggagagaagatggcggaagcggaatttaaggaccatagtacagctatggatactgaaccaaacccgggaacatcttctgtgtcaacaacaaccagcagtaccaccaccaccaccatcaccacttcctcctctcgaatgcagcagccacagatctctgtctacagtggttcagaccgacatgctgtacaggtaattcaacaggcattgcatcggccccccagctcagctgctcagtaccttcagcaaatgtatgcagcccaacaacagcacttgatgctgcatactgcagctcttcagcagcagcatttaagcagctcccagcttcagagccttgctgctgttcaggcaagtttgtccagtggaagaccatctacatctcccacaggaagtgtcacacagcagtcaagtatgtcccaaacgtctgtaagttccctaaattttttttttcctggatttaaaattttaaagaattgttttccaaaagtaaactgttgttatttatgaagctgttattataatttgttgcatgctgtttaaagtaacaattgcccagaaatagaaatgataaaattcaagaattcagaactagtgttnaacttatgaaaatctgaatcttaaaaaaatctttnggtattatttctggtatatccatttgcactgatcatgttccaaatcttaagntgggttncancttnctgtgt

SEQ ID NO: 2585 - DNA, 518 bp, Homo sapiens
  misc_feature (369)..(369): "n" may be a, t, c, g, other or unknown
  misc_feature (449)..(449): "n" may be a, t, c, g, other or unknown
  misc_feature (482)..(482): "n" may be a, t, c, g, other or unknown
  misc_feature (495)..(495): "n" may be a, t, c, g, other or unknown
  misc_feature (503)..(503): "n" may be a, t, c, g, other or unknown
  misc_feature (509)..(509): "n" may be a, t, c, g, other or unknown
gagtcgccgctgggcctgtccgctggcgtcatggcaccgaaaaagaaagggaagaaaggcaaagccaaaggcaccccgattgtcgatgggctcgctccagaggacatgagcaaggagcagctgtttatttttaggtgaagttgagtcctccctctttcttccttgcctttcgccggccacacgccccgttgccgtgcatgggcccctgatcagtgcctcacctgacccactgcacctggccaggtggaggagcatgtcagccgcatccgggaggagctggaccgcgagcgggaggaacgaaactacttccagctggagcgggacaagatccacaccttctgggagatcacacggaggcagctggagganaagaagctgagctgcggaacaaagaccgggagatggaagaagccgaggagaggcaccaggtggagatcaaggtgtacaancagaaagtgaagcacctgctatatgagcaccanaacaacctgacanaaatgaangctganggcactgtt

SEQ ID NO: 2586 - DNA, 670 bp, Homo sapiens
  misc_feature (214)..(214): "n" may be a, t, c, g, other or unknown
  misc_feature (430)..(430): "n" may be a, t, c, g, other or unknown
  misc_feature (433)..(433): "n" may be a, t, c, g, other or unknown
  misc_feature (576)..(576): "n" may be a, t, c, g, other or unknown
  misc_feature (583)..(583): "n" may be a, t, c, g, other or unknown
  misc_feature (619)..(620): "n" may be a, t, c, g, other or unknown
  misc_feature (644)..(644): "n" may be a, t, c, g, other or unknown
agacacggaagtgctgggaggcgccgggagcccgttcggttgcgggtgtctctggccctgcggtcagccctgggaacgtcccggagagctagattcctagaggcccgattccgctagcccggaacagacaaagccagcgctcccgcccgctccccgacttaggatccgatgccggcagcgtcctggggcccccgtagcggggctggaccatgancctgctggacggcctcgcttcctcgccgcgggctccgctgcagtccagcaaggccaggatgaaaaagctcccgaagaagagccagaatgagaagtaccggctgaagtacctgcggctgcgcaaagcggccaaggccacggtgtttgaaaatgctgctatttgtgatgaaattgctcgtcttgaggaaaaatttcttaaagcaaaagaagaaagaangtncttgctaaagaaactcctccagcttcaggctctaactgaaggggaaatacaggctgcagctccttcccacagttccagtttgcccctgacttatggtgtggccagctctgtgggaactatacagggagctgggcctatttcanggcccancactggggctgaagaaccatttgggaagaaaacttnnaaaggagaaaaaagaaaaaggccnagaaaacaacaaactggaaaatcatc

SEQ ID NO: 2587 - DNA, 752 bp, Homo sapiens
  misc_feature (413)..(413): "n" may be a, t, c, g, other or unknown
  misc_feature (415)..(415): "n" may be a, t, c, g, other or unknown
  misc_feature (465)..(465): "n" may be a, t, c, g, other or unknown
  misc_feature (529)..(529): "n" may be a, t, c, g, other or unknown
  misc_feature (569)..(569): "n" may be a, t, c, g, other or unknown
  misc_feature (592)..(592): "n" may be a, t, c, g, other or unknown
  misc_feature (669)..(669): "n" may be a, t, c, g, other or unknown
  misc_feature (678)..(678): "n" may be a, t, c, g, other or unknown
  misc_feature (681)..(681): "n" may be a, t, c, g, other or unknown
  misc_feature (704)..(704): "n" may be a, t, c, g, other or unknown
  misc_feature (709)..(709): "n" may be a, t, c, g, other or unknown
tttccccatgtctaattttgggatttcagtgaggccttttccatctgtccaggagaacagaagggaaaaaaagatacttgaaagaaactgaaggaaatttaaacaaagaaacacttgaaagaaactggaaagaaaaataatttttttatgtgaacaaattttgcaagaagaaaaaagcataaaagacactaacggcaaatctatgtttaaatggaaaatcgtctaactggagaagggcggtatccaccccacattcggatcccagggtcctgaggcctcgcattgagctgggggttccctctgagccccagtgtgtgtggaatcagtgcactcttgactgggcctgtagtaaggtgctcatggggtttgtcttctcacccaccatcagaggacttttaaaatcataggcgtananagttagctatctgctgaattactgccactcttcttggtgggggctcctanctgtggctgggggctccaggcgcccctgtgattacctcctactgccaccatggcgctcattcanattccccactctcactaacattgcttccttttttgaccancaggaaacagcaggtctggccanattctcacttgcccatcaatctcgttcttgggatgatttccctcattgtgatgcttctggggcacgttgaacatatncacctctanaanctaaccaggcttccttctaccanctgtngggcgggcttgggtctggtaaccttgtctgctctgccattcca

SEQ ID NO: 2588 - DNA, 734 bp, Homo sapiens
  misc_feature (48)..(48): "n" may be a, t, c, g, other or unknown
  misc_feature (588)..(588): "n" may be a, t, c, g, other or unknown
  misc_feature (607)..(607): "n" may be a, t, c, g, other or unknown
  misc_feature (654)..(654): "n" may be a, t, c, g, other or unknown
  misc_feature (656)..(656): "n" may be a, t, c, g, other or unknown
  misc_feature (682)..(682): "n" may be a, t, c, g, other or unknown
  misc_feature (724)..(724): "n" may be a, t, c, g, other or unknown
  misc_feature (728)..(728): "n" may be a, t, c, g, other or unknown
actcccgccttcatttcccatcgtgctgaggcgggtggcatggcgganaaggatgacaccggagtttgacgaagaggtggtttttgagaattctccactttaccaatacttacaggatctgggacacacagactttgaaatatgttcttctttgtcaccaaaaacagaaaaatgcacaacagagggacgacaaaagcctcctacaagagtcctaccaaaaggatctctcagtgctatttgccttcattagcttgctcgttatgcttcccgcttggtggattgtgtcttcctggctggtatggggagtgattctatttgtgtatctggtcataagagctttgagattatggaggacagccaaactacaagtgaccctaaaaaaatacagcgttcatttggaagatatggccacaaacagccgagcttttactaacctcgtgagaaaagctttacgtctcattcaagaaaccgaagtgatttccagaggatttacactggtcagtgctgcttgcccatttaataaagctggacagcatccaagtcagcatctcatcggtcttcggaaagctgtctaccgaactctaaganccaacttccaagcagcaangctagctaccctatatatgctgaaaaaactaccccctgaactctganantgacaatgtaaccaactacatctgtngtggtgccttttaaagaactggggcttgggactttattgaanaacngatttc

SEQ ID NO: 2589 - DNA, 529 bp, Homo sapiens
  misc_feature (2)..(2): "n" may be a, t, c, g, other or unknown
  misc_feature (400)..(400): "n" may be a, t, c, g, other or unknown
  misc_feature (454)..(454): "n" may be a, t, c, g, other or unknown
  misc_feature (482)..(482): "n" may be a, t, c, g, other or unknown
  misc_feature (506)..(506): "n" may be a, t, c, g, other or unknown
  misc_feature (517)..(517): "n" may be a, t, c, g, other or unknown
  misc_feature (523)..(523): "n" may be a, t, c, g, other or unknown
gnaagctgcctccgccatcttggagatgggagacgggcgatggctgtggtccttctgctaatgcaaacaacaaaacgggcacactagtcacccccgagggaggccaccatcactgtaactgttggccaaagctacaaaagaagcgagggaatccaaccgagcgcagcgacactgagaacagcttcccctgccttctgcggcggcagaagtgaagtgcctgaggaccggaaggatggtgcagtcctgctccgcctacggctgcaagaaccgctacgacaaggacaagcccgtttctttccacaagtttcctcttactcgacccagtctttgtaaagaatgggaggcagctgtcagaagaaaaaactttaaacccaccaagtatagcagtatttgttcagancactttactccagactgctttaagagagagtgcaacaacaagttactgaaaganaatgctgtgcccacaatatttctttgtnctgagccacatgacaagaaagaanatcttctgganccacanggaaca

SEQ ID NO: 2590 - DNA, 670 bp, Homo sapiens
  misc_feature (453)..(453): "n" may be a, t, c, g, other or unknown
  misc_feature (502)..(502): "n" may be a, t, c, g, other or unknown
  misc_feature (589)..(589): "n" may be a, t, c, g, other or unknown
  misc_feature (643)..(643): "n" may be a, t, c, g, other or unknown
  misc_feature (648)..(648): "n" may be a, t, c, g, other or unknown
  misc_feature (664)..(664): "n" may be a, t, c, g, other or unknown
  misc_feature (669)..(669): "n" may be a, t, c, g, other or unknown
tatatcaatacaccagtggctgaaattatcatgaaaccaaatgttggacaaggcagcacaagtgtgcaaacagctatggaaagtgaactcggagagtctagtgccacaatcaataaaagactctgcaaaagtacaatagaactttcagaaaattctttacttccagcttcttctatgttgactggcacacaaagtaaggctgttgctttcaatgcatgcaatattaactttgagtgtttactaactctgtgttttgcttacctggcttttcttccttgaagttgcttttttttttcctccaagaggaattatttaaaaagactttagtctgtgacataaccaagatttattctgtttacctaaggaacttattttcttttttgcaatttcatttattctgagtcactttatttgtaataagtgaagaattttaatacttagaaataagttgtnaagaaaataatgagaatcttaccatgctttagaggaacgtaatttctanaaatagttaaaagatgaaatactaagatattattttaccttctttatatagctgtatatactggtagtatgaaagcaactagtgtcnttgatgaatttttgggggggtatttttggtattcctaggcttgctgccacctcntttanaaaaaggtggccatcnaagcnc

SEQ ID NO: 2591 - DNA, 720 bp, Homo sapiens
  misc_feature (489)..(489): "n" may be a, t, c, g, other or unknown
  misc_feature (567)..(567): "n" may be a, t, c, g, other or unknown
  misc_feature (609)..(609): "n" may be a, t, c, g, other or unknown
  misc_feature (624)..(624): "n" may be a, t, c, g, other or unknown
  misc_feature (639)..(639): "n" may be a, t, c, g, other or unknown
  misc_feature (647)..(647): "n" may be a, t, c, g, other or unknown
  misc_feature (698)..(698): "n" may be a, t, c, g, other or unknown
  misc_feature (719)..(719): "n" may be a, t, c, g, other or unknown
gagcttgggatcgctttctgctattcaacgtcctccacctctgcccccctctccccccagccggtgacaggctgttgccctgtgatctgcaggtcctgggacgtgcacagacagctaagatgccaggacattccagaaggtgggaaaggcacctgagtaatttgactctcctgcctggacccagcgtacagatgggattgtgcttcattgctggacccagcatttagggatcgtcactcccgtggatgatcaaagctactccgggggctgaggcaggagaatcgcttgaactcgggaagcagaagttgcagtgagccaaggtcgcaccactgcactccagcccaggcgacattgtgagactccatctcaaaaaaaaagaaaaaaagtgtactaacaagacccagcacacagaggagacttttaccattgtatgaacacccatcaaacagtacacatcatcattgtgagttctgaatctcacacatagangaagtcaaaggtggaaaacttgactctcatatttggatccagtccacaggtgtgattttgacgcacacttctgcccancacctgagtaatgtgattcttcaaaattggggccggcccacnaataggattgtgccncactgctggacccantgcctaanttgatgttactctattctctgccttggtgcctactccgaaaaaaaaattgntaacatatctcagaaaccttnc

SEQ ID NO: 2592 - DNA, 551 bp, Homo sapiens
  misc_feature (147)..(147): "n" may be a, t, c, g, other or unknown
  misc_feature (168)..(168): "n" may be a, t, c, g, other or unknown
  misc_feature (262)..(262): "n" may be a, t, c, g, other or unknown
  misc_feature (330)..(330): "n" may be a, t, c, g, other or unknown
  misc_feature (338)..(338): "n" may be a, t, c, g, other or unknown
  misc_feature (454)..(454): "n" may be a, t, c, g, other or unknown
  misc_feature (521)..(521): "n" may be a, t, c, g, other or unknown
  misc_feature (524)..(524): "n" may be a, t, c, g, other or unknown
  misc_feature (528)..(528): "n" may be a, t, c, g, other or unknown
  misc_feature (538)..(538): "n" may be a, t, c, g, other or unknown
cagctgaatgggcgcgagagcggcgctgggggcgggtgggggcgcggggtaccgggctggcggccggccggcgccccctcattagtatgcggacgaaggcggcgggctgcgcggagcggcgtcccctgcagccgcggaccgaggcancggcggcacctgccggccgancaatgccaagtgagtacacctatgtgaaactgagaagtgattgctcgaggccttccctgcaatggtacacccgagctcaaagcaagatgagaangcccagcttgttattaaaagacatcctcaaatgtacattgcttgtgtttggagtgtggatcctttatntcctcaanttaaattatactactgaagaatgtgacatgaaaaaaatgcattatgtggaccctgaccatgtaaagagagctcagaaatatgctcagcaagtcttgcagaaggaatgtcgtcccangtttgccaagacatcaatggcgctgttatttgagcacaggtatagcgtggacttactcccttttgtngcncaangccccccaanacagtgaagctga

SEQ ID NO: 2593 - DNA, 716 bp, Homo sapiens
  misc_feature (641)..(641): "n" may be a, t, c, g, other or unknown
  misc_feature (652)..(652): "n" may be a, t, c, g, other or unknown
  misc_feature (656)..(656): "n" may be a, t, c, g, other or unknown
  misc_feature (695)..(695): "n" may be a, t, c, g, other or unknown
  misc_feature (716)..(716): "n" may be a, t, c, g, other or unknown
gaagtctcgtatcgcgcccgggaggcgccggagcccagcggctggcgccagatccaggctcctggaagaaccatgtccggcagctactggtcatgccaggcacacactgctgcccaagaggagctgctgtttgaattatctgtgaatgttgggaagaggaatgccagagctgccggctgaaaattacccaaccaagagaaatctgcaggatggactttctggtcctcttcttgttctacctggcttcggtgctgatgggtcttgttcttatctgcgtctgctcgaaaacccatagcttgaaaggcctggccaggggaggagcacagatattttcctgtataattccagaatgtcttcagagagccgtgcatggattgcttcattaccttttccatacgagaaaccacaccttcattgtcctgcacctggtcttgcaagggatggtttatactgagtacacctgggaaagtatttggctactgtcaggaagctgggagttgtccttgcattaccttcttctgccctatctgctgctaggtgtaaacctgttttttttcaccctgacttgtggaaccaatcctgggcattataacaaaagcaaatgaattattatttcttcatgtttatgaatttgaatgaantgatgtttccnaaanaacgtgaaggtgctctacttgtgatttaaggaaaaccanctcgatccaaagccactggcn

SEQ ID NO: 2594 - DNA, 642 bp, Homo sapiens
  misc_feature (119)..(119): "n" may be a, t, c, g, other or unknown
  misc_feature (365)..(365): "n" may be a, t, c, g, other or unknown
  misc_feature (367)..(367): "n" may be a, t, c, g, other or unknown
  misc_feature (413)..(413): "n" may be a, t, c, g, other or unknown
  misc_feature (481)..(481): "n" may be a, t, c, g, other or unknown
  misc_feature (497)..(497): "n" may be a, t, c, g, other or unknown
  misc_feature (563)..(563): "n" may be a, t, c, g, other or unknown
  misc_feature (583)..(583): "n" may be a, t, c, g, other or unknown
  misc_feature (593)..(593): "n" may be a, t, c, g, other or unknown
  misc_feature (603)..(603): "n" may be a, t, c, g, other or unknown
  misc_feature (605)..(605): "n" may be a, t, c, g, other or unknown
gcggggcctctaccggcccgatggagcgcgcgggcgctactagccgcgggggccaagcccctggcttcttactgcggcttcatactgagggccgagccgaggcggcgcgggtgcaggancaggacttacggcagtgggggctgacagggattcacctacgctcttaccagctggagggagtaaactggctcgcccagcgcttccattgtcagaatggctgtatcctgggagatgagatgggcctggggaagacctgccagactattgctctcttcatttatttggcaggaagattaaatgatgaagggccatttctgattctttgtcccttgtctgttttgagcaactggaaagaagaaatgcananatttgctccaggtctttcctgtgtaacatatgcaggcgacaaggangaaagacctgccttcagcaagacctgaaacaggaatcacgttttcatgttctactgactacctatganatttgcttgaaagatncatcatttctaaaatcattcccttggagtgttcttgttgtggatgaactcacaggttgaaaaaccnaagctcccttgctgcataanaacttgtcanaattctccantnatcttcaatctccctgttgaccggaactccccatcca

SEQ ID NO: 2595 - DNA, 539 bp, Homo sapiens
  misc_feature (508)..(508): "n" may be a, t, c, g, other or unknown
  misc_feature (511)..(511): "n" may be a, t, c, g, other or unknown
  misc_feature (525)..(525): "n" may be a, t, c, g, other or unknown
  misc_feature (528)..(528): "n" may be a, t, c, g, other or unknown
  misc_feature (532)..(532): "n" may be a, t, c, g, other or unknown
cagagcgtcggcgccacggcgagaacacatcttcgccgccgagctgagctgggccgagccggaggttgtggtgtctgactgcgctgggcaccctcgggccgcagcggtgctctggggccaggtgccaccggccattgtccaggcagctgtgtgcaagccaaagaagcatgaggacactggaagactcctcggggacagtcctgcaccgcctcatccaggagcagctgcgctacggcaacctgactgagacgcgcacgctgctagccatccagcagcaggccctgaggggtggggctggaactgggggtacagggagcccccaggcctccctggaaatcctggccccagaggacagtcaggtgctgcagcaggccaccaggcaggaaccccagggccaggaacaccagggcggtgagaaccacctggcagaaaacaccctctaccggctatgcccacagcccagcaagggagaggagctgcccacctatgaagaggcaaagcccactcncantactatgcggccancangcanggacccg

SEQ ID NO: 2596 - DNA, 656 bp, Homo sapiens
  misc_feature (300)..(300): "n" may be a, t, c, g, other or unknown
  misc_feature (483)..(483): "n" may be a, t, c, g, other or unknown
  misc_feature (497)..(497): "n" may be a, t, c, g, other or unknown
  misc_feature (533)..(533): "n" may be a, t, c, g, other or unknown
  misc_feature (612)..(612): "n" may be a, t, c, g, other or unknown
  misc_feature (634)..(634): "n" may be a, t, c, g, other or unknown
  misc_feature (636)..(636): "n" may be a, t, c, g, other or unknown
  misc_feature (642)..(642): "n" may be a, t, c, g, other or unknown
  misc_feature (645)..(645): "n" may be a, t, c, g, other or unknown
gtcgtcgctgccgccgccaccgccctcggccgctgccgccgccaccgccctcggccgctgccgaggcctcctgcagccatcatgtccgccagcgccgtctacgtgctggacctgaagggcaaggtgctcatctgccggaactaccgtggcgacgtggacatgtcagaggtggagcacttcatgcccatcctgatggagaaggaggaggaggggatgctgtcgcccatcctggcccacgggggggtccgtttcatgtggatcaaacacaacaacctgtatctggttgccacatccaagaanaacgcgtgcgtgtcgctggtcttttctttcctctataaggtggtgcaggtgttttccgagtacttcaagggagctggaggaggagagcatccgggacaactttgttatcatctacgagctgctggacgagctcatggacttcggctacccccagaccaccgacagcaagatcctgcaggagtncatcactcaggaangccacaagctggaaacaggggccccgcggccaccanccaccgtcaccaacgcggtgtcctggcggtccgaaagcatcaagtatcggaaagaatgaagtgttcttggacgtcatcnaatctgtcaacctcttggtcancnccaacngcnatgtctgccca

SEQ ID NO: 2597 - DNA, 580 bp, Homo sapiens
  misc_feature (407)..(407): "n" may be a, t, c, g, other or unknown
  misc_feature (461)..(461): "n" may be a, t, c, g, other or unknown
  misc_feature (485)..(485): "n" may be a, t, c, g, other or unknown
  misc_feature (531)..(531): "n" may be a, t, c, g, other or unknown
  misc_feature (534)..(534): "n" may be a, t, c, g, other or unknown
  misc_feature (564)..(564): "n" may be a, t, c, g, other or unknown
  misc_feature (575)..(575): "n" may be a, t, c, g, other or unknown
attttgcgggaagaggaggcgctgtacctgcagtgctgcttttcttgcctagactctaggaactatccgagctccactccccacaacatactcaaaggaacggagagaaccgggacccccctgcgggggacccggaactgatctgacaggatggcatctgatgactttgacatagtgattgaggccatgctggaagctccctataaaaaagaagaggatgagcaacaaaggaaagaagttaaaaaggattatcctagcaataccaccagcagcaccagcaacagtggcaatgagaccagtggaagcagcaccatcggggagacaagcaatcgtagtcgagatcgggatcggtatagacggagaaatagtcggagccgaagtccaggtcggcagtgtcgtcaccgtanccgtagctgggatcgtcgacatggtagtgagtcccgaagtcgggaccatcgtcntgaggatcgtgtgcattacaggantcctccacttaccactggggagccagttgataatctgagtcctgangancgtgatgcccgcacagttttctgtatgcanttagctgcccnaattc

SEQ ID NO: 2598 - DNA, 711 bp, Homo sapiens
  misc_feature (546)..(546): "n" may be a, t, c, g, other or unknown
  misc_feature (557)..(557): "n" may be a, t, c, g, other or unknown
  misc_feature (624)..(624): "n" may be a, t, c, g, other or unknown
  misc_feature (645)..(645): "n" may be a, t, c, g, other or unknown
  misc_feature (662)..(662): "n" may be a, t, c, g, other or unknown
  misc_feature (676)..(676): "n" may be a, t, c, g, other or unknown
  misc_feature (700)..(700): "n" may be a, t, c, g, other or unknown
attttttggattgtactgcatttgcaagagaccttatcctgatcctgaagacgagattccagatgagatgatccagtgcgtagtctgtgaagactggttccatggaaggcatcttggtgccactccccctgagagtggggattttcaggagatggtatgccaggcctgcatgaaacgttgttcttttttgtgggcttatgctgcacaattggcagtaaccaaaatatccactgaggatgatggattggtgcggaacattgatggaataggtgatcaggaagttatcaaacctgaaaatggagagcatcaagatagtaccctcaaagaggatgttccagaacagggaaaggatgatgtccgggaggttaaagtagagcagaacagtgaaccatgtgccggctctagttctgaatctgatctccagacagtgtttaagaatgaaagcctcaacgcagaatcaaaatctggctgcaaacttcaggagcttaaagctaagcagcttataaagaaagacactgccacctattggcccctgaactggcgtancaagttgtgtncctgccaagactgtatgaaaatgtttgggagatctagatgtcttattcctgacagatgaatacgacncagttctggcttatgaaaacnaagggaagattgcccangcccctgacaggancgatcccctaatggatacccttancagcatgaata

SEQ ID NO: 2599 - DNA, 808 bp, Homo sapiens
  misc_feature (566)..(566): "n" may be a, t, c, g, other or unknown
  misc_feature (750)..(750): "n" may be a, t, c, g, other or unknown
  misc_feature (780)..(780): "n" may be a, t, c, g, other or unknown
  misc_feature (794)..(794): "n" may be a, t, c, g, other or unknown
  misc_feature (800)..(800): "n" may be a, t, c, g, other or unknown
  misc_feature (804)..(804): "n" may be a, t, c, g, other or unknown
tttcatcactatggcttagcgtctccaatatacacacattttacttcacccattagaagatacgcagatgtcattgttcatcggcttttggctgtggctattggggctgactgtacttatccagagttgacagacaaacacaagcttgcagatatatgtaaaaatctaaatttccggcacaaaatggctcaatatgcccaacgtgcatcagtggcttttcatacccagttattcttcaaaagcaaaggaatagtaagtgaagaagcctatattttatttgtaagaaagaatgccattgtggtattaattccaaagtatggtttagaagggacagtcttttttgaagaaaaggacaaaccaaacccacagcttatttatgatgatgagataccctcacttaaaatagaagatacagtgttccatgtatttgataaagttaaagtgaaaatcatgttagactcatctaatcttcaacatcagaagatccgaatgtccctggtagaaccacagataccaggaaataagcattcctactgatacttcaaacatggaccttaatggacccnagaaaaagaagatgaagcttgggaaaatagctatattcaacaaaaatcttcaaagactggtttcttttttaaaagaaaaaacttgaaagaacacttctaagcctaagtgtgtgatacagtttgttacttttaagttcattttgaataaatttcagacatctgcatttttattgaaacagttgantgtttctgaaccctcatactactattcttnctggggttgaacanaatttntttntgcc

SEQ ID NO: 2600 - DNA, 479 bp, Homo sapiens
  misc_feature (130)..(130): "n" may be a, t, c, g, other or unknown
  misc_feature (187)..(187): "n" may be a, t, c, g, other or unknown
  misc_feature (210)..(210): "n" may be a, t, c, g, other or unknown
  misc_feature (240)..(240): "n" may be a, t, c, g, other or unknown
  misc_feature (242)..(242): "n" may be a, t, c, g, other or unknown
  misc_feature (271)..(271): "n" may be a, t, c, g, other or unknown
  misc_feature (301)..(301): "n" may be a, t, c, g, other or unknown
  misc_feature (416)..(416): "n" may be a, t, c, g, other or unknown
  misc_feature (418)..(418): "n" may be a, t, c, g, other or unknown
  misc_feature (446)..(446): "n" may be a, t, c, g, other or unknown
  misc_feature (468)..(468): "n" may be a, t, c, g, other or unknown
  misc_feature (475)..(475): "n" may be a, t, c, g, other or unknown
atattttgataatggcacagcacttgtggtccagtggggaccatgtacatctccaggataattataacctggggaagcttcacattccaggcaaccctgctcatggatggacgaatcatctttggatacnaagaaattcctgtcttggtcacacagataagttcaaccaatcatccagtgaaagtcngactgtccgatgcatttgtcgtngtccacaggatccaacaaattcccaatgtncnaagaagaacaatttatgaataccaccgantagagctacaaatgtcaaaaattaccaacntttcggctgtggagatgaccccattacccacatgcctccagtttaacaaatgtggcccctgtgtatcttcccagattggcttcaactgcagttggtgtagtaaacttcaaagtcnanagagaagatgtgtgagaatacagaaccngtggaaacttcttctcgaaccnccacaancata

SEQ ID NO: 2601 - DNA, 684 bp, Homo sapiens
  misc_feature (375)..(375): "n" may be a, t, c, g, other or unknown
  misc_feature (445)..(445): "n" may be a, t, c, g, other or unknown
  misc_feature (465)..(465): "n" may be a, t, c, g, other or unknown
  misc_feature (485)..(485): "n" may be a, t, c, g, other or unknown
  misc_feature (549)..(549): "n" may be a, t, c, g, other or unknown
  misc_feature (569)..(569): "n" may be a, t, c, g, other or unknown
  misc_feature (590)..(590): "n" may be a, t, c, g, other or unknown
  misc_feature (644)..(644): "n" may be a, t, c, g, other or unknown
  misc_feature (649)..(649): "n" may be a, t, c, g, other or unknown
  misc_feature (668)..(668): "n" may be a, t, c, g, other or unknown
  misc_feature (684)..(684): "n" may be a, t, c, g, other or unknown
gcgatctctgcggggcaagatggcggcgcccagacaggcctggagcacggatgaataagagggtacccccacacggagacactgctggaatcagccacaagggtcctggagtgccctcggctgatagagactatagttcgagagttcttgcccaccagttggtctcctgtgggggcagggcctacccctagtctatacaaagtaccctgtgctactgccatgaaactacttcgtgtcctggcctcagctgggaggaatattgctgcccggctgttgagcagctttgatctccggagccgcctgtgccgcatcatagctgaggctccccaagaactggccttgcccccagaggaagctgagatgctgagcaccgangccctccgtctgtgggctgtggctgcctcctatggccagggcggttacctttacagggagctctacccantgctgatgcgggccttgcangtggtgccgcgggagctcancacccacccacctcaacccctgtccatgcagcggataacctcactgctcactctcctcacccanctaaccctggcagccggcantacccctgctgaaaccatcantgattctgctgaaggcagcctctcggccacccttccttaatcccttggacacangtttntgggctccacctcttgttnaaccgtttctaaggcn

SEQ ID NO: 2602 - DNA, 655 bp, Homo sapiens
  misc_feature (434)..(434): "n" may be a, t, c, g, other or unknown
  misc_feature (439)..(439): "n" may be a, t, c, g, other or unknown
  misc_feature (570)..(570): "n" may be a, t, c, g, other or unknown
  misc_feature (590)..(590): "n" may be a, t, c, g, other or unknown
  misc_feature (611)..(611): "n" may be a, t, c, g, other or unknown
  misc_feature (632)..(632): "n" may be a, t, c, g, other or unknown
  misc_feature (644)..(644): "n" may be a, t, c, g, other or unknown
atgagaacggcgtcttcatgtgcgccgagggcaccggcaagttctgtcccctgaggtccttcccagacactgtctacaagaagctggtccagagagagaagactttaaaggttagaggagtggaccgcactccctacctgggggatgtcgctgttgtcgtgcaccctgggaaaaaagagatgggaaccccactcgcagacactcctacccggcccgtcacccggcatgggggcatgagggaccttcacgaatccagcttcagcctctctggctctcagatcgatgaccatgttccaaagcgagcttcagctcggatcctcgctcctcccggaggaaggtcgagtggcatttggtaaaggcattgccaagccccccgagtgaggacgcaccgccgccaccagcccgcaactctccagccgaagctgcaggggcangaaangctgggctgggtggcacaccacccgaggggggccccgggacccacggagccctccctatgtctgcaaagtgattcactgtgcttcgagccaactctaacaggcactttgagatgtgttcctcctgctgtantcctttctgccttggcctcngcgggcttttctggggcccangaacccacactatgcacagancccaatgcatanaaccctggcca

SEQ ID NO: 2603 - DNA, 807 bp, Homo sapiens
  misc_feature (608)..(608): "n" may be a, t, c, g, other or unknown
  misc_feature (612)..(612): "n" may be a, t, c, g, other or unknown
  misc_feature (691)..(691): "n" may be a, t, c, g, other or unknown
  misc_feature (701)..(701): "n" may be a, t, c, g, other or unknown
  misc_feature (729)..(729): "n" may be a, t, c, g, other or unknown
  misc_feature (738)..(738): "n" may be a, t, c, g, other or unknown
  misc_feature (766)..(766): "n" may be a, t, c, g, other or unknown
  misc_feature (796)..(796): "n" may be a, t, c, g, other or unknown
  misc_feature (807)..(807): "n" may be a, t, c, g, other or unknown
cagccggtccaggcctctggcgaacatggcgcttgtcccctgccaggtgctgcggatggcaatcctgctgtcttactgctctatcctgtgtaactacaaggccatcgaaatgccctcacaccagacctacggagggagctggaaattcctgacgttcattgatctggttatccaggctgtcttttttggcatctgtgtgctgactgatctttccagtcttctgactcgaggaagtgggaaccaggagcaagagaggcagctcaagaagctcatctctctccgggactggatgttagctgtgttggcctttcctgttggggtttttgttgtagcagtgttctggatcatttatgcctatgacagagagatgatatacccgaagctgctggataattttatcccagggtggctgaatcacggaatgcacacgacggttctgccctttatattaatcgagatgaggacatcgcaccatcagtatcccagcaggagcagcggacttaccgccatatgtaccttctctgttggctatatattatgggtgtgctgggtgcatcatgtaactggcatgtgggtgtaccctttcctggaacactttggcccagganccanaatcatcttctttgggtctacaaccatcttaatgaacttcctgtacctgctggggaaaaattctgaacaactatatctnggatacacanaaaaaagccccctcttgggcgagatatnaaaattaantttatgttcctaggaaccatcctattantcccccaaaaacaaattttttgttgccaanttaattttccn

SEQ ID NO: 2604 - DNA, 680 bp, Homo sapiens
  misc_feature (399)..(399): "n" may be a, t, c, g, other or unknown
  misc_feature (501)..(501): "n" may be a, t, c, g, other or unknown
  misc_feature (553)..(553): "n" may be a, t, c, g, other or unknown
  misc_feature (562)..(562): "n" may be a, t, c, g, other or unknown
  misc_feature (596)..(597): "n" may be a, t, c, g, other or unknown
  misc_feature (653)..(653): "n" may be a, t, c, g, other or unknown
  misc_feature (664)..(664): "n" may be a, t, c, g, other or unknown
  misc_feature (678)..(678): "n" may be a, t, c, g, other or unknown
agcaatggcggttcccggcgtggggctcttgacccgtttgaacctgtgtgcccggagaagaactcgagtccagcggcctatcgtcaggcttttgagttgcccaggaactgtggccaaagaccttaggagagacgagcagccttcagggagcgtggagacaggctttgaagacaagattcccaaaaggagattctctgagatgcaaaatgaaagacgagaacaggcacagcggactgttttaatacattgcccagagaaaatcagtgaaaacaagtttcttaaatatttatcccaatttggacctattaataatcatttcttctatgaaagctttggtctctatgctgtcgtaaaattttgccaaaaggaaagcataggttcactgcagaatgggactcntactccaagcacggccatggagactgcaattccattcagatcacgtttcttcaatctgaagttgaaaaaccagacttctgaacggtcacgcgtacggtcaantaatcagttgccacgttcaaacaagcagctttttgaattactttgttatgcngaaagtatngacgatcagctgaacactctcttgaaggattccnnctaacagaagagaacactaagctccgatatctccctgttctcttattgaaaacttngccgccgcgtnttttccagactgcnta

SEQ ID NO: 2605 - DNA, 621 bp, Homo sapiens
  misc_feature (345)..(345): "n" may be a, t, c, g, other or unknown
  misc_feature (393)..(393): "n" may be a, t, c, g, other or unknown
  misc_feature (523)..(523): "n" may be a, t, c, g, other or unknown
  misc_feature (525)..(525): "n" may be a, t, c, g, other or unknown
  misc_feature (533)..(533): "n" may be a, t, c, g, other or unknown
  misc_feature (581)..(581): "n" may be a, t, c, g, other or unknown
  misc_feature (616)..(616): "n" may be a, t, c, g, other or unknown
gtgggccttcatcgtcaccaacctggcgagtgtgtatatacgggaaggaaatagacaccaagagctctacagtctgctggagaggatcaacccggaccacagcttccctgtcagctcgcactgcctccgagcagccgccttctatgtgcgtgggctcttctccttcttccagggacgctacaacgaggccaagcgatttctgcgggaaactctgaagatgtccaatgctgaggacctgaaccggctcacagcctgctccctcgtgcttctgggccacatcttctatgtgctgggaaaccacagggagagtaacaacatggtggtgcctgccatgcagctcgccancaagatcccggacatgtcggtacagctgtggtcgtcagcactgctganagacctgaataaagcctgtgggaacgccatggatgcccatgaagccgcccagatgcaccagaacttctcgcagcagctgctccaggaccacattgaggcctgcagcctccccgaacacaacctcatcacntngacagacngtccaccccccgtgcagttccaagctcagaatggaccccaacaccagnctggccagcctcctgtgaggccttgatgggggccntccca

SEQ ID NO: 2606 - DNA, 725 bp, Homo sapiens
  misc_feature (481)..(481): "n" may be a, t, c, g, other or unknown
  misc_feature (545)..(545): "n" may be a, t, c, g, other or unknown
  misc_feature (577)..(577): "n" may be a, t, c, g, other or unknown
  misc_feature (589)..(589): "n" may be a, t, c, g, other or unknown
  misc_feature (634)..(634): "n" may be a, t, c, g, other or unknown
  misc_feature (672)..(672): "n" may be a, t, c, g, other or unknown
  misc_feature (674)..(674): "n" may be a, t, c, g, other or unknown
  misc_feature (686)..(686): "n" may be a, t, c, g, other or unknown
  misc_feature (691)..(691): "n" may be a, t, c, g, other or unknown
gtcccagccggagccccagccggagcccgatccctagccctgcggccgcgcctccctcgccgtccccgcctggagcccggcgccgccgccgcccagcaggcgcggggcgaaggagctgctagaacaatgctgaggcgggtgaggtgaggagcagcccctcgcggcagccccgacagagtgtctggaacaggtgattggaggagccggagacccaggcacctgggcatccttcccctcgcctctgccaggccccgcgcccctaaaaggtgggaaaaccatggcgaccaatttcagtgacatcgtcaagcaaggctacgtgaagatgaagagcaggaagctcgggatctaccggaggtgctggctggtgttccggaaatcctccagcaaggggccccagcggctggagaagtatccagatgagaatcggtgtgcctccggggctgccccaaggtgactgaaatcagcagcgtcaagtgtgttncgcggctccccaaggaaaccaagcggcaggcggtggccatcatattcactgatgactcggcacntaccttcacctgcgactcagaactagaagcanaagaattgtacnagacactatctgtggagtgtctggggtccgcctcaacgacatcantcttggggaaaaacctgaactcctggcccccaggggtncnattgtttaacanaacanattcgctttccattgttcttccctgcttgcccct

SEQ ID NO: 2607 - DNA, 557 bp, Homo sapiens
  misc_feature (265)..(265): "n" may be a, t, c, g, other or unknown
  misc_feature (344)..(344): "n" may be a, t, c, g, other or unknown
  misc_feature (485)..(485): "n" may be a, t, c, g, other or unknown
  misc_feature (535)..(535): "n" may be a, t, c, g, other or unknown
  misc_feature (538)..(538): "n" may be a, t, c, g, other or unknown
  misc_feature (541)..(541): "n" may be a, t, c, g, other or unknown
  misc_feature (551)..(551): "n" may be a, t, c, g, other or unknown
acagatggcctggatcagtgcaatgtgcaacaagaggactatatcgtctcagtaaaaaccttgaagagatgaacccatttcagagacccagcaagggatcacctgcatatacaggcatcagcagaaacaggaatttgggatttatcctggaggtagtggaagcttttggaggtcttaaccaggacagcacatgtggctttcctgcaatgggatcgtccttcaagaggacctcacaggctctccacccggactgtgacgtaagcanctgcagcagccttggatgtttctggatagccagccccatgagaacagctttaaaataggagactggcattgtgatgaantgtggacttcgctgtcatatagacctggatttaaatcctggcttcagtgtttatggatgacattggacaagtcatttaacctccttaagtctcagagttctcattacggaaatggagctcttaatagtacctaccccctantgtggttgtgagggttgagatcatctatgttcaaagtgcttattatacanaanacngggacatgtnagtgct

SEQ ID NO: 2608 - DNA, 549 bp, Homo sapiens
  misc_feature (318)..(318): "n" may be a, t, c, g, other or unknown
  misc_feature (431)..(431): "n" may be a, t, c, g, other or unknown
  misc_feature (458)..(458): "n" may be a, t, c, g, other or unknown
  misc_feature (465)..(465): "n" may be a, t, c, g, other or unknown
  misc_feature (508)..(508): "n" may be a, t, c, g, other or unknown
  misc_feature (540)..(540): "n" may be a, t, c, g, other or unknown
  misc_feature (546)..(546): "n" may be a, t, c, g, other or unknown
gatgtcacctggagcgagtagcgcgcggcgtggaacgcgagtcgcgaccccggctcccggcagtggcgcgcactagccctcgcgccgcacgggacacgagggctgggcgggcagcgggatgaggctaaaggttggatttcaaggcgggggctgcttccggaaagacgcgctgtgtttggaaggtggagtgagcgcccggtgggcgagggcacctcattctgcacccctgcgcccgcctcgggaactgcacgcggcacccccacccgcgactcccacgcagacagtagtgcggcctgcagggttcccccggcggacgangctaatggttcgctccgccccgcccacacagaggccgcccactggctccggctgcgtttcaggactctggaggaagggacttggccttcgccctcagacgctcttaagggtangcggcgttgtcctcagttctgccccancactcanacccagactgggtccctgcctccgccctccgccctcggactantctcttggaagccggcctgtctccgccttcanacctangga

SEQ ID NO: 2609 - DNA, 503 bp, Homo sapiens
  misc_feature (113)..(113): "n" may be a, t, c, g, other or unknown
  misc_feature (239)..(239): "n" may be a, t, c, g, other or unknown
  misc_feature (241)..(241): "n" may be a, t, c, g, other or unknown
  misc_feature (341)..(341): "n" may be a, t, c, g, other or unknown
  misc_feature (363)..(363): "n" may be a, t, c, g, other or unknown
  misc_feature (408)..(408): "n" may be a, t, c, g, other or unknown
  misc_feature (413)..(413): "n" may be a, t, c, g, other or unknown
  misc_feature (437)..(437): "n" may be a, t, c, g, other or unknown
  misc_feature (465)..(465): "n" may be a, t, c, g, other or unknown
  misc_feature (486)..(486): "n" may be a, t, c, g, other or unknown
gtgctgcggctgtgctcggccttagtggtgtcggggtctagtggacagaaaagactcttggccaggcagatggcttctcggtggcagaacatggggacctccgtgcgccgganatctctccagcaccaggagcagctggaggacagcaaggagctgcagcctgtggtcagccatcaggagacctctgtaggggccctggggtccctgtgcagacagttccaaaggaggctgcccctgananccgtcaacctcaacctccgcgcagggccctcctggaaacgcctggaaaccccagagccaggtcagcagggcctccaggctgcagctcgctcagctaaaantgctttgggtgccgtgtcccanaaaatccaggagtcctgccaaagtggcaccaagtggctggtgganacccnggtgaaggccaggaggcggaaganaggagcacagaagggcagtggatccccnactcacagcctgagccagaanacacccggctgtctgga

SEQ ID NO: 2610 - DNA, 666 bp, Homo sapiens
  misc_feature (205)..(205): "n" may be a, t, c, g, other or unknown
  misc_feature (468)..(468): "n" may be a, t, c, g, other or unknown
  misc_feature (478)..(478): "n" may be a, t, c, g, other or unknown
  misc_feature (534)..(534): "n" may be a, t, c, g, other or unknown
  misc_feature (591)..(591): "n" may be a, t, c, g, other or unknown
  misc_feature (607)..(607): "n" may be a, t, c, g, other or unknown
  misc_feature (626)..(626): "n" may be a, t, c, g, other or unknown
  misc_feature (650)..(650): "n" may be a, t, c, g, other or unknown
  misc_feature (664)..(664): "n" may be a, t, c, g, other or unknown
aagagcaagggatcactgtgctgggtttaaatgcggtatttgacatcttggtgataggcaaattcaatgttctggaaattgtccagaaggtactacataaggacaagtcattagagaatctcggcatgctcaggaacgggggcctcctcttcagaatgaccctgctcacctctggaggggctgggatgctctacgtgcgctggangatcatgggcacgggcccgccggccttcaccgaggtggacaacccggcctcctttgctgacagcatgctggtgagggccgtaaactacaattactactattcattgaatgcctggctgctgctgtgtccctggtggctgtgttttgattggtcaatgggctgcatccccctcattaagtccatcagcgactggagggtaattgcacttgcagcactctggttctgcctaattggcctgatatgccaagccctgtgctctgaanacgccacaanaaaaagatccttactctgggcctgggatttctcgttatcccatttctccccgcgantaacctgttcttccgaatgggcttcctggtcccggaacgtgtcctctacctccccancgttgggtactgtgtnctgctgacttttggattcngaaccctgaacaaacattcccaanaaaaaaaaaacccntt

SEQ ID NO: 2611 - DNA, 708 bp, Homo sapiens
  misc_feature (211)..(211): "n" may be a, t, c, g, other or unknown
  misc_feature (308)..(308): "n" may be a, t, c, g, other or unknown
  misc_feature (343)..(343): "n" may be a, t, c, g, other or unknown
  misc_feature (444)..(444): "n" may be a, t, c, g, other or unknown
  misc_feature (493)..(493): "n" may be a, t, c, g, other or unknown
  misc_feature (510)..(510): "n" may be a, t, c, g, other or unknown
  misc_feature (546)..(546): "n" may be a, t, c, g, other or unknown
  misc_feature (591)..(591): "n" may be a, t, c, g, other or unknown
  misc_feature (619)..(619): "n" may be a, t, c, g, other or unknown
  misc_feature (645)..(645): "n" may be a, t, c, g, other or unknown
  misc_feature (652)..(652): "n" may be a, t, c, g, other or unknown
  misc_feature (700)..(700): "n" may be a, t, c, g, other or unknown
  misc_feature (703)..(703): "n" may be a, t, c, g, other or unknown
actagagtctccggcttcgctcacgcgccttgggcataagagtcctctcgttggtcccggaggtggggttgcgctcacaaggggcgaccgtcgccacggtggcggccactgcatcgcgtcccacctccgcggccctgggcgccgtggtgtcgacgggccccgagcctatgacgggccagggccagtcggcgtccgggtcgtcggcgtggancacggtattccgccacgtccggtatgagaacctgatagcgggcgtgagcggcggcgtcttatccaaccttgcgctgcatccgctcgacctcgtgaanatccgcttcgccgtgagtgatggattggaactganaccgaaatataatggaattttacattgcttgactaccatttggaaacttgatggactacggggactttatcaaggagtaaccccaaatatatggggtgcangtttatcctggggactctactttttcttttacaatgccatcaagtcatntaaaacagaaggaaganctgaacgtttagaggcaacagaataccttgtctcanctgctgaagctggaccatgaccctctgcattacaaacccattatnggtaacaaaaactcgccttatgttacantatgatgctgttgttaactccccacncccgacnatattaaaaggaatgtttgaatacccttgtttaaaatattttaagttnttnaaagt

SEQ ID NO: 2612 - DNA, 724 bp, Homo sapiens
  misc_feature (631)..(631): "n" may be a, t, c, g, other or unknown
  misc_feature (656)..(656): "n" may be a, t, c, g, other or unknown
  misc_feature (680)..(680): "n" may be a, t, c, g, other or unknown
  misc_feature (701)..(701): "n" may be a, t, c, g, other or unknown
  misc_feature (718)..(718): "n" may be a, t, c, g, other or unknown
agaattagaattggctgttttggaagctggaagttctgaagctgtgaaaccaaaatgcactctagaagaaagacagcaatttatgaaagcatttaggcagccagcatcagatgcacttaaaaatggagttaaaaagtcttctgataagcagaaagaccttaatgaaaaatgtctatatgaagtaggaagagatgataattctaaaaaaatcatggaaaattctggtatccaaatggtttcaaaaaatggcaatttacagttacacactgataaaggaagttttctgaaggagaaagataaaaagctaaagaagaagaataagaaaacattagatactggggctattccaggcaaaaacagagagggaaacactcaaaagaaagaaacaacctttttcttaaaagagaaacaatatcaaaatagaatgagtttaagacaaaggaaaacagagtttttcaaaagcagcactttatttaacaatgaaagtcttgtttatgaagatatagcaaatgatgaccttctaaaggtttcctctctgtgttacaataataaattgtcaagaaaaaccagcataccagttaaagatattaagcttacacagtctaaagctgaatctgaagccagcttgctnaatgtttccacgcccaagtcactanaagatctggaagaattagcagccnccctactacagaaacccttanaagttttgattctgacnatgttc

SEQ ID NO: 2613 - DNA, 701 bp, Homo sapiens
  misc_feature (429)..(429): "n" may be a, t, c, g, other or unknown
  misc_feature (455)..(455): "n" may be a, t, c, g, other or unknown
  misc_feature (555)..(555): "n" may be a, t, c, g, other or unknown
  misc_feature (607)..(607): "n" may be a, t, c, g, other or unknown
  misc_feature (612)..(612): "n" may be a, t, c, g, other or unknown
  misc_feature (641)..(641): "n" may be a, t, c, g, other or unknown
  misc_feature (645)..(645): "n" may be a, t, c, g, other or unknown
  misc_feature (674)..(674): "n" may be a, t, c, g, other or unknown
ggtccaaactcctaagagctaggcttcggaaataccatgtgtacagtcatctttccagcacctgcacaatatcataaaatcattgtctttgagctgaagtggtcctaaaaagtcagcctttccattttacagatgagaaaatagacccagagaggttaagtcacacggtggtttgtggcaaagctagaaacataactgtggtctcctcttcatagttctttccactacactattacatttctcaactctgaaaaaccaccataaagcataatggctacctaaaataaatggcccatttctaaagtaattagtattcctaaacaaattttaagtagctctgcttctccagtgacattttggtttaaagaatcaaggggaggctgggtgcagtggctcatccctgtaatcccagcactttgcaaggccgangtgggcagatcacttgaacccagganttcaagacaagcctcggcaacatgacaaaacctcatctctacaaaaaatacaaaaattagccaggcccagtggcatgtgcctgtaatcccaactactcangaagctgaagtgggaagattgtttgaacttgggaagctgaagtaggaatgancccanatcacgccacttgcactcctgcctaggcnacanaactagaccctgtctccaaattaaaaaanaaaggattaaggaaaatttgattaata

SEQ ID NO: 2614 - DNA, 576 bp, Homo sapiens
  misc_feature (252)..(252): "n" may be a, t, c, g, other or unknown
  misc_feature (418)..(418): "n" may be a, t, c, g, other or unknown
  misc_feature (482)..(482): "n" may be a, t, c, g, other or unknown
  misc_feature (521)..(521): "n" may be a, t, c, g, other or unknown
  misc_feature (544)..(544): "n" may be a, t, c, g, other or unknown
  misc_feature (553)..(553): "n" may be a, t, c, g, other or unknown
  misc_feature (571)..(571): "n" may be a, t, c, g, other or unknown
gctggagccggcgcggaggagcgggcggccgcggctgtgccctctcctactcctcaccgcgcgcgcgcggggaaccagtagccgcggctgcttcggttgccgcggtcggtggtcgttatggattctccatgggacgagttggctctggccttctcccgcacgtccatgtttcccttttttgacatcgcgcactatctagtgtcagtgatggcggtgaaacgtcagccgggagcagctgcattggcatggaanaatcctatttcaagctggtttactgctatgctccactgttttggtggaggaattttatcctgtctactgcttgcagagcctccattgaagtttcttgcaaaccacactaacatattactggcatcttcaatctggtatattacatttttttgcccgcatgacctantttcccagggctattcatatctacctgttcaactactggcttcgggaatgaaggaagtgaccanaacttggaaaatagtaggtggagtcacacatgctaatanctattacaaaaatggctggatantcatgatanctattggatgggcccgangtgca

SEQ ID NO: 2615 - DNA, 686 bp, Homo sapiens
  misc_feature (526)..(526): "n" may be a, t, c, g, other or unknown
  misc_feature (591)..(591): "n" may be a, t, c, g, other or unknown
  misc_feature (635)..(635): "n" may be a, t, c, g, other or unknown
  misc_feature (648)..(648): "n" may be a, t, c, g, other or unknown
  misc_feature (653)..(653): "n" may be a, t, c, g, other or unknown
  misc_feature (678)..(678): "n" may be a, t, c, g, other or unknown
gtttctgtcgcaggctgcgaggaaaggcccctaggctgggtctgggtgcttggcggcggcggcttcctccccgctcgtcctccccgggcccagaggcacctcggcttcagtcatgctgagcagagtatggaagcacctgactacgaagtgctatccgtgcgagaacagctattccacgagaggatccgcgagtgtattatatcaacacttctgtttgcaacactgtacatcctctgccacatcttcctgacccgcttcaagaagcctgctgagttcaccacagtttcatcctacaaaatgggcgtaacaatgtctacctactccattgtgtggaccaaaggagatggttaatgtgaaagccctttgtgaacctgaagtgagcaactgctggatgaatgtcattacgggcacaggctctgtgtcatctcctctcctagtgcttccacagccaggaccagagacctccctgatgactggggaacctgtggatgatgaaaatgccaccgtcaacaagattgcgctcganctgtgcacctttaccctggcaattgccctgggtgctgtcctgctcctgcccttctccatcatcancaatgaagtgctgctctccctgcctcggaaactactacatccantgggtcaacgggntcccncatcccatggccctggaaaccttgntttttcct

SEQ ID NO: 2616 - DNA, 722 bp, Homo sapiens
  misc_feature (570)..(570): "n" may be a, t, c, g, other or unknown
  misc_feature (630)..(630): "n" may be a, t, c, g, other or unknown
  misc_feature (644)..(644): "n" may be a, t, c, g, other or unknown
  misc_feature (649)..(649): "n" may be a, t, c, g, other or unknown
  misc_feature (682)..(682): "n" may be a, t, c, g, other or unknown
  misc_feature (695)..(695): "n" may be a, t, c, g, other or unknown
tatattatcctgtacatgcaaatcactgaggagcagattaaagtatggacagccaacccccaacaatttgtagaagatgaagatgatgatacattctcctatactgttagaatagcagctcaagacttgttgctggctgtggccacagatttccagaatgaaagtgcagcagccctggctgctgcagccactcgacatttacaagaagctgagcaaaccaaaaacagtggcactgagcactggtggaagatccatgaggcatgcatgcttgccctaggctcagtgaaggccatcatcactgacagtgtgaaaaatggcaggattcattttgacatgcatgggttcctgaccaatgtcatccttgcagacctcaacctctcagtgtctcctttcctcttgggccgggcactttgggctgccagtcggttcactgttgctatgtcccctgaactgatccagcagttcctacaggcaacagttagtggtcttcacgagacacagcccccatcagttcgaatttctgcagtgagagccatctggggttattgttgaccaactgaaatctcaganagttacccacgtgctccagcccttcctccccagcatccttgatgggcttaattcccctancagcccagttcacncagangtcctcaacctggtgatggagacctgtgcatcntttgttaccgttnaaccccaaattcccaggcaagccttgg

SEQ ID NO: 2617 - DNA, 624 bp, Homo sapiens
  misc_feature (327)..(327): "n" may be a, t, c, g, other or unknown
  misc_feature (380)..(380): "n" may be a, t, c, g, other or unknown
  misc_feature (412)..(412): "n" may be a, t, c, g, other or unknown
  misc_feature (419)..(419): "n" may be a, t, c, g, other or unknown
  misc_feature (425)..(425): "n" may be a, t, c, g, other or unknown
  misc_feature (540)..(540): "n" may be a, t, c, g, other or unknown
  misc_feature (555)..(555): "n" may be a, t, c, g, other or unknown
  misc_feature (587)..(587): "n" may be a, t, c, g, other or unknown
  misc_feature (599)..(599): "n" may be a, t, c, g, other or unknown
  misc_feature (603)..(603): "n" may be a, t, c, g, other or unknown
gatgcggctgtgattgctgaattgtctgggcaggtttggagtctctggcaagctcccctgactgtgcatccctctggagacgaagaggagggggaggcctgtcctctctgggatccattggtcacatccccctgaggattcccgaatgcctacctccagtgtcgtcaacatggagttctgaagtccatgtggctcttcacagtgaatcaggtgttaaggaagatgcagagacgccacagcagcaacacggataacattccacctgaaagctgtgaccaaggctggcccctctggggaactgggggccattgaacttgaagactgcanagccagcggtccttgggatcccgagaaaccgcagccaggcgctcagctccgangcgagtgtggatgaaggtggcgtctttgagantctgaangcagangcagcctccccaccagcgctcttctcgggcttatcaggcagcctccccaccagctcgttcccctccagcctggttgctgggctcctcggctggcggcggggacgtgttcatccanatgcccgcgtccaanggaagaaagaaggggccggggcgaaggggggncctaccaccacngcanccccaccaccatttccaccat

SEQ ID NO: 2618 - DNA, 743 bp, Homo sapiens
  misc_feature (576)..(576): "n" may be a, t, c, g, other or unknown
  misc_feature (578)..(578): "n" may be a, t, c, g, other or unknown
  misc_feature (628)..(628): "n" may be a, t, c, g, other or unknown
  misc_feature (661)..(661): "n" may be a, t, c, g, other or unknown
  misc_feature (663)..(663): "n" may be a, t, c, g, other or unknown
  misc_feature (711)..(711): "n" may be a, t, c, g, other or unknown
  misc_feature (736)..(736): "n" may be a, t, c, g, other or unknown
  misc_feature (742)..(742): "n" may be a, t, c, g, other or unknown
atgtaaacatgtcgaaaaacctatcaacaacagttccttagtttcaccacttcaaaaaatttattctagtgtcaaatcccacattttaaataaatacagaaatgattttgatgattctccatttctcccacaagaacaaaaagcacaaataagggaaaaaccgtgtgaatgtaatgagcatggcaaagcctttagagtgtcttcaagccttgctaaccatcaagtaatccacactgcagataacccttacaaatgtaatgaatgtgacaaggtcttcagtaacagttcaaaccttgtacaacatcaaagaattcatactggagagaagccttacaagtgtcatgaatgtggcaagctcttcaatcgaatttcactccttgcacgacatcagagaatacatactggagagaaaccttacaaatgtcatgagtgtggcaaagtcttcactcaaaattctcaccttgcaaatcatcacagaatccacactggagagaaaccttacaaatgtaatgagtgtggcaaggtcttcaacagaaatgcacaccttgcacgacatcagaaaattcatagtgggananaaaccttacaaatgttagggaatgtggcaaagcattttcagggggttcanggcttactgctcatcttgttattcacactggananaactttacaaatgttataaatgcgggaaggtcttccatccaaatgccnccttaccagactccaagaaaccatnctggana

SEQ ID NO: 2619 - DNA, 517 bp, Homo sapiens
  misc_feature (128)..(128): "n" may be a, t, c, g, other or unknown
  misc_feature (301)..(301): "n" may be a, t, c, g, other or unknown
  misc_feature (312)..(312): "n" may be a, t, c, g, other or unknown
  misc_feature (343)..(343): "n" may be a, t, c, g, other or unknown
  misc_feature (394)..(394): "n" may be a, t, c, g, other or unknown
  misc_feature (436)..(436): "n" may be a, t, c, g, other or unknown
  misc_feature (471)..(471): "n" may be a, t, c, g, other or unknown
  misc_feature (484)..(484): "n" may be a, t, c, g, other or unknown
  misc_feature (501)..(501): "n" may be a, t, c, g, other or unknown
  misc_feature (508)..(508): "n" may be a, t, c, g, other or unknown
ccttccggtcaccatggcgaccaggcgccttggggtcggggagacgctgggggccctcaacgcggccctggggccaggcggtccggtgtggaccaaggagacgcgcacccgccacctgcgttcccganactttctggcaccgcaccgcgcgctgcaggcgcgcttcgatgacggccaggttccggagcatttgctccatgccctcgcctgcctgcagggccccggtgtggccccggtgctgcgctgcgcgccgacccccgcgggtctgtctctccaactgcagcggtccgccgtcttcgancgcgtcctcancgccgtggccgcctatgccacgcccgcctcncctgcctcgctgggccagcgcgtcttactacactgcccaacactgcgcagntccccctgcgcgctcacggggtgtgcgtgcgcctagtgccanctgtgcgggatccgcacatgctgaccttcctgcancaactgcgggtgnactggcccgctgcctcngaaaaancttcctccc

SEQ ID NO: 2620 - DNA, 553 bp, Homo sapiens
  misc_feature (396)..(396): "n" may be a, t, c, g, other or unknown
  misc_feature (412)..(412): "n" may be a, t, c, g, other or unknown
  misc_feature (423)..(423): "n" may be a, t, c, g, other or unknown
  misc_feature (470)..(470): "n" may be a, t, c, g, other or unknown
  misc_feature (518)..(518): "n" may be a, t, c, g, other or unknown
  misc_feature (535)..(535): "n" may be a, t, c, g, other or unknown
  misc_feature (542)..(542): "n" may be a, t, c, g, other or unknown
  misc_feature (551)..(551): "n" may be a, t, c, g, other or unknown
aatatttatatttcctctgtcttttaaaactgaacaccgaggtgggttttgtggtgggtggtgaacggacaggtttgggcctcgatcccccacccgaccctagcacccacaggtgggggtgccccctctgctgatgcgcctcctccctcagcaccatggacctgctggactggggcagcctcatcgacagcaggaccaagctgtccaagcacttggtagtccccaacgcacaggtaacacctccgctcctcagtgaggcccagctcagcagggcgctgcgctaagaagggaattcagcctgccacgtgtgtctcttgttgcctaccctgggaacttaacatgaccaaaatcactgcacactatggccccacagaccccctgtggtccagggggaanaagacaagcccactantgtccacagantgcttggcgggacagaaacccacgcggaagccttaagacaccacaangaaaaggggtctgggggccttccccaagtcatctgtcttgtgcatcangtcaccccaaacttcanaagcctnaaacggcanca

SEQ ID NO: 2621 - DNA, 805 bp, Homo sapiens
  misc_feature (111)..(111): "n" may be a, t, c, g, other or unknown
  misc_feature (156)..(156): "n" may be a, t, c, g, other or unknown
  misc_feature (184)..(184): "n" may be a, t, c, g, other or unknown
  misc_feature (197)..(197): "n" may be a, t, c, g, other or unknown
  misc_feature (217)..(217): "n" may be a, t, c, g, other or unknown
  misc_feature (401)..(401): "n" may be a, t, c, g, other or unknown
  misc_feature (533)..(533): "n" may be a, t, c, g, other or unknown
  misc_feature (563)..(563): "n" may be a, t, c, g, other or unknown
  misc_feature (570)..(570): "n" may be a, t, c, g, other or unknown
  misc_feature (572)..(572): "n" may be a, t, c, g, other or unknown
  misc_feature (606)..(606): "n" may be a, t, c, g, other or unknown
  misc_feature (646)..(646): "n" may be a, t, c, g, other or unknown
  misc_feature (762)..(763): "n" may be a, t, c, g, other or unknown
  misc_feature (773)..(773): "n" may be a, t, c, g, other or unknown
  misc_feature (790)..(790): "n" may be a, t, c, g, other or unknown
  misc_feature (801)..(801): "n" may be a, t, c, g, other or unknown
gtatgtacaaaggaagagttttactctttaagaaacatataaagacttaagatactcaatgtgggacgacatattgagaagttaatatatatattaaatgtgtttgagttntggtcgactttctaaaaggtaatcatttaataaaaccttgaatangagttggtataaataaggaagggaaaanattgacaagtcancccaaaagcacagacacttnatgtaggcaaatgaatgtctgtggttatccactcacaacttaaactttgaaatccctgctttttgactgcctcccaggtttctctgctatttcgcaaatgagccctcactatctcaggtcaccctctcacctccttttccttggcctggagctgcaaagtcttcttttgcagctggtctctganatcccagtctttctccttccctgtaccctcaggctccacttcgttagggaaggactttggactccacacgggcaaagcctgatctaaaaaagcagccagattcttggtgacagtgaggcccacacctctgangaagggccctgaaggtgaaaccactatgantgggganangggaaggaacttgggaaggcgtgcttttggctanactgatggcattctctgacataaaggttaacttccagtanggccctgctaagcttggacagaaaagctggaatctgaaactccctggaaagggcaagaattggggatcttttctttgttatccccccagtcctatctagtgcctaaatagttttanntgaattactncttaaattgaaatttcnttgggttggtntgtt

SEQ ID NO: 2622 - DNA, 618 bp, Homo sapiens
  misc_feature (175)..(175): "n" may be a, t, c, g, other or unknown
  misc_feature (300)..(300): "n" may be a, t, c, g, other or unknown
  misc_feature (405)..(405): "n" may be a, t, c, g, other or unknown
  misc_feature (422)..(422): "n" may be a, t, c, g, other or unknown
  misc_feature (446)..(446): "n" may be a, t, c, g, other or unknown
  misc_feature (471)..(471): "n" may be a, t, c, g, other or unknown
  misc_feature (541)..(541): "n" may be a, t, c, g, other or unknown
  misc_feature (589)..(589): "n" may be a, t, c, g, other or unknown
  misc_feature (601)..(601): "n" may be a, t, c, g, other or unknown
  misc_feature (603)..(603): "n" may be a, t, c, g, other or unknown
  misc_feature (606)..(606): "n" may be a, t, c, g, other or unknown
caaataaacccagcaaaggaactagcagagctggtgatgtatatggcacagattagtcactgctacccagagtacctaagtaattttcctcaagaggtgaaagatcttctctcctgcaatcataccgtattggatccagatctgcgaatgacattttgcaaagctttgatcttgntgagaaataagaatctcatcaatccatcaagcctgctagaactcttctttgaactttttcgttgccatgataaacttctgcgaaagactttatacacacatattgtgactgatatcaagaatatnaatgcaaaacacaagaacaataaagtgaatgtagtattgcaaaatttcatgtacaccatgttaagagatagcaatgcaaccgcagccaagatgtctttagatgtnatgattgaactctacanaaggaacatctggaatgatgcaanaactgtcaatgttatcacaactgcntgtttctctaaggtcaccaagatattagttgccgctttgacattctttcttgggaaagatgaagatgaanaacaggacagtgactccgaatctgaggatgatggaccaccagcaaganacctgctagttncnatntgctccgggaaa

SEQ ID NO: 2623 - DNA, 639 bp, Homo sapiens
  misc_feature (248)..(248): "n" may be a, t, c, g, other or unknown
  misc_feature (468)..(468): "n" may be a, t, c, g, other or unknown
  misc_feature (493)..(493): "n" may be a, t, c, g, other or unknown
  misc_feature (517)..(517): "n" may be a, t, c, g, other or unknown
  misc_feature (577)..(577): "n" may be a, t, c, g, other or unknown
  misc_feature (584)..(584): "n" may be a, t, c, g, other or unknown
  misc_feature (611)..(611): "n" may be a, t, c, g, other or unknown
  misc_feature (622)..(622): "n" may be a, t, c, g, other or unknown
  misc_feature (629)..(629): "n" may be a, t, c, g, other or unknown
ctcagtctgcggccatgggggcgtccgcgcggctgctgcgagcggtgatcatgggggccccgggctcgggcaagggcaccgtgtcgtcgcgcatcactacacacttcgagctgaagcacctctccagcggggacctgctccgggacaacatgctgcggggcacagaaattggcgtgttagccaaggctttcattgaccaagggaaactcatcccagatgatgtcatgactcggctggcccttcatganctgaaaaatctcacccagtatagctggctgttggatggttttccaaggacacttccacaggcagaagccctagatagagcttatcagatcgacacagtgattaacctgaatgtgccctttgaggtcattaaacaacgccttactgctcgctggattcatcccgccagtggccgaatctataacattgaattcaaccctcccaaaactgtgggcattgatnacctgactggggacctctcattcancgtgaggatgataaaccagaaacngttatcaagaaactaaaggcttatgaagaccaaacaaaccagtcctggaaatattaccanaaaaaangggtgctggaaacattctccggaacanaaaccaacaanatttggncctatttttt

SEQ ID NO: 2624 - DNA, 472 bp, Homo sapiens
  misc_feature (71)..(71): "n" may be a, t, c, g, other or unknown
  misc_feature (175)..(175): "n" may be a, t, c, g, other or unknown
  misc_feature (215)..(215): "n" may be a, t, c, g, other or unknown
  misc_feature (302)..(302): "n" may be a, t, c, g, other or unknown
  misc_feature (340)..(340): "n" may be a, t, c, g, other or unknown
  misc_feature (350)..(350): "n" may be a, t, c, g, other or unknown
  misc_feature (376)..(376): "n" may be a, t, c, g, other or unknown
  misc_feature (410)..(410): "n" may be a, t, c, g, other or unknown
  misc_feature (432)..(432): "n" may be a, t, c, g, other or unknown
  misc_feature (447)..(447): "n" may be a, t, c, g, other or unknown
  misc_feature (466)..(466): "n" may be a, t, c, g, other or unknown
caggaatttggaagcaggctataaatctcatgaattccacccagaatcacatttacaaataaaaaatcatntgataaaaagatcacatgtacatgaagacaatggaaagttatttccttcatccagtctacaaatacccaaggaccataatgcaagagaacatatccaccagtcngatgaacagaaacttggaaaaccgaatgaatgcaaatttnctgagtggcttaatatagaaaattctgagagaacaggtttgccttttcacgttgataactctgcttctgggaagagagtgaacagtnatgaaccatcttcattatggtcttcacacctaaagaantgtagggttnaagccagaaactgctcccctcatccngcaacaaaatatcatggatcgatgttactttganaactctctatccacagaatgtntgattcggtcagccnccaaatctgatgggtgtcncatgcc

SEQ ID NO: 2625 - DNA, 642 bp, Homo sapiens
  misc_feature (367)..(367): "n" may be a, t, c, g, other or unknown
  misc_feature (611)..(611): "n" may be a, t, c, g, other or unknown
  misc_feature (620)..(620): "n" may be a, t, c, g, other or unknown
  misc_feature (622)..(622): "n" may be a, t, c, g, other or unknown
  misc_feature (627)..(627): "n" may be a, t, c, g, other or unknown
  misc_feature (632)..(632): "n" may be a, t, c, g, other or unknown
gctcttatcggttcccatcccagttgttgatcttatgcaagacgctgcacgaccccgcgcccgcttgtcgccacggcacttgaggcagccggagatactctgagttactcggagcccgacgcctgagggtgagatgaacgcgctggcctccctaaccgtccggacctgtgatcgcttctggcagaccgaaccggcgctcctgcccccggggtgacgcgcagcccccagccgcccagacacatggccccaggccaagcaccccatcaggctaccccgtggagggatgcccaccctttcttcctcctgtccccagtgatgggcctcctcagccgcgcctggagccgcctgaggggcctgggacctctanagccctggctggtggaagcagtaaaaggagcagctctggtagaagctggcctggagggagaagctaggactcctctggcaatcccccataccccttggggcagacgccctggagaggagctgaagacagtggaagccctggagaggacagagaaacactggggctgaaaacagcagttcccttcctgaacctggggacttttggatgatgatgatggcatgtttggtgagcgaaaagcaaccantgttcctananggcanggaantcaatttgca

SEQ ID NO: 2626 - DNA, 738 bp, Homo sapiens
  misc_feature (434)..(434): "n" may be a, t, c, g, other or unknown
  misc_feature (524)..(524): "n" may be a, t, c, g, other or unknown
  misc_feature (573)..(573): "n" may be a, t, c, g, other or unknown
  misc_feature (575)..(575): "n" may be a, t, c, g, other or unknown
  misc_feature (657)..(657): "n" may be a, t, c, g, other or unknown
  misc_feature (662)..(662): "n" may be a, t, c, g, other or unknown
  misc_feature (678)..(678): "n" may be a, t, c, g, other or unknown
  misc_feature (691)..(691): "n" may be a, t, c, g, other or unknown
  misc_feature (726)..(726): "n" may be a, t, c, g, other or unknown
taccaatgctgcaggtacattaatgaactcgagatggctctgtaagcctgactggcaataacgcacggtactgttcttgaaatacctaatggcttgaaattctagtctgtttgtgaaagatgggtactatcatgatttcctcttctattcctatattcttttctggattttttttaataattagtgatataagcattgtttttattgcagccatatccacttacccatcttaagatctgtagctgggattttctgacttgtaatgagcagggggattgctttttcactttgtgacactctttagagctttaatgcttcacagtatatggcctggtctcatccttgcgtgttccacttgaggccctttggtgtcttgccccattcttgtgtttataaaatgtttgagtatttctgatgagtgatgcttgccttantctcatgaattcagatcccttcatgtcctttaagtatgctcctcaatgtgtaaacaggaacaactttatgatttgaaagctttaaagganattcttctcccacccccaactttatttgcaatgggatttttcctaggananttatgaaaagttgaaggcttctaagggaatactgtaaacatgaccacttatatttatcacagtggaaaggcaaaattattcnctcanaaataatataaattanctctttaaaaaantaacaaaatttgtcctttttgggtttatcatttcncaaacatatacc

SEQ ID NO: 2627 - DNA, 825 bp, Homo sapiens
  misc_feature (543)..(543): "n" may be a, t, c, g, other or unknown
  misc_feature (658)..(658): "n" may be a, t, c, g, other or unknown
  misc_feature (820)..(820): "n" may be a, t, c, g, other or unknown
aagaaggcggcgggggaagatggcggtcctggggtagagtttgcaagctttctgactaggctagtcgagtaactattcgggtcatggcgtcaaactcaactaagtctttcctggcagatgccggctatggcgaacaggaactggatgccaactctgcccttatggaattggacaaaggcctaagatctggcaaacttggtgaacagtgtgaagcagttgttcgctttcccagactttttcagaagtatccattccctattcttatcaattctgcattcctaaagttagctgatgttttcagagttggaaataatttcctgaggctatgtgttcttaaagttacccaacaaagtgagaaacatttggagaagattctaaatgtggatgaatttgtgaagagaattttttctgtgattcatagtaatgatcctgtggcaagagccatcaccctccggatgttgggaagtctggcatcaataattcctgagaggaagaatgctcatcatagtattcgtcagagtttagattcacatgataatgtanaagttgaagctgctgtttttgctgctgcaaacttctctgcacagtcaaaggattttgctgtaggaatctgtaacaaaatcagtgaaatgatcaaggtttaaccgacaccagttanacttgaagctaaaattgatacccattctacagcacatgcaccatgatgcaatccttgggttccaatgctccgtccagcttttacaacagcttggtcccatcctatccgtcccaccaaaatggtgaattgttttctttggacactttccctcctgcttgcaancgttc

SEQ ID NO: 2628 - DNA, 807 bp, Homo sapiens
  misc_feature (162)..(162): "n" may be a, t, c, g, other or unknown
  misc_feature (430)..(430): "n" may be a, t, c, g, other or unknown
  misc_feature (548)..(548): "n" may be a, t, c, g, other or unknown
  misc_feature (552)..(552): "n" may be a, t, c, g, other or unknown
  misc_feature (561)..(561): "n" may be a, t, c, g, other or unknown
  misc_feature (593)..(593): "n" may be a, t, c, g, other or unknown
  misc_feature (723)..(723): "n" may be a, t, c, g, other or unknown
  misc_feature (727)..(727): "n" may be a, t, c, g, other or unknown
  misc_feature (764)..(764): "n" may be a, t, c, g, other or unknown
  misc_feature (776)..(776): "n" may be a, t, c, g, other or unknown
  misc_feature (779)..(779): "n" may be a, t, c, g, other or unknown
gctcgcaggcgggggtttccatggtgatggtcaacaagcctcaactgcctctgctacaactgccaagttccccgcgtcccaccctcctctaggtgctccaagggaccaccggggtgcctgatacgagagcgggagtgtagagactcggaggccgaggttganaacaaaaacatgcacctggagtttccccggagccctctgcgtggttgagcttcggtggaatttcggggctcttggctgccagccgcgcttgcctggtagcaacagaaaccagtcctgctcgcctccgtggacatttcattaccatccagaagtgtctcccactgaaggcatccgtggttgtttttaagccacaaaaaagccacacccaagatcacctgacacccaccctgtcaagtgtccatgatgctgggccctgagggaggtgaangctttgtggtcaagctccgtggcctgccctggtcctgctctgttgaggacgtgcagaacttcctctctgactgcacgattcatgatggggccgcaggtgtccatttcatctacactanaaanggcaggcanaatggtgaagcttttgttgaacttgggatcanaagatgatgttaaaatggccctgaaaaaagacagggaaaagcatgggacaccggtacattgaaggtgttcaagtccacagaacccaaatggattgggtgttgaaacacagtgggtccccaacaattgccnaaangcgccaacgaatggcttccttgcgggcttccaaggantcccattttggnatnccccaaaaggaaaaaaaattgttcaatt

SEQ ID NO: 2629 - DNA, 814 bp, Homo sapiens
  misc_feature (5)..(5): "n" may be a, t, c, g, other or unknown
  misc_feature (428)..(428): "n" may be a, t, c, g, other or unknown
  misc_feature (473)..(473): "n" may be a, t, c, g, other or unknown
  misc_feature (563)..(563): "n" may be a, t, c, g, other or unknown
  misc_feature (578)..(578): "n" may be a, t, c, g, other or unknown
  misc_feature (601)..(601): "n" may be a, t, c, g, other or unknown
  misc_feature (642)..(642): "n" may be a, t, c, g, other or unknown
  misc_feature (645)..(645): "n" may be a, t, c, g, other or unknown
  misc_feature (731)..(731): "n" may be a, t, c, g, other or unknown
  misc_feature (801)..(801): "n" may be a, t, c, g, other or unknown
  misc_feature (803)..(803): "n" may be a, t, c, g, other or unknown
  misc_feature (810)..(810): "n" may be a, t, c, g, other or unknown
  misc_feature (812)..(812): "n" may be a, t, c, g, other or unknown
agtanagtgtccggcttcggtgccgagtgccaccgcgagtgggccgagacgcggagggaggcgcggccggagctcgggtcgccgacgctggccaggaccgcgcttcttcccggcggcaggcggcgcggtccccgtgactctcagaagccgcccgatgtagagccgcttctttgtcccatacccctgaccattcgtgcgtggcacggagccgggtatctgcgggtacagcgatgaacagggcagacgtggccaggccacactaccatcacccctttctccaaccctgaaaaacagttcctgagacctgaactattgaccatcattttaatcggaccaactgcagctgtaacaagcttctctttggggtcacaatgaccactgcaggcaggggaaatttaggcctcatccccaggagcactgctttccanaagcaagaggggcgcctgactgtgaagcaggagccagcaaaccanacctgggggcagggcagcagtctccagaagaactatcctcctgtctgcgaaatcttccggctacacttcaggcaattgtgttaccacganatgtctgggccgcangaacattgatccggcttcggganctctgccgctggtgggctcatgccagaagttgcacaccaangancaaatcctggaactgctgggtgcttgaacagttcctgaacatcctccctggggggaactcccggaacttgggttcaacttgcatcnccccttgaaaaattgttaaagaaagcttgttggctttttgttggaaagaatttcccaaaaaaacccctcnanttgggantnaa

SEQ ID NO: 2630 - DNA, 660 bp, Homo sapiens
  misc_feature (138)..(138): "n" may be a, t, c, g, other or unknown
  misc_feature (160)..(160): "n" may be a, t, c, g, other or unknown
  misc_feature (358)..(358): "n" may be a, t, c, g, other or unknown
  misc_feature (381)..(381): "n" may be a, t, c, g, other or unknown
  misc_feature (396)..(396): "n" may be a, t, c, g, other or unknown
  misc_feature (407)..(407): "n" may be a, t, c, g, other or unknown
  misc_feature (450)..(450): "n" may be a, t, c, g, other or unknown
  misc_feature (516)..(516): "n" may be a, t, c, g, other or unknown
  misc_feature (584)..(584): "n" may be a, t, c, g, other or unknown
  misc_feature (590)..(590): "n" may be a, t, c, g, other or unknown
  misc_feature (627)..(627): "n" may be a, t, c, g, other or unknown
  misc_feature (638)..(639): "n" may be a, t, c, g, other or unknown
gttgttgcttgggcgcttctccgctgcgtgtaggtgaagggggcttcctgaccgaggaagacaatggtgtaaaattggttgatcctttgggtgaaatgttggcaccatcctgggaggaacatgccacctgtttagcanatgctgaggaacaagatatgcngagagtgcttattgacatcagcgagaaagaagctgtgaatctgcaacaagatgcctttgtagttattggtagagataccaggcccagcagtgagaaactttcacaatctgtaatagatggtgtgactgttctaggaggtcaattccatgattatggcttgttaacaacaccccagctgcactacatggtgtattgtcnaaacccgggtggccgatatgganaggctactatagaangttactaccanaaactctctaaggcttttgtggaactcaccaaacaagcttctngcagtggagatgaatacacatcacttaacgttgactgtgcaaatggcatatgggccctgaagctantgggaaatggaacactacttctcacagggcctgtcagttcacctgtttaatgatgggtccaagggcanactcantcatttatgtggagctgactttgtgaaaagtcatcanaaacctccacnnggaatggaaatttaatccaat

SEQ ID NO: 2631 - DNA, 573 bp, Homo sapiens
  misc_feature (388)..(388): "n" may be a, t, c, g, other or unknown
  misc_feature (482)..(482): "n" may be a, t, c, g, other or unknown
  misc_feature (487)..(487): "n" may be a, t, c, g, other or unknown
  misc_feature (516)..(516): "n" may be a, t, c, g, other or unknown
  misc_feature (551)..(551): "n" may be a, t, c, g, other or unknown
  misc_feature (564)..(564): "n" may be a, t, c, g, other or unknown
agcgcagtatggcgggcggggcccgggaggtgctcacactgcagttgggacattttgccggtttcgtgggcgcgcactggtggaaccagcaggatgctgcgctgggccgagcgaccgattccaaggagcccccgggagagctgtgccccgacgtcctgtatcgtacgggccggacgctgcacggccaggagacctacacgccgcgactcatcctcatggatctgaagggtagtttgagctccctaaaagaggaaggtggactctacagggacaaacagttggatgctgcaatagcatggcaggggaagctcaccacacacaaagaggaactctatcccaagaacccttatctccaagactttctgagtgcagagggagtgctgaatantgatggtgtctggagggtcaaatccattcccaatggcaaaggttcctcaccactccccaccgctacaactccaaaaccacttatccctacagangccancatcagggtctggtcagacttcctcagantccatctccatccccggagcatctgtatgattcanaagtacaaccacnatgggggaa

SEQ ID NO: 2632 - DNA, 806 bp, Homo sapiens
  misc_feature (351)..(351): "n" may be a, t, c, g, other or unknown
  misc_feature (485)..(485): "n" may be a, t, c, g, other or unknown
  misc_feature (496)..(496): "n" may be a, t, c, g, other or unknown
  misc_feature (509)..(509): "n" may be a, t, c, g, other or unknown
  misc_feature (570)..(570): "n" may be a, t, c, g, other or unknown
  misc_feature (575)..(575): "n" may be a, t, c, g, other or unknown
  misc_feature (666)..(666): "n" may be a, t, c, g, other or unknown
  misc_feature (696)..(696): "n" may be a, t, c, g, other or unknown
  misc_feature (724)..(724): "n" may be a, t, c, g, other or unknown
  misc_feature (758)..(758): "n" may be a, t, c, g, other or unknown
  misc_feature (788)..(788): "n" may be a, t, c, g, other or unknown
  misc_feature (795)..(795): "n" may be a, t, c, g, other or unknown
  misc_feature (803)..(803): "n" may be a, t, c, g, other or unknown
tcccaagatggcgtccatcatggaagggccgctgagcaaatggactaacgtgatgaagggctggcagtaccgttggttcgtgctggactacaatgcaggactgctctcctactacacgtccaaggacaaaatgatgagaggctctcgcagaggatgtgttagactcagaggagctgtgattggtatagacgatgaggacgacagcaccttcacaataactgttgatcagaaaaccttccatttccaggcccgtgatgctgatgagcgagagaagtggatccatgccttagaagaaacaattcttcgacatactctccagcttcaaggtttggattcaggatttgttcctantgtccaagattttgataagaaacttacagaagctgatgcttacctacaaatcttgattgaacaattaaagctttttgatgacaagcttcaaaactgcaaagaagatgaacagagaaagaaaattgaaactctcnaagagacaacnaatagcatggtanaatcaattaaacactggcattgtgttgctgcagattgccaaaagtactattaatcccgttnatgcnatatatcaacctatcctttgggaacctgtgatcagcacaatgccttcccagactgtgttacctccagaacctgttcagttgtgttagtcanaacagcgtccatcttcctacccatttgganctgtttttgggctaccttggggaactcntccagactcctacccccaaattttttcagggcgntgggccctttcccccacccgaatttaccantcctccnctttcctncca

SEQ ID NO: 2633 - DNA, 570 bp, Homo sapiens
  misc_feature (498)..(498): "n" may be a, t, c, g, other or unknown
  misc_feature (524)..(524): "n" may be a, t, c, g, other or unknown
  misc_feature (535)..(535): "n" may be a, t, c, g, other or unknown
  misc_feature (554)..(554): "n" may be a, t, c, g, other or unknown
  misc_feature (566)..(566): "n" may be a, t, c, g, other or unknown
agaccggaaacggaggagagcgcgggggatgtgtttggcatggggacgcactgttacagttgcgctcctggttggctttgtgtttccgcggtgttggtagagtctcggtgtttctacctcttagcaccctttcctgccaccctttgtcctgtggaagcccggagacatcagcggctgcaattttgctactcgctgctcggcatggaacggtcaggtaccgcagttcagcgctcttggccccgcaggtcctcgggcatccccgtgccccgtgctgtacattcagttatcctccgacttcccggggtcgaaggtattacctgctgggttttagaatctattgctttacatctgagaaaagaaaaatcccagaaagataagatgacttgcccaagatcatagcgtgcctggaaagacagtgctccgattacaagctggtcgctgtgcctcattcgtcttgtcatcaactcctgtcagtttatccaagctccaaaagcgaanttgttttaacttttgcttcccaaganttatttgatantctcatttctgtttccctncttttatccttncgtt

SEQ ID NO: 2634 - DNA, 459 bp, Homo sapiens
  misc_feature (32)..(32): "n" may be a, t, c, g, other or unknown
  misc_feature (288)..(288): "n" may be a, t, c, g, other or unknown
  misc_feature (343)..(343): "n" may be a, t, c, g, other or unknown
  misc_feature (393)..(393): "n" may be a, t, c, g, other or unknown
  misc_feature (407)..(407): "n" may be a, t, c, g, other or unknown
  misc_feature (442)..(442): "n" may be a, t, c, g, other or unknown
  misc_feature (450)..(450): "n" may be a, t, c, g, other or unknown
  misc_feature (457)..(457): "n" may be a, t, c, g, other or unknown
gataactaaattgaaagtgctggcagtccatntggggattgattagaatctaggggagatgtagttgtcagtgttcattctgtatgtaactcctgtctttggtttcagatctggttaggttctgttgatccttggggaactttctcatttgtttttatttttgccttggatctatgaatacctgaatgtattgtctaaaatggaaaaatcttaatgtagccattctattactatcactgaccctaggcctgaaaaaagtcacacctagggttaaaaaatttttatttnattttattttatttacttatttagagacagtttccctcttttgcccaggctggantgcattggcatgatcccacttcactgtaacctctgcctcccaagctcaantgattctataaccncaagcctcctgagtagctagggattacaggccccncaccaatncccaacnaa

SEQ ID NO: 2635 - DNA, 780 bp, Homo sapiens
  misc_feature (528)..(528): "n" may be a, t, c, g, other or unknown
  misc_feature (535)..(535): "n" may be a, t, c, g, other or unknown
  misc_feature (603)..(603): "n" may be a, t, c, g, other or unknown
  misc_feature (647)..(647): "n" may be a, t, c, g, other or unknown
  misc_feature (727)..(727): "n" may be a, t, c, g, other or unknown
  misc_feature (735)..(736): "n" may be a, t, c, g, other or unknown
  misc_feature (744)..(744): "n" may be a, t, c, g, other or unknown
  misc_feature (767)..(767): "n" may be a, t, c, g, other or unknown
agaaaaaatgaatgtcataataaaatataaaacttacgtaaagaaaataaagtcattgtccaccttaatagctaaggtccacaagggtaacttatgcagcatttattttttttgaaagtcaaaattgaatttatttctttcacatggctggtttgctgcaatatgaagtttcagaatgggctgaagtaagttgattgagggatttgagttgaatgacattttcaagttcatttaaatatgataaaaattcattggtggtaaataacatctgtctttcctggaaaaaaaaaagttgtgtattttcatgattcagttaaaacaaaaaatgagcctgtgaatcccaggcctttttagtcctccataacatttgaacagtttgacttgtcagcaaagaaatacacttatcaaattttaaaccaatgggagcctgaaagtgttacagtgtactgcttctttgacaaaattctgtttaacaactaccctaacataatttataaatcaattaagataaaaccatttttttctgantatttangaatttgtgtcctcaaaatactgtgacatgaaagataggaaagaaattacctggttgccagacatgcncgattatctttcctcatttcagctggattttccaaagtccgtanattggataaagcagcatctcattcactgaagtcacaagataggtaggaacttctttaatgtgaatttgcatattttaacnattccttnnaaaaacanaaaccccttgatggattataatnttaaatgttttac

SEQ ID NO: 2636 - DNA, 849 bp, Homo sapiens
  misc_feature (120)..(120): "n" may be a, t, c, g, other or unknown
  misc_feature (579)..(579): "n" may be a, t, c, g, other or unknown
  misc_feature (680)..(680): "n" may be a, t, c, g, other or unknown
  misc_feature (700)..(700): "n" may be a, t, c, g, other or unknown
  misc_feature (703)..(703): "n" may be a, t, c, g, other or unknown
  misc_feature (783)..(783): "n" may be a, t, c, g, other or unknown
  misc_feature (789)..(789): "n" may be a, t, c, g, other or unknown
  misc_feature (802)..(802): "n" may be a, t, c, g, other or unknown
  misc_feature (827)..(827): "n" may be a, t, c, g, other or unknown
  misc_feature (839)..(839): "n" may be a, t, c, g, other or unknown
agaacgcacaggagttccatttttacaggtaataccctgctttcagcgtgatggtttattttgtctacatgaaaatggttgtataactttacgtgttcgaagatcttataataacatttntaccacttcaaatgaggaaccagatccagatccagttcaggagcttacctatgatttacgaagccagtgtgatgcaatcagggtgacaaaaaccgtccgtcccttcagtatggtgtgctgtcctgtcaatgagaatgcagccgccctcgtagtgagtgatggcagggtcatgatatgggaactcaagtctgcagtttgtaatcgaaattcacggaacagtagttctggtgtgtcacctttatattcaccagtgtctttctgtggaattcctgtaggagtgctacagaataaactcccagacctttccttagataacatgattgggcaaagtgcaattgctggggaagaacatcccagaggttcaattctgcgggaagtgcacctcaagttcctgctgacgggactgctttcaggactgcccgcaccacagtttgctattcgtatgtgtccaccgttgancacaaaaaacatcaagatgtatcagccactgctggctgttggtacaagttaatggtcctgtcctggtgttacatctcaccagtggtctgctacacaaaganttaagcatccactcatgttnaantcaaggggtattgaatggacaaatttgactaagtttccttccttttggctacctcaacaccaaacaatatggggaattangtgaanaaattgaacttcnacctgggttgaatcttcccaaccanggttaggaacantggcttttcc

SEQ ID NO: 2637 - DNA, 759 bp, Homo sapiens
  misc_feature (530)..(530): "n" may be a, t, c, g, other or unknown
  misc_feature (554)..(554): "n" may be a, t, c, g, other or unknown
  misc_feature (556)..(556): "n" may be a, t, c, g, other or unknown
  misc_feature (618)..(618): "n" may be a, t, c, g, other or unknown
  misc_feature (670)..(670): "n" may be a, t, c, g, other or unknown
  misc_feature (676)..(676): "n" may be a, t, c, g, other or unknown
  misc_feature (684)..(684): "n" may be a, t, c, g, other or unknown
  misc_feature (735)..(735): "n" may be a, t, c, g, other or unknown
  misc_feature (745)..(745): "n" may be a, t, c, g, other or unknown
atagcattgtaactcagaatggtgaagtatgctggaaaacaatcacagactgtgtgagctacacagagtcagagcagggtctggattactggggaagcgtgaggctgctgggccctgtgtgtgaggctgtccattcacatttcttatctctgaccaaggggcaatttgaaattcgatatgcaccgtggttccagtggacaagttttccagagttatttcctgaaatatttgatgccttggaaagtctacaatctcccgctatttctcttagcttaatgaaactgacatcgtgtctagaacgagccttgggtgatgtatttttactgattgggaaggaatgcccctttcttttaagagatctgctttcatctgaggagcttgctcaagtcttcagtcagtctgtgatgaatgtgctaaaagtcttcgttggctctccgtgtggtctcaacctgcgtaacgtcttatggcatgggtttgcgtcacctgaagaaattcctccaaaatactgttcaatgatgatactgttgacngcaggattgggtcagttactgaananttaccttcaaaacactaaacttacattggcacatcgctctttcatatctcttacaaacctcnaagatttgattgtttttcctgatgttacttatgaagtgctttccagtattanaaaaantgatgatnaaatctgcttttatatttaaaaaatcctgtttccatattggggaaattgcnctggtccaanttcaaattcccaca

SEQ ID NO: 2638 - DNA, 571 bp, Homo sapiens
  misc_feature (272)..(272): "n" may be a, t, c, g, other or unknown
  misc_feature (329)..(329): "n" may be a, t, c, g, other or unknown
  misc_feature (334)..(334): "n" may be a, t, c, g, other or unknown
  misc_feature (361)..(361): "n" may be a, t, c, g, other or unknown
  misc_feature (373)..(373): "n" may be a, t, c, g, other or unknown
  misc_feature (383)..(383): "n" may be a, t, c, g, other or unknown
  misc_feature (429)..(429): "n" may be a, t, c, g, other or unknown
  misc_feature (515)..(515): "n" may be a, t, c, g, other or unknown
  misc_feature (534)..(534): "n" may be a, t, c, g, other or unknown
  misc_feature (537)..(537): "n" may be a, t, c, g, other or unknown
  misc_feature (547)..(547): "n" may be a, t, c, g, other or unknown
  misc_feature (559)..(559): "n" may be a, t, c, g, other or unknown
gaaaagaggggctgaagtcgcccttgaataaccacagcagtggcacccacaaaggtgcagttcccacagcctcatagctgcttgtaggtgccacctcttaaggccattaccatagcaattaatactgaacatgagctttggagcagacaaacactcaaaccgaacagggggatggaggaaaggagcttcaatggcaagatctcctggactcctgtcctggcccctcctccccctgccccacccctgctctcctcctgctccccctctcagancttgccctgaccctgctcctctcccaggtgtattccgaacttaagtaccacccaganatganattcttccactggttcagcaagtggangaagctgcatcntgaccaggantatgaggtcacctggtacatatcctggagcccctgcacaaagtgtncaagggatatggccacgttcctggccgaagaccgaaggttaccctgaccatctttgttgcccgcctctactacttctgggacccanattaccaggaagcgcttcncancctgtgtcanaaaaaaaacggnccgcgtgccccc

SEQ ID NO: 2639 - DNA, 631 bp, Homo sapiens
  misc_feature (370)..(370): "n" may be a, t, c, g, other or unknown
  misc_feature (522)..(522): "n" may be a, t, c, g, other or unknown
  misc_feature (581)..(581): "n" may be a, t, c, g, other or unknown
  misc_feature (597)..(597): "n" may be a, t, c, g, other or unknown
  misc_feature (625)..(625): "n" may be a, t, c, g, other or unknown
  misc_feature (628)..(628): "n" may be a, t, c, g, other or unknown
  misc_feature (631)..(631): "n" may be a, t, c, g, other or unknown
agtcccgggagcccggcctcgtgcgccgcgctttgagcctctaggccatgaaactgcctcaccaagcactatgcaattgagtgcccaccagaagacacccctccagtcaacccacagaccccagaaagagtacccagaggagcctgagcacactccaccctatctgttctctgaaattcaatcaaatgagtcactctacttctctggaagcagaaagaggctggaagtttttctccagcagcagactgctcgacaaacactgcgccaagagctcctcagcagaagctcctcgcatcagatcctctgtgctgggaatcctcccctcttgagcacactctgtgctcctcttccagttacggtgcatgtgaancaatggtatgggaaaattgtttgcagaaggatgaaaaggctttattgccaaactcttaaggtattttgttaataaaatcattttcataatggaaaagactcagaaaattcccctcgcatgacatataacatccaacaaggggctgaaccaanaaaaaatactgcagctgctgctaatggcaacactgaagcaagcacctggcctgtgccangcactgtcctgtgcantctgtgtttgcactcattttatcctccnganccn

SEQ ID NO: 2640 - DNA, 754 bp, Homo sapiens
  misc_feature (199)..(199): "n" may be a, t, c, g, other or unknown
  misc_feature (201)..(201): "n" may be a, t, c, g, other or unknown
  misc_feature (406)..(406): "n" may be a, t, c, g, other or unknown
  misc_feature (572)..(572): "n" may be a, t, c, g, other or unknown
  misc_feature (657)..(657): "n" may be a, t, c, g, other or unknown
  misc_feature (670)..(670): "n" may be a, t, c, g, other or unknown
  misc_feature (688)..(688): "n" may be a, t, c, g, other or unknown
  misc_feature (735)..(735): "n" may be a, t, c, g, other or unknown
  misc_feature (740)..(740): "n" may be a, t, c, g, other or unknown
agcaacatggccgccgcctgagaggagagccgggccgccgccgtctctgcagcccgcgggtaactgggccgttgccgccgtccgcgctcggcccccgcggaaaaatcgagctgaaggactgcgcggctggctctcctctagtatggccaatgaagaggatgacccagttgtacaggagatcgatgtgtacttggccaanantctggcggaaaagctgtatctatttcagtaccctgtgcgtccagcctcgatgacctacgatgacattccgcacctctcagccaagatcaagcccaagcagcagaaggtagagcttgagatggccatcgacaccctgaaccccaactattgccgcagcaaaggggagcagattgcgctgaacgtggacggggcctgcgccgacganaccagcacgtattcctcgaagctgatggacaagcagaccttctgctcttcccagaccaccagtaacacatcccgttatgccgctgcactctacaggcaaggtgagctccacctgacacctttacatggcatcctgcagctgcgggccagcttctcctacctggatnaggctgacgccaagcaccgggagagggaagcggccaacgaagcagggggactcttcacaggatgaaggcggaaaacgatgtttancagatcacggtgncggttctcccggccggantcagaacagggcccgcagcgcccgtgttgccagtcctatgaattccnggcanaaaaaaacccccca

SEQ ID NO: 2641 - DNA, 744 bp, Homo sapiens
  misc_feature (646)..(646): "n" may be a, t, c, g, other or unknown
  misc_feature (656)..(656): "n" may be a, t, c, g, other or unknown
  misc_feature (664)..(664): "n" may be a, t, c, g, other or unknown
  misc_feature (722)..(722): "n" may be a, t, c, g, other or unknown
  misc_feature (733)..(733): "n" may be a, t, c, g, other or unknown
cactggcagatggagctgcgcacctgcggcctcccctacatcaacctcgagttcctcaaggcccacaccatgtaccaagtggggctgatggagacggaccagcacatcgagttcttctggggggccctggagatgttcacccaggaggagctgtgcaagttcatcaagtttgcctgcaaccaggagcgcatcccgttcacctgcccctgcaaagatgggggtcccgacactgcccatgtgcccccgtaccccatgaagatcgcccccccagatggcacagcaggttccccagactctcgctacatccgcgtggagacctgcatgttcatgatcaagcttccccagtactcctctctggaaatcatgctggagaaacttcgttgtgccattcactaccgtgaagaccccctcagtggctgatgggagggagccccacaattaggctgtcactgaggcacccactctgctggcttgggaagccaccactgcggcccgtccctccagggccctgcgtgaggagttggcaacattttgcttttccaaactttcgtccacattccagggcctcctggaaaattaaccttttgtctttgtacgtttcgtgatgggttggttcttttgctgcctgtttgtggtctatttgtangatagtttantttcccanaacagtttgtgtctaattttgatctttcttgggacattgtccctccattggccaccanaattcctaatngccattaaggg

SEQ ID NO: 2642 - DNA, 865 bp, Homo sapiens
  misc_feature (231)..(231): "n" may be a, t, c, g, other or unknown
  misc_feature (551)..(551): "n" may be a, t, c, g, other or unknown
  misc_feature (578)..(578): "n" may be a, t, c, g, other or unknown
  misc_feature (616)..(616): "n" may be a, t, c, g, other or unknown
  misc_feature (674)..(674): "n" may be a, t, c, g, other or unknown
  misc_feature (801)..(801): "n" may be a, t, c, g, other or unknown
  misc_feature (865)..(865): "n" may be a, t, c, g, other or unknown
aagaaggaaaatggacaatcatttctgcacatatagggtttaataaaacatgtataataaaatatctcatattttaaatttccaccttattggtagctttcatgacaaagggctagggtgctgatggccatacaattaaggtttttggttagttagttagcagaactaactggctcctacctggtgggtttttcttttgtttggttggttggttggttggttttttcccanatggctcaggaggaaggtaaatagcagtcattgtatgtgtgacagagtttgagatagaatgagcatattgaatctcacatcctattcttattactgtcaggcagcgttgacctagcagtataaaactatctgaagcaatgtagtcactcagttctcataaagtttatttcaagtactgtaacaattcatgtttggattagaaaagtcactagaaatttgacttccatatagtaatctatacttttttctctcatttccttcattttttgagccgtaagtgtaaggcattttgctggtattattacaatggttatgaggantttctttgcttgcccaaggtcacatanctagcaagttaaagtaaattcaaatccaggcctgctanataccaaattattatttaagaatacttttcactactcctaaattatgacacagatacntttgtcttacacatttcactttattgtccagtttattaatatgttttattttccaaaagttatttttttggcaatttccttttttattaattcccgtacttttttaaaattttacttccatttaatncaccgttcttcccttttaattccttttttaaaattaaatttttttggcctttttggtttatttn

SEQ ID NO: 2643 - DNA, 624 bp, Homo sapiens
  misc_feature (401)..(401): "n" may be a, t, c, g, other or unknown
  misc_feature (412)..(412): "n" may be a, t, c, g, other or unknown
  misc_feature (481)..(481): "n" may be a, t, c, g, other or unknown
  misc_feature (540)..(540): "n" may be a, t, c, g, other or unknown
  misc_feature (577)..(577): "n" may be a, t, c, g, other or unknown
  misc_feature (587)..(587): "n" may be a, t, c, g, other or unknown
  misc_feature (617)..(617): "n" may be a, t, c, g, other or unknown
  misc_feature (621)..(621): "n" may be a, t, c, g, other or unknown
agcgccttcgctctttggctccctgagttagtccggttgtttgcgatcgccgcggccggggctgcgaaccgaagggctcgctccgcgccgcctgggtctctacctcatccgtaggtgtggccctgatggtgtggcaggctctggactcctaaagctctggagcgaatttaagattttattcatgtgcatggcatagaagatgaattcttccacttccaccatgagtgaagagcctgacgctctatcggtagttaaccagttacgggatctagcagcagatccgttaaacagaagagccatcgtccaggatcagggatgtctgcctggccttattttatttatggaccatcccaaccctccagtcgtccactccgctttgcttgctcttcgatacttggcanaatgccgtgcnaacagagaaaagatgaaaggagaactgggtatgatgttgagcttacaaaatgttatacagaaaactacnactccagggagaaacaaaacttctggcctctgaaatctatgacattcttcagtcctccnatatggcagatggtgatagttttaatggagatgaatncacctccaanggaaagctcaattttttctggggaactacnaacnaac

SEQ ID NO: 2644 - DNA, 708 bp, Homo sapiens
  misc_feature (540)..(540): "n" may be a, t, c, g, other or unknown
  misc_feature (545)..(545): "n" may be a, t, c, g, other or unknown
  misc_feature (663)..(664): "n" may be a, t, c, g, other or unknown
  misc_feature (674)..(674): "n" may be a, t, c, g, other or unknown
  misc_feature (690)..(690): "n" may be a, t, c, g, other or unknown
  misc_feature (703)..(703): "n" may be a, t, c, g, other or unknown
gactatacaggacatgttcatcctggaacttacacaaataccttagaacgtctagtgaaggaaatggaagacacacaaaggctagatgaactgcagaagcaactacaagaagacataaggcaaggccgaggcattaaatccccaatcagaattggagaagaagacagtacagatgatgaggatggcctcttagaagagcacaaggaatttctaaagaaattttcagttacaattgatgctattcctgatcatcatccaggtgaagaaatatttaatttcctcaattctggaaaaattttcaatcagtataccttggatttaagagactctggttttattggacaaagtgctgtagaaaaacttattcttaaatcgggaaaaacagatcagatttttttgacaacacaaggtttccttacgtctgcttatcactatgtccagtgtcctgtccctgtgttaaagtggctgtttcggatgatgtcagttcatacagactgtattgtgtcagtgcagattttaagtacattgatggaaataacnattanaaatgataccttcagtgactcaccagtttggccatggatcccatcattgtctgatgtacagctgtgtttttccatatggggattgattttagatctttgtttccctggagaatcttcnnccagactttnatgaaaaactatctantttctgaaacccngacac

SEQ ID NO: 2645 - DNA, 644 bp, Homo sapiens
  misc_feature (336)..(336): "n" may be a, t, c, g, other or unknown
  misc_feature (402)..(402): "n" may be a, t, c, g, other or unknown
  misc_feature (447)..(447): "n" may be a, t, c, g, other or unknown
  misc_feature (539)..(539): "n" may be a, t, c, g, other or unknown
  misc_feature (603)..(603): "n" may be a, t, c, g, other or unknown
  misc_feature (608)..(609): "n" may be a, t, c, g, other or unknown
  misc_feature (616)..(616): "n" may be a, t, c, g, other or unknown
  misc_feature (643)..(643): "n" may be a, t, c, g, other or unknown
cgctgtgagggagtcgctgtgatccggggccccggaacccgagctggagctgaagcgcaggctgcggggcgcggagtcgggagtgcaggcctgagtgttccttccagcatgtcggagggggagtcccagacagtacttagcagtggctcagacccaaaggtagaatcctcatcttcagctcctggcctgacatcagtgtcacctcctgtgacctccacaacctcagctgcttccccagaggaagaagaagaaagtgaagatgagtctgagattttggaagagtcgccctgtgggcgctggcagaagaggcgagaagaggtgaatcaacggaatgtnccaggtattgacagtgcatacctggccatggatacagaggaaggtgtagaggttatgtggaatgangtacagttctctgaacgcaagaactacaagctgcaggaggaaaangttcgtgctgtgtttgataatctgattcaattgggagcatcttaacattgttaagtttcacaaatattgggctgacattaaagaaaaacaangccagggtcatttttatcacagaatacatgtcatctggggaatctgaagcaatttctgaagaanaccannaagaacnccagacgatgaatgaaaagcatggaanc

SEQ ID NO: 2646 - DNA, 752 bp, Homo sapiens
  misc_feature (198)..(198): "n" may be a, t, c, g, other or unknown
  misc_feature (256)..(256): "n" may be a, t, c, g, other or unknown
  misc_feature (398)..(398): "n" may be a, t, c, g, other or unknown
  misc_feature (572)..(572): "n" may be a, t, c, g, other or unknown
  misc_feature (587)..(587): "n" may be a, t, c, g, other or unknown
  misc_feature (608)..(608): "n" may be a, t, c, g, other or unknown
  misc_feature (639)..(639): "n" may be a, t, c, g, other or unknown
  misc_feature (674)..(674): "n" may be a, t, c, g, other or unknown
  misc_feature (689)..(689): "n" may be a, t, c, g, other or unknown
  misc_feature (697)..(697): "n" may be a, t, c, g, other or unknown
  misc_feature (714)..(714): "n" may be a, t, c, g, other or unknown
  misc_feature (752)..(752): "n" may be a, t, c, g, other or unknown
tttcataaatcatttgctcctgtcttttgctttaattgtcctatttgctataaatacttttttatactctacttttttattcaatttaatatgatcaagtatgttcgtcttttttgtatgttgacctttcggtgatatttttgttttttttaatttggggtgtgtgtgtgtgtggtggtggtggtggttgttatatantactgatgtggtattacttgttcttgatactatagctctatagctttgtgattactanttcttgacatgttagggtggcatttactgcttgtctcctgttcaagtaacttttctttctagttaaaatgagaatgaaattttccttaaaattaataaacttacctttttatattgagattaatcattcatttttttttganatggggtctcgctatgctgaccaggctgttcttgaactcctggtctccagtgatcctcctatttcagcctcccaaagggctagaattacaggtgtgagccactgcaactggctatattaagattaatctttattctctatttacagcaagtatttgcccacttgtgttctgttnaacaaagaaatcaantgtttttcctttgtaacgtancacaattaatttctttgtcattttaatgccntcctttgaataaattttttttatcattaaggtggnaataattatccccantaattttnatggttgtttattaatngaaaacaaactttcctacccaaactttttggggcattn

SEQ ID NO: 2647 - DNA, 828 bp, Homo sapiens
  misc_feature (659)..(659): "n" may be a, t, c, g, other or unknown
  misc_feature (678)..(678): "n" may be a, t, c, g, other or unknown
  misc_feature (688)..(688): "n" may be a, t, c, g, other or unknown
  misc_feature (766)..(766): "n" may be a, t, c, g, other or unknown
  misc_feature (777)..(777): "n" may be a, t, c, g, other or unknown
  misc_feature (788)..(788): "n" may be a, t, c, g, other or unknown
  misc_feature (803)..(803): "n" may be a, t, c, g, other or unknown
  misc_feature (814)..(814): "n" may be a, t, c, g, other or unknown
atctgctgatgagtccaggccccggtccattctcctcgcgctgcaaggatgctcctgggatttcggagaggccgcaggagtcatttcaaacagggtctcgctctgtcgcccaggctagagtgcagtggtgcgatcatagctcactgcatcctcgaactcctgggctcaagcgatcttcccaccccagcctcccgaggagctgagactacaggcgcgcgccactactcccggctaattgttcaatatttttgtggaaacagggatcttgctatgttcctatggtggtcttgagctccttagcctcctaaagtgttggtatcacaggcgtgagccactgtgcccggcgttaacaatcttctgccccagggtcggccacagttggacaggagcaccctgcctcccctgtagcattcgtccccgtgcccggagttaactcctggacgacgtacacctgctgcactgctggatatagccattcttcatttttccctcctccacccaccatgtacaccccatcagcaagtcccatccgatatacccactacatacatctgccagctgttcccatctccacccacaccccgggctccagcatctgtctggactgctgcggcaaatcctcactggtttctctgcttccactctcgcccttcccctangtcattctccacgttacancccaaggggnatcttaatatttatttattaattttaatttaagtttttaaaaaaacagggttctttgttccctggattttcccccccnttgggaattcnccccggccccnacttcttaactttantgcgttgcgcnctccccccccccct

SEQ ID NO: 2648 - DNA, 786 bp, Homo sapiens
  misc_feature (629)..(629): "n" may be a, t, c, g, other or unknown
  misc_feature (747)..(747): "n" may be a, t, c, g, other or unknown
  misc_feature (756)..(756): "n" may be a, t, c, g, other or unknown
  misc_feature (760)..(760): "n" may be a, t, c, g, other or unknown
  misc_feature (771)..(772): "n" may be a, t, c, g, other or unknown
agttaaaacagctgagcttctgaatgcctgcaagaagctgccctttgaaattaagaacttcgtgaagaaaacagaggctcttcggttgcagtatcgctacttagacttgcgtagtttccaaatgcagtataacctgcgactgaggtcccagatggtcatgaaaatgcgggaatatctctgtaatctgcatgggtttgtggatatagaaacccccacattgtttaagaggaccccagggggtgccaaagagtttttagtaccatccaggggaacctggaaagttttgttctctccctcagagtcctcaacagtttaagcaacttctgatggttggcggtttagacagatattttcaggttgcccgatgttatcgagatgaaggttcaagaccagacagacagcctgagtttactcagattgacatagagatgtcatttgtagaccagactgggatccagagtttaattgagggtttgctccagtattcctggcccaatgacaaagatcctgtggttgttccttttcctactatgacttttgctgaagtgctggccacctatggaactgataaacctgacactcgctttgggaatgaagattatagatatcagtgatgttgtttagaaacncagagattggatttcttcaaaatgcccttagttaaccccctgggaactgttgaaaagccattttgtttccctgaaaggaaccaaaatactttaaaaaagggaaaagaactttgaaatnccatttaanaaancttccggaagnnttgaacccattttt

SEQ ID NO: 2649 - DNA, 546 bp, Homo sapiens
  misc_feature (467)..(467): "n" may be a, t, c, g, other or unknown
  misc_feature (477)..(477): "n" may be a, t, c, g, other or unknown
  misc_feature (482)..(482): "n" may be a, t, c, g, other or unknown
  misc_feature (504)..(504): "n" may be a, t, c, g, other or unknown
  misc_feature (533)..(533): "n" may be a, t, c, g, other or unknown
cttttttcccgggaactaagtgttaaacatttaccagcacaccactgcctagacttgttaggaaattcacaagtgagaagaaattctgtgattccaggagatgaaagagggaagtgtaatgagaatatcaacttgagtattttatccgttgctttctttaattgggtcatttcagagggtgggtagattttgttaagacagttgaaatatttaggtaggtagaggggtgagtgcagttgaagagtaaaggctgtttggggcagacaaaaggatgatagcactctttcaagtgctctgccaccagcagtaaaagtcgggagaaggacctagcaccaggacacgtgatctgtccggcgtaagcgagtgctgagtcaaaggcctgcaattcaggcccctgctctggggcacggtcagtttcagccaggcccaactctctttcccaggtccatggcgtggatggcacccanaatccagcangggantgctggtggatacacctggganggcctggtggaagatcatttgcgttgcanaaataaggaaata

SEQ ID NO: 2650 - DNA, 783 bp, Homo sapiens
  misc_feature (40)..(40): "n" may be a, t, c, g, other or unknown
  misc_feature (129)..(129): "n" may be a, t, c, g, other or unknown
  misc_feature (405)..(405): "n" may be a, t, c, g, other or unknown
  misc_feature (524)..(524): "n" may be a, t, c, g, other or unknown
  misc_feature (619)..(619): "n" may be a, t, c, g, other or unknown
  misc_feature (660)..(660): "n" may be a, t, c, g, other or unknown
  misc_feature (726)..(726): "n" may be a, t, c, g, other or unknown
  misc_feature (748)..(748): "n" may be a, t, c, g, other or unknown
  misc_feature (754)..(754): "n" may be a, t, c, g, other or unknown
  misc_feature (764)..(764): "n" may be a, t, c, g, other or unknown
  misc_feature (771)..(771): "n" may be a, t, c, g, other or unknown
aaggggctccgtagctcggggcagggtgggcgcgagagancctagaagcccatgtagccgcgaatcccgcagccccagtacacctccctccgtgcctccccgccttttctgcagagctccgccctggantgaaggaggagccgtcacctggagctccgaaaaaagcagaagaaggcgctttttatttagccagtgtgaccccgccagggccttctcggttgggtgagcactctctctgaccaggccatgaaaagaaaaatctgtgcgatgcctccccacatgtcacgggactctgacttgcctttgtcgtcagagtttgcagaactttgggggacctgagaggggagtgccccctggacgggccacggctgtctgtggcttaagggcttttggaagggcggaganagggaaacggcgtcctagtggcctgcttcagggccacccacgggccctcccccaacctctctctgatccaacttgtttttccagcctaattggaaacttgtggatgctgtgacctcaanaaaattggcattttatttggaagatagacatctatttgcaactgtcctgagcccctattttcctcccacctttcttggggaaacttgtttttaangggtgccactgtttttgttacatgttgctcctagctcttancattcatgggtactgttgttaaccgtccaatgggttcacttttgtctgctagatagaaccgatttntccagaacgggggaattaccantggaanaaagaatttnttccccnccaaaaacccgg

SEQ ID NO: 2651 - DNA, 718 bp, Homo sapiens
  misc_feature (356)..(356): "n" may be a, t, c, g, other or unknown
  misc_feature (561)..(561): "n" may be a, t, c, g, other or unknown
  misc_feature (642)..(642): "n" may be a, t, c, g, other or unknown
  misc_feature (664)..(664): "n" may be a, t, c, g, other or unknown
  misc_feature (673)..(673): "n" may be a, t, c, g, other or unknown
  misc_feature (696)..(696): "n" may be a, t, c, g, other or unknown
  misc_feature (705)..(705): "n" may be a, t, c, g, other or unknown
gctgtcggagctcagaccagcaggcctacgacctagaaagtgctcaaaaccccacttcctaaggcctagaaggagcgacgtgaagatataaggtctcactatgttgcccatgctggtttcaaactcctgggctcaagtgatcctcctgcctctgtcttccaaattgctgagattactggcatgagccattgcacctggccttcttttttgagatggcctcaggttggctctgcctggagagggggaagcttgtaaagatggcttagaaaaaaagtcctggctccatttctattttctcccttcttttgctggcctgtttcctgctttttgcaaattgcaggaacaagaccctgcanatggagaagatcaaggctcgtttgaaggctgagtttgaggcacttgagtcagaggaaaggcacctgaaggaatacaagcaggagatggaccttctgctacaggagaagatggcccatgtggaggaactccgactgatccacgctgacatcaatgtgatggaaaacactatcaaacaatctgagaatgacctaaacaagctgctanaatctacaaaggaagctgcatgatgagtataagccactgaaagaacatgtggatgccctgcgcatgactctgggcctgcanaagctccctgacttgtgtgaanaaaaagaanaactttcctttggattactttgnaaaagccanaaagcagaatggc

SEQ ID NO: 2652 - DNA, 700 bp, Homo sapiens
  misc_feature (379)..(379): "n" may be a, t, c, g, other or unknown
  misc_feature (584)..(584): "n" may be a, t, c, g, other or unknown
  misc_feature (621)..(621): "n" may be a, t, c, g, other or unknown
  misc_feature (657)..(657): "n" may be a, t, c, g, other or unknown
  misc_feature (671)..(671): "n" may be a, t, c, g, other or unknown
  misc_feature (673)..(673): "n" may be a, t, c, g, other or unknown
  misc_feature (686)..(686): "n" may be a, t, c, g, other or unknown
acgcctcgtgaccatcatgctggccaacaatgagactggcattgtcatgcctgtccctgaaatcagtcagcgcattaaagccctgaaccaggaacgggtggcagctgggctacctcccatcctcgtgcacacggatgctgcacaggccttggggaagcagcgcgtggatgtggaggacctgggcgtggacttccttacaatcgtggggcacaagttttatggtcccaggattggcgcactttatatacgaggacttggtgaatttacccctctctaccctatgctatttggaggtggacaagaacggaatttcaggccagggacagagaacaccccaatgattgctggccttgggaaggccgcggagctggtgacccanaactgcgaggcttatgaagcccacatgagggacgtccgcgactacctggaagagaggctggaagctgaattcggtcagaagagaatccatctgaatagccagtttccaggcacccagcggcttcccaatacctgtaacttttccatccggggaccccggcttcaagccacgtggtgcttgcgcagtgccgaatgctgatggccantgtgggggccgcgtgccactcggaacacggggaccanccgtccccagtgctgctgaactacggtgtcccttcnacttggcaagaaancnctccgggttcaangttgggcccccccc

SEQ ID NO: 2653 - DNA, 645 bp, Homo sapiens
  misc_feature (24)..(24): "n" may be a, t, c, g, other or unknown
  misc_feature (283)..(283): "n" may be a, t, c, g, other or unknown
  misc_feature (288)..(288): "n" may be a, t, c, g, other or unknown
  misc_feature (344)..(344): "n" may be a, t, c, g, other or unknown
  misc_feature (429)..(429): "n" may be a, t, c, g, other or unknown
  misc_feature (432)..(432): "n" may be a, t, c, g, other or unknown
  misc_feature (472)..(472): "n" may be a, t, c, g, other or unknown
  misc_feature (536)..(536): "n" may be a, t, c, g, other or unknown
  misc_feature (539)..(539): "n" may be a, t, c, g, other or unknown
  misc_feature (552)..(552): "n" may be a, t, c, g, other or unknown
  misc_feature (558)..(558): "n" may be a, t, c, g, other or unknown
  misc_feature (635)..(635): "n" may be a, t, c, g, other or unknown
  misc_feature (637)..(637): "n" may be a, t, c, g, other or unknown
  misc_feature (642)..(642): "n" may be a, t, c, g, other or unknown
gaaattatcggagggaggtagtanaagatatcaacaaattattgaaatatctggatttggaagaggaagcagacacaactaaagcatttgacctgagacagaatcattccattttaaaaatagaaaaggtcctcaagagaatgagagaaataaaaaatgaacttctccaagcacaaaacccttctgaattgtacctgagctccaaaacagaattgcagggtttaattggacagttggatgaggtaagtcttgaaaaaaacccctgcatccgggaagccagganaagancagtgatcgaggtgcaaactctgatcacatatattgacttgaaggaggcccttganaaaagaaagctgtttgcttgtgaggagcacccatcccataaagccgtctggaacgtccttggaaacttgtctgagatccaggganaanttctttcatttgatgggaaatcgaaccgattagaactacntccggctggaagagctgctcaccaaagcagctgctagccctggatgctgttgatccgcaggganaanaaaaatgttaggntgccangaaaacaagctgtgaagcttgcgcagaaatattctcagctatctcgaccttgaaatcttgatgaatggggaattctngnaattnccc

SEQ ID NO: 2654 - DNA, 705 bp, Homo sapiens
  misc_feature (529)..(529): "n" may be a, t, c, g, other or unknown
  misc_feature (634)..(634): "n" may be a, t, c, g, other or unknown
  misc_feature (663)..(663): "n" may be a, t, c, g, other or unknown
  misc_feature (666)..(666): "n" may be a, t, c, g, other or unknown
  misc_feature (670)..(670): "n" may be a, t, c, g, other or unknown
  misc_feature (679)..(679): "n" may be a, t, c, g, other or unknown
gcaaacatactttaataagttaaagaaaataacaaaaacagtacagcaaagatactgggcaatgaaagaaagaaacatacaatttcaaaggtataacaaactgaggcattctgtaatatacattcaggctatttttaggggaaagaaagctagaagacatttaaaaatgatgcatatagccgcaactctcattcagaggagatttagaactctaatgatgagaagaagattcctctctctcaagaaaactgctattttgattcagagaaaatatcgggcacatctttgtacaaagcatcacttacagttccttcaggtacaaaatgcagttattaaaatccagtcatcatacagaagatggatgataaggaaaaggatgcgagagatgcacagggctgctactttcatccagtctactttcagaatgcacagattacatatgagatatcaggctttgaaacaggcctccgttgtgatccaacagcaataccaagcaaatagaagctgcaaaactgcagaggcagcattntctcagacaaagacactctgctgtgatccttcaggctgcattcaggggtttgaaaactagaagacatttgaagaatatgcattcctctgcaacccttattcagantaggtttagatcattactgggtgaggganaanatcntttccctcnaaaaaaagctactatttttttgtttc

SEQ ID NO: 2655 - DNA, 771 bp, Homo sapiens
  misc_feature (558)..(558): "n" may be a, t, c, g, other or unknown
  misc_feature (678)..(678): "n" may be a, t, c, g, other or unknown
  misc_feature (696)..(696): "n" may be a, t, c, g, other or unknown
  misc_feature (699)..(699): "n" may be a, t, c, g, other or unknown
  misc_feature (723)..(723): "n" may be a, t, c, g, other or unknown
  misc_feature (747)..(747): "n" may be a, t, c, g, other or unknown
tttatgatgaacgctggaaggaaaagcaggaacagggcttcacttggtggttaaattttatattaacccctgatgacttcactgtaaaaacaaatatttctgaagtaaatgctgctactcttcttttgggaatagagaatcaacataaaataagtgttcctagagcacctacaaaagaggaaatgtctctcagagcttatactgctcggtgtaggttaaacagactacgtcgtgcagcatgccgtttgtttacttctgaaaaaatggttaaagctattaaaaagcttgaaattgaaattgaagctaggcggttaattgttcgaaaagatagacacctatggaaagatgtgggagaacgtcagaaagtcctgaattggctgttgtcctacaatcctttgtggcttcgaattggtctagagacaacttatggagaactcatatctttggaagataacagtgatgtcacagggttggctatgtttattctgaatcgcctactttggaatcctgatatagcagctgagtatagacaccccactgttcctcacctgtataganatggtcatgaagaactttgtccaagtttacattgaaaaaattattgttgttggtctgtttcttgaattatgctaaaaattttccagactccttgatcatgatccttggtctcttctgttnaagatgcccaaattccanggntagtaaaaaaaatccctttaaggntttttccccaaaaatttccctaantttgttgaaaggtgaacctttccc

SEQ ID NO: 2656 - DNA, 650 bp, Homo sapiens
  misc_feature (351)..(351): "n" may be a, t, c, g, other or unknown
  misc_feature (397)..(397): "n" may be a, t, c, g, other or unknown
  misc_feature (400)..(400): "n" may be a, t, c, g, other or unknown
  misc_feature (412)..(412): "n" may be a, t, c, g, other or unknown
  misc_feature (420)..(420): "n" may be a, t, c, g, other or unknown
  misc_feature (480)..(480): "n" may be a, t, c, g, other or unknown
  misc_feature (509)..(509): "n" may be a, t, c, g, other or unknown
  misc_feature (558)..(558): "n" may be a, t, c, g, other or unknown
  misc_feature (583)..(583): "n" may be a, t, c, g, other or unknown
  misc_feature (615)..(615): "n" may be a, t, c, g, other or unknown
  misc_feature (617)..(617): "n" may be a, t, c, g, other or unknown
  misc_feature (645)..(645): "n" may be a, t, c, g, other or unknown
gtcgttaggggagcgagtcgtgaccggttgggccacactcaacgtgggacgaagcttcgcctactgtttgactacgtgcgtgcagcctcccctcgatgtcggccctcgaaaagagcatgcacctcggccgccttccctctcgcccacctctacccggcagcgggggcagtcagagcggagccaagatgcgaatgggccctggaagaaagcgggacttttcccctgttccttggagtcagtattttgagtccatggaagatgtagaagtagagaatgaaactggcaaggatacttttcgagtctacaagagtggttcagagggtccagtcctgctccttctgcatggaggangtcattctgccctttcttgggctgtgttcacggcagcgattattantanagttcagtgtangattgtanctttggatctgcgaaatcatggtgaaacaaaggtcaagaatcctgaagatctgtctgcanaaacaatggcaaaagacgttggcaatgtngttgaaccatgtttggggaccttcctcctccaattatgctgattggacnttagcatggggttgtgctattgcantccacacaagcatcatcccaacctggttaccnancctctttgggtctgttcatgaattgatnttgtt

SEQ ID NO: 2657 - DNA, 683 bp, Homo sapiens
  misc_feature (448)..(448): "n" may be a, t, c, g, other or unknown
  misc_feature (529)..(529): "n" may be a, t, c, g, other or unknown
  misc_feature (585)..(585): "n" may be a, t, c, g, other or unknown
  misc_feature (653)..(653): "n" may be a, t, c, g, other or unknown
  misc_feature (663)..(663): "n" may be a, t, c, g, other or unknown
  misc_feature (665)..(665): "n" may be a, t, c, g, other or unknown
  misc_feature (680)..(680): "n" may be a, t, c, g, other or unknown
ccaggcacagtgacattgtcgtcctttatgcccgaaccctgagagctttggacactagtgaacaggagcgcatgaaaagttccctactgaaggaacagatgctaaggaaacaggccgagttagaatcagcacagtgccgactccaactgcaggtcctcactgataagtgcactaggcttcaaaggcgtgttcaggacttgcaaaaacttacgtcacatcaaagtcagaatttacagcaacccaggggctcccaagcatgggtcctgagctgctcaccctccagccagggccagcacaagcacaagtaccacttccaaaagaccttcacagtatctcaggcaggaaactgccggatcatggcatactgtgatgctctgagctgcctggtgatatcacagccttctcctcaggcctcttttcttccaggctttggtgttaagatgttgantactgccaacatgaagagcagtcagtacattccgatgcatggcaaacagatccgtggactggcgtttaacagttacctcanaagcttgctactctctgcttccctagacaacactattaaactgaccagcctggganacaaataccgtggtccaaacttataatgctgggactccttgtctggaactgttgctggtgtcttgatnaaactaactncntctatgctggactanccc

SEQ ID NO: 2658 - DNA, 514 bp, Homo sapiens
  misc_feature (417)..(417): "n" may be a, t, c, g, other or unknown
  misc_feature (438)..(438): "n" may be a, t, c, g, other or unknown
  misc_feature (444)..(444): "n" may be a, t, c, g, other or unknown
  misc_feature (500)..(500): "n" may be a, t, c, g, other or unknown
  misc_feature (507)..(507): "n" may be a, t, c, g, other or unknown
aagcccatccagaggttcccacagttcatactcctgcttcaggacatgctgaagaacacccccaggggccatccggacaggctgtcgctgcagctggccctcacagagctggagacgctggctgagaagctgaacgagcagaagcggctggctgaccaggtggctgagatccagcagctgaccaagagcgtcagtgaccgcagcagcctcaacaagctgttgacctcaggccagcggcagctgctcctgtgtgagacgttgacggagaccgtgtacggtgaccgcgggcagctaattaagtccaaggagcgtcgggtcttcctgctcaacgacatgcttgtctgtgccaacatcaacttcaagggccagctggagatcagcagcctggtgcccctggggcccaagtatgtggtgaantggaacacggcgctgccccangtgcangtggtggaagtgggccagacggtggcacctatgacaaggacaatgtgctcatccancactcangcgccaa

SEQ ID NO: 2659 - DNA, 489 bp, Homo sapiens
  misc_feature (298)..(298): "n" may be a, t, c, g, other or unknown
  misc_feature (306)..(306): "n" may be a, t, c, g, other or unknown
  misc_feature (309)..(309): "n" may be a, t, c, g, other or unknown
  misc_feature (341)..(341): "n" may be a, t, c, g, other or unknown
  misc_feature (393)..(393): "n" may be a, t, c, g, other or unknown
  misc_feature (400)..(400): "n" may be a, t, c, g, other or unknown
  misc_feature (431)..(431): "n" may be a, t, c, g, other or unknown
  misc_feature (433)..(433): "n" may be a, t, c, g, other or unknown
  misc_feature (486)..(486): "n" may be a, t, c, g, other or unknown
acggcgcgctgggctcacactgtcccgccgcggacgggctttgtggttgggggcgcgcgtgcgagtgccagtgagagtgtgggtgcgcgctgtgggccgcggcgcgggtgggtggccgtgcgttcttgcgagccggcctgcaggaggcgaggctcccctggcctcccgcacccagcggcggaccgagcccctggagggaagttgccgcagccgcccgggccgccggccctcctgtcccgcgccaggtacacagcttctcctaccatgacttcgatctgatcagcaaacaagaaaattngtctcccntanttctggggcgtgttcaccacctacaaccacanagctgtcatggctgccatctctacttccatccctgtaatttcacagccccanttcacanccatgaaatgaaccacagtgcttctacaacnantccattgccttcttttataaccgaagtggaaagcatctttgccacaaaatggnaac

SEQ ID NO: 2660 - DNA, 703 bp, Homo sapiens
  misc_feature (266)..(266): "n" may be a, t, c, g, other or unknown
  misc_feature (312)..(312): "n" may be a, t, c, g, other or unknown
  misc_feature (336)..(336): "n" may be a, t, c, g, other or unknown
  misc_feature (514)..(514): "n" may be a, t, c, g, other or unknown
  misc_feature (541)..(541): "n" may be a, t, c, g, other or unknown
  misc_feature (574)..(574): "n" may be a, t, c, g, other or unknown
  misc_feature (583)..(583): "n" may be a, t, c, g, other or unknown
  misc_feature (615)..(615): "n" may be a, t, c, g, other or unknown
  misc_feature (652)..(652): "n" may be a, t, c, g, other or unknown
  misc_feature (674)..(674): "n" may be a, t, c, g, other or unknown
  misc_feature (682)..(682): "n" may be a, t, c, g, other or unknown
  misc_feature (689)..(689): "n" may be a, t, c, g, other or unknown
ttactgaaagaccttttggaccacccctaaatggagcatcttgatagatggcaaatccagtgtttcttaaacttgtccatgctgcccagagcccactgccttttatcagatgtgagacttcactgccacagtgtcatcccacagtttccttccctggacatttgataaagggaaaatcatttcttgtcctttaaggcagggactattattttttcacttttccacataccccacaacacctaacattgatttactcgtagtaggantttcatactgttgaactctctaaaggccatttgttccagggcctanctgggcttgtgaaggacaacagantcatttcctaaggaccccaaaagacagcatgaaggaaaaaataataataaactgctgttcacagtgccttgagtgtaccaccgtactttctgctatgccttgtccattccaatctggacagtctctgtgcccctcctttccactcaagtgttatccagcactcaagttctggctcaanggccaacatctccgtgggggacctcanccatcccagggcattgtgaccccttcctctaantccccgggnacactccctgattggtaccctctcattccacnaacatatgccattgtggcttacttgtcatttctttangtcttgccttccccagttgatnatgaaccnctataanaactaactcccata

SEQ ID NO: 2661 - DNA, 743 bp, Homo sapiens
  misc_feature (1)..(1): "n" may be a, t, c, g, other or unknown
  misc_feature (531)..(531): "n" may be a, t, c, g, other or unknown
  misc_feature (555)..(555): "n" may be a, t, c, g, other or unknown
  misc_feature (717)..(717): "n" may be a, t, c, g, other or unknown
  misc_feature (719)..(719): "n" may be a, t, c, g, other or unknown
  misc_feature (730)..(730): "n" may be a, t, c, g, other or unknown
  misc_feature (732)..(732): "n" may be a, t, c, g, other or unknown
  misc_feature (737)..(737): "n" may be a, t, c, g, other or unknown
naaatggaaaattagaagataatccttcctctggcagtcccccaaggactactttgttggggaccatattttcacctgtcttcaactttttttcaccagcaaataaaaatggaacgtcaggatcagattctccaggacaggctgtggaagctgaagaaatagtaaaacaacttgatatggaacaggtggatgagatcactaccagtactactacatcaactaatggagcagcttactcaaatcaagcagttcaagtgagaccatcactaaacaatggtttagaagaagcagaagaaacagttaatcgtgatatcccaccccttacagcaccagtaactccagatagtggttattcatcagcccacgcggaggccacctatgaagaagactgggaagtatttgacccctattatttcatcaaacatgtcccgccactgacagaagaacaactaaataggaaacctgctcttccgttgaaaacaagaagcacaccggaattctccctagttttagacttggatgaaacactantgcattgtagtctaaatgagctanaagatgcagcacttacttttccagtccttttccaagatgtcgtttatcaggtttatgttgagattaaagaccatttttcagggaattcctgggaacgaatgtctcagatgtttgaaaatcattcctttttactgcttctaaagaagggtttttgccaaaacnanttactgaaacntncttanaaccct

SEQ ID NO: 2662 - DNA, 739 bp, Homo sapiens
  misc_feature (382)..(382): "n" may be a, t, c, g, other or unknown
  misc_feature (415)..(415): "n" may be a, t, c, g, other or unknown
  misc_feature (495)..(495): "n" may be a, t, c, g, other or unknown
  misc_feature (550)..(550): "n" may be a, t, c, g, other or unknown
  misc_feature (566)..(566): "n" may be a, t, c, g, other or unknown
  misc_feature (598)..(598): "n" may be a, t, c, g, other or unknown
  misc_feature (626)..(626): "n" may be a, t, c, g, other or unknown
  misc_feature (645)..(645): "n" may be a, t, c, g, other or unknown
  misc_feature (688)..(688): "n" may be a, t, c, g, other or unknown
  misc_feature (692)..(692): "n" may be a, t, c, g, other or unknown
  misc_feature (717)..(717): "n" may be a, t, c, g, other or unknown
  misc_feature (733)..(733): "n" may be a, t, c, g, other or unknown
gtaaaagaaaaccctgaagaggaggaggaggaggaagaagaggaagaagaagatgaagaaagtgaagaagaggaggaagaggagggagaaagtgaaggcagtgaaggtgatgaggaagatgaaaaggtgtcagatgagaaggattcagggaagacattagataaaaagccaagtaaagaaatgagctcagattctgaatatgactctgatgatgatcggactaaagaagaaagggcttatgacaaagcaaaacggaggattgagaaacggcgacttgaacatagtaaaaatgtaaacaccgaaaagctaagagcccctattatctgcgtacttgggcatgtggacacagggaagacaaaaattctagataagctccgtcacncacatgtacaagacggtgaagcaggtggtatcncacaacaaattggggccaccaatgttcctcttgaagctattaatgaacagactaagatgattgaaaattttgatagaganaatgttcggattccaggaatgctaattattgatactcctgggcctgaatctttcngttatctgagaaattnaagaaactctctttgtgacattgccattttantttgttgatattatgcatggtttgggancccccgacaattgaatctntccaccttctccaatcctaaaaaaattttccctccttgtttgncccnccattaaaaattgattaggtttttntgaattgggaaaaaanaattcc

SEQ ID NO: 2663 - DNA, 753 bp, Homo sapiens
  misc_feature (591)..(591): "n" may be a, t, c, g, other or unknown
  misc_feature (677)..(677): "n" may be a, t, c, g, other or unknown
  misc_feature (715)..(715): "n" may be a, t, c, g, other or unknown
aataacctggagccggcggcgtaggttggctctttagggcttcaccccgaagctccaccttcgctcccgtctttctggaaacaccgctttgatctcggcggtgcgggacaggtacctcccggctgctgcgggtgccctggatccagtcggctgcaccaggcgagcgagacccttccctggtggaggctcagagttccggcagggtgcatccggcctgtgtgtggcgcgaggcagggaagccggtacccgggtcctggccccagcgctgacgttttctctcccctttcttctctcttcgcggttgcggcgtcgcagacgctagtgtgagcccccatggcagatacgaccccgagcggcccccaaggggcgggcgctgtgcaattcatgatgaccaataaactggacacggcaatgtggctttctcgcttgttcacagtttactgctctgctctgtttgttctgcctcttcttgggttgcatgaagcagcaagcttttaccaacgtgctttgctggcaaatgctcttaccagtgctctgaggctgcatcaaagattaccacacttccagttaagcagaacattcctggcccangctttgttagaagacagctgccactacctgttgtattcactcatctttgtaaattcctatccagttacaatgaattatcttcccantcttgttattctctttgcttcatgctgccacatatacnaaaaaagtccttgaagcaagggggtcaaaataattttt

SEQ ID NO: 2664 - DNA, 611 bp, Homo sapiens
  misc_feature (319)..(319): "n" may be a, t, c, g, other or unknown
  misc_feature (561)..(561): "n" may be a, t, c, g, other or unknown
  misc_feature (583)..(583): "n" may be a, t, c, g, other or unknown
  misc_feature (586)..(586): "n" may be a, t, c, g, other or unknown
  misc_feature (593)..(593): "n" may be a, t, c, g, other or unknown
  misc_feature (603)..(603): "n" may be a, t, c, g, other or unknown
tccatggactcttaccgaagggttatccccatctgtgctctatatgtgatttgccagttcattctaataaggagtggagtcaacatatcaatggagcaagtcacagtcgtcgatgccagcttcttcttgaaatctacccagaatggaatcctgacaatgatacaggacacacaatgggtgatccattcatgttgcagcagtctacaaatccagcaccaggaattctgggacctccacctccctcatttcatcttgggggaccagcagttggaccaagaggaaatctgggtgctggaaatggaaacctgcaaggacctanacacatgcagaaaggcagagtggaaactagcagagttgttcacatcatggattttcaacgagggaaaaacttgagataccagctattacagctggtagaaccatttggagtcatttcaaatcatctgattctaaataaaattaatgaggcatttattgaaatggcaaccacagaggatgctcaggccgcagtggattattacacaaccacaccagcgttagtatttggcaagccagtgaganttcatttatcccacaagttttnaanaataaanaaacctgaangaaagccc

SEQ ID NO: 2665 - DNA, 672 bp, Homo sapiens
  misc_feature (72)..(72): "n" may be a, t, c, g, other or unknown
  misc_feature (529)..(529): "n" may be a, t, c, g, other or unknown
  misc_feature (631)..(631): "n" may be a, t, c, g, other or unknown
  misc_feature (633)..(633): "n" may be a, t, c, g, other or unknown
  misc_feature (647)..(647): "n" may be a, t, c, g, other or unknown
  misc_feature (650)..(650): "n" may be a, t, c, g, other or unknown
  misc_feature (652)..(652): "n" may be a, t, c, g, other or unknown
agggcctgcgggagaccgtccgcctggctcgccgagctcgcccgctgtccgccagcccgcgggagggagganagaagcgaagcgtttccgcggttggctactcagtgtcttggtctcaagttgcctcattgcggctggcgttcccaatacagacgcatcgtttcttttttaatactccctaagaaagggaataaccttcaagctggcgggagcaatggttcacataaagaaaggcgagctgacccaggaggagaaggagctactggaagtcatcgggaaaggtactgtccaagaagctggaacattattatccagcaagaatgttcgtgtcaactgtttggacgagaatggaatgactcctctaatgcatgcagcatataaaggaaaactcgatatgtgcaaattactactgcgacatggagccgatgtaaattgtcatcagcatgaacatggatacacagccctcatgtttgctgcactttctggtaataaagacatcacatgggtaatgttagaagctggtgctganacagatgttgtcaactctgtgggaagaacagcagctcagatggcagcctttgtggatcaacatgattgtgtgaccataatcaacaatttctttcctccaaananactggattattacnctnanccccagggactggataaaga

SEQ ID NO: 2666 - DNA, 693 bp, Homo sapiens
  misc_feature (494)..(494): "n" may be a, t, c, g, other or unknown
  misc_feature (510)..(510): "n" may be a, t, c, g, other or unknown
  misc_feature (570)..(570): "n" may be a, t, c, g, other or unknown
  misc_feature (577)..(577): "n" may be a, t, c, g, other or unknown
  misc_feature (644)..(644): "n" may be a, t, c, g, other or unknown
  misc_feature (668)..(668): "n" may be a, t, c, g, other or unknown
  misc_feature (671)..(671): "n" may be a, t, c, g, other or unknown
  misc_feature (675)..(675): "n" may be a, t, c, g, other or unknown
  misc_feature (692)..(692): "n" may be a, t, c, g, other or unknown
gcgagtggttaaaagacagttggtgtcggttcgccttctcgggtcggattccgcggtcccaacccttccccatggccgaccctgaggagttgcaggtttcttcgccgcccccgccgcctccctcttctccctcctcttcagacgcctctgcagcatcttccccgggcggcccagtgagtttgggctggccagttccgagcaggagcagcggcccaacggtggaccagctggaggaagtggagctgcagatcggagacgcagccttttcattaaccaaacttcttgaagccacatctgcagtatcagctcaagtggaagaacttgccttcaaatgtacagaaaatgcacgtttccttaaaacgtggcgggacctcttgaaagaagctatgattctttgaaacctgatgactgatttggcatacttcgttgtttaataatgactgcaataattcatacttcttatgtcatattttgtacatgtaccacacatatangatgacctctgtccancagttctgtatatactcagaatgaaatttttcttggttttcttggtttttgtgaaagcanaataccnatgctatttttgttgcggaccaatacttgtttgtccttaaatactttatgcctctgaactttcatanaatcctttatgaaagttaacttcntcnatanacggttaatattaatana

SEQ ID NO: 2667 - DNA, 533 bp, Homo sapiens
  misc_feature (390)..(390): "n" may be a, t, c, g, other or unknown
  misc_feature (443)..(443): "n" may be a, t, c, g, other or unknown
  misc_feature (466)..(466): "n" may be a, t, c, g, other or unknown
  misc_feature (495)..(495): "n" may be a, t, c, g, other or unknown
  misc_feature (504)..(504): "n" may be a, t, c, g, other or unknown
  misc_feature (507)..(507): "n" may be a, t, c, g, other or unknown
tatatccacttcatctgtcacccagctgggcagccagctcagtgctatgcaaatcaacagctatggttcaggcatggctcctccaagccaggggaccccctggccctctgtcagccacatcattgcagactcctccacgacctccacagccgtccattttgcagcctggatctcaagttcttccaccaccacccaccacactcaatggtcctggtgcctcacctttgcctctaccaatgtacagaccagatgggctctctgggcctcctcctccaaatgcccagtaccagcccccacctcttccaggccagaccttgggtgctggatatcctccgcagcaggccaactctggtccccagatggcaggcgcacaactgtcttacccaggangcttccctggaggtcctgcacagatggctggtccgccacagccccagaagaanctggatcctgactctatccctancccaatccaggtgattgagaatgataganccagcagangangacaagtttatgccaccaacaccaga

SEQ ID NO: 2668 - DNA, 820 bp, Homo sapiens
  misc_feature (137)..(137): "n" may be a, t, c, g, other or unknown
  misc_feature (195)..(195): "n" may be a, t, c, g, other or unknown
  misc_feature (409)..(409): "n" may be a, t, c, g, other or unknown
  misc_feature (434)..(434): "n" may be a, t, c, g, other or unknown
  misc_feature (453)..(453): "n" may be a, t, c, g, other or unknown
  misc_feature (487)..(487): "n" may be a, t, c, g, other or unknown
  misc_feature (532)..(532): "n" may be a, t, c, g, other or unknown
  misc_feature (570)..(570): "n" may be a, t, c, g, other or unknown
  misc_feature (585)..(585): "n" may be a, t, c, g, other or unknown
  misc_feature (621)..(621): "n" may be a, t, c, g, other or unknown
  misc_feature (632)..(632): "n" may be a, t, c, g, other or unknown
  misc_feature (686)..(686): "n" may be a, t, c, g, other or unknown
  misc_feature (731)..(731): "n" may be a, t, c, g, other or unknown
  misc_feature (758)..(758): "n" may be a, t, c, g, other or unknown
  misc_feature (774)..(774): "n" may be a, t, c, g, other or unknown
  misc_feature (788)..(788): "n" may be a, t, c, g, other or unknown
  misc_feature (808)..(808): "n" may be a, t, c, g, other or unknown
ttgaaaccagttgacaacacttactacaaagaggcagaaaaagaaaatcttgtggaacaatccattccgtcaaatgcttgttcttccctggaagttgaggcagccatatcaagaaaaactccagcccagcctcaganaagatctcttaggctttctgctcagaaggatttggaacagaaagaaaagcatcatgtnaaaatgaaagccaagagatgtgccactcctgtaatcatcgatgaaattctaccctctaagaaaatgaaagtttctaacaacaaaaagaagccagaggaagaaggcagtgctcatcaagatactgctgaaaagaatgcatcttccccagagaaagccaagggtagacatactgtgccttgtatgccacctgcaaagcagaagtttctaaaaagtnctgaggagcaagagctggagaagantatgaaaatgcagcaagangtggtggagatgcggaaaaagaatgaagaattcnagaaacttgctctggctggaatagggcaacctgtgaagaaatcantgagccaggtcccaaatcagttgacttccacttccgcncagatgagcgaatcnaacaacatcctaagaaccaggaagaatattaggaantgaactttacntctgaactacgaaagcatccttcatctcctgcccgaattgactaagggatgttncattgtttaaacccttccaccctgtcccagggaaagaaaaaaaantttgatgaaaccgtttctacttttttnccccttgcaccgcaanttgaaaattccctnaaccaaacccctaaccgatnttcttttgaagg

SEQ ID NO: 2669 - DNA, 507 bp, Homo sapiens
  misc_feature (233)..(233): "n" may be a, t, c, g, other or unknown
  misc_feature (257)..(257): "n" may be a, t, c, g, other or unknown
  misc_feature (270)..(270): "n" may be a, t, c, g, other or unknown
  misc_feature (325)..(325): "n" may be a, t, c, g, other or unknown
  misc_feature (413)..(413): "n" may be a, t, c, g, other or unknown
  misc_feature (440)..(440): "n" may be a, t, c, g, other or unknown
  misc_feature (450)..(450): "n" may be a, t, c, g, other or unknown
  misc_feature (471)..(471): "n" may be a, t, c, g, other or unknown
  misc_feature (486)..(486): "n" may be a, t, c, g, other or unknown
tctttctcgtggcaaatcccaatgtacacgatttcaggtctcagacgccatgcctctccagcccacgcccttaggcaggtgatggcagcagctaggaataaggtgtacatgatccacagccctgcggagccaggtcaagccgctgctatgagagctccagggtgatggggacgattctgcccagtgtcctcagtctgtcccctcaggtcatggtcccaagtgaaatgacaganttcacagccctggtcttggctgangtccaggtcatantaagggcatgttcttggggccctcgacctgaactctgaccctccgggcagggaanaagaagttgtcccctttggttgtcctggctttggagtcctttgcaaaaatattttgggccccctgccactggctgcagaaatggctcnaccgggtgtgtggggacagacacccanaaagaatgtncttttgtggccttggtgtccnatggggctggggganaatgctctccactgacccaca

SEQ ID NO: 2670 - DNA, 584 bp, Homo sapiens
  misc_feature (544)..(544): "n" may be a, t, c, g, other or unknown
  misc_feature (557)..(557): "n" may be a, t, c, g, other or unknown
  misc_feature (575)..(575): "n" may be a, t, c, g, other or unknown
agcggctaggtggtgcacgggaaacgcgggcgtaggtgaccggcggctttctcagttttggtggagacgggcgcatgtgggcgctttgctcgctgctgcggtccgcggccggacgcaccatgtcgcagggacgcaccatatcgcaggcacccgcccgccgcgagcggccgcgcaaggacccgctgcggcacctgcgcacgcgagagaagcgcggaccgtcggggtgctccggcggcccaaacaccgtgtacctgcaggtggtggcagcgggtagccgggactcgggcgccgcgctctacgtcttctccgagttcaaccggtatctcttcaactgtggagaaggcgttcagagactcatgcaggagcacaagttaaaggttgctcgcctggacaacatattcctgacacgaatgcactggtctaatgttgggggcttaaatggaatgattcttactttaaaagaaaccggcttcccaagtgtgtgctttctggacctccacaactggaaaaatacctcgaaacaatcaaaatattttctggtccnttgaaaagaatanaactggctatgcggcccnctctgcccc

SEQ ID NO: 2671 - DNA, 560 bp, Homo sapiens
  misc_feature (465)..(465): "n" may be a, t, c, g, other or unknown
  misc_feature (516)..(516): "n" may be a, t, c, g, other or unknown
  misc_feature (519)..(519): "n" may be a, t, c, g, other or unknown
  misc_feature (523)..(523): "n" may be a, t, c, g, other or unknown
  misc_feature (537)..(537): "n" may be a, t, c, g, other or unknown
atttagtgttcataaataaagtttgttgaaacacaaccaagatcattcttttacttgtctatggctgcttttctgtggcagagtagctgccacagaaaactatagcccacaaagcctgatatttactgtctgtctgtttatggaaaaaatttatcaacccatggtctatagtatagtgtgatatgactactgttccaatgtattgaagtgttgggatagttttttcaaatgttttcagatgttcttgttttagaatcattgtcacctttaagaggaaaaaggtcatcactagataatctaaacagattgttgcttctcagtgttagcaaggaaaataatctagtttcaaattacattgcagtataatgaaaaagatccatatactgtggaatgatattcttttaaaattatttgctatggcttgggtaaaaatgttctttttccagtagcacatatcacaagaanctcactggtagtttgaaaagccatctttctttaattatttgtttatccctntangaanaattcaagccaaangttttcccccccctgttttgaac

SEQ ID NO: 2672 - DNA, 720 bp, Homo sapiens
  misc_feature (201)..(201): "n" may be a, t, c, g, other or unknown
  misc_feature (576)..(576): "n" may be a, t, c, g, other or unknown
  misc_feature (674)..(674): "n" may be a, t, c, g, other or unknown
  misc_feature (689)..(689): "n" may be a, t, c, g, other or unknown
  misc_feature (691)..(691): "n" may be a, t, c, g, other or unknown
  misc_feature (695)..(695): "n" may be a, t, c, g, other or unknown
  misc_feature (699)..(699): "n" may be a, t, c, g, other or unknown
atctcccaggcgaccggctccgcagcaagatggcggacgagaaggacaggggaagagagattggaacaattatcaggtcattaggatgctgtcctacggaaggagagctgcatgatctgattgcagaggtagaggaagaagaacctactggatacattcgattcgaaaaatttcttccggtgatgacagaaatactactanaaagaaaatacagaccaattccagaagatgtccttcttcgagcttttgaggttttagattcagctaaacgtgggtttcttactaaggacgagctgatcaagtatatgactgaagaagatggagtttcgctccgtcgcccaggctgaagtgcagtggcgtgatcttggctcgttgcaacctccacctcccgggttcaagagattctcctgcctcagcctcctgagcagctgggatgacaggcacactccaccacgcctggctaatttctgtatttttagtagagacggggtttcaccatggtctggtgacctcctggtctcgaactcctgacctcaagtgatcctcccgcctcagcctcccaaaattctgggattncaggcatgagccaccgcacccggctgcttccttaactcttgatctcctctctgtatcttgctttgtctagctgttctcttctctccatattcatccanacatttgcttagaantncccngaancctgggcggttgaatgttggt

SEQ ID NO: 2673 - DNA, 669 bp, Homo sapiens
  misc_feature (576)..(576): "n" may be a, t, c, g, other or unknown
  misc_feature (611)..(611): "n" may be a, t, c, g, other or unknown
  misc_feature (614)..(614): "n" may be a, t, c, g, other or unknown
  misc_feature (647)..(647): "n" may be a, t, c, g, other or unknown
  misc_feature (657)..(657): "n" may be a, t, c, g, other or unknown
cgataatgactttgcacgattcactttgggatctcaaagtgcttccaaagcattcagatttacaaacaattcacaagacaggtcatctttgtaatacccatacttacaacgaattaacaagaggagtgacttaagattctccaggaacacagtggcagctattgatgatctgttttctatctgtttgatagagcatcatgagaaatcacaaaatacaatgctatttttctgatgtgtgctaataaagtcaaagaaagcaaatacatcttgacacttttgtccattttcattaaaaaaaaaaaaaagttcagggtgtttggaattttacacctcagcacaccttactggtatcaatggataaagcgggtaattgacagatccacccaaatgccactgcagtcagaagcagatctggacacacccttgtttacagtttcatattgggttgctatagttcccgtgctaaatcaccagctttcaggaacatgactgctcctggcagtggaaggtgctgaaacagaaattttaattaaaaactttatcaagtactcttcacagtgctgcttggcaccatanaaaatcagtacaatatatcgagccctactttgganganctggatttctgaaggagctgatccagttctaantgtcttctcnaattaggagata

SEQ ID NO: 2674 - DNA, 697 bp, Homo sapiens
  misc_feature (438)..(438): "n" may be a, t, c, g, other or unknown
  misc_feature (440)..(440): "n" may be a, t, c, g, other or unknown
  misc_feature (599)..(599): "n" may be a, t, c, g, other or unknown
  misc_feature (624)..(624): "n" may be a, t, c, g, other or unknown
  misc_feature (652)..(652): "n" may be a, t, c, g, other or unknown
  misc_feature (669)..(669): "n" may be a, t, c, g, other or unknown
  misc_feature (678)..(678): "n" may be a, t, c, g, other or unknown
gtagataatgcataagaagcaccaagtcaggctcagatgcaactaaaacacatctttgagccttttctttttcccttctcccctttctaagcaaaaaccttcctaggatggcatcttttgctctaactgggagacagtcataattggttgtagtcaattctactaagcagtgttggggtggttggaaagtctcttttttgtaatttgtttttgcaaatcattgtgaggccactttttctttctttctttctttctttctttctttctttcgttctttcgttctttcgttctttctttctttctttctttctctttctttcttttgctttccttctttcatctcttttttgtaatttgttgttgcaaatcattgtgaggccacttttctttccccttccttccttcctttttttctgtttttttttttttttttcccanantcttgctctgtcgcccaggttggagtgcagtggcacgatctcggctcactgcaccctctgcctcttgggttcaagcgattctcctgcctcagcctcccaagtagctgggattacaggcatacaccaccacgccccactaattttttgtatttttggtangggggggtttcaccatgatggccangttggttttgaactcctgaactcaagtnatctgcccacctcgggnctcccaaantgccaaggaattacaggaa

SEQ ID NO: 2675 - DNA, 627 bp, Homo sapiens
  misc_feature (300)..(300): "n" may be a, t, c, g, other or unknown
  misc_feature (392)..(392): "n" may be a, t, c, g, other or unknown
  misc_feature (394)..(394): "n" may be a, t, c, g, other or unknown
  misc_feature (442)..(442): "n" may be a, t, c, g, other or unknown
  misc_feature (459)..(459): "n" may be a, t, c, g, other or unknown
  misc_feature (542)..(542): "n" may be a, t, c, g, other or unknown
  misc_feature (566)..(566): "n" may be a, t, c, g, other or unknown
  misc_feature (580)..(580): "n" may be a, t, c, g, other or unknown
  misc_feature (603)..(603): "n" may be a, t, c, g, other or unknown
  misc_feature (619)..(619): "n" may be a, t, c, g, other or unknown
tttcacctcagcaaggccaggggatctgcacgttgtgttagacatggctaaagtagctgataccatcctgttcctccttgatccactagaaggctgggacagcaccggtgattactgtctttcctgcctctttgctcagggccttccgacctatacactagctgtccaggggatttctggcctcccactgaagaaacaaatagataccaggaagaagctaagtaaagcagtggagaagcgctttccgcatgacaaactcctcttgttagacactcaacaggaggcagggatgctgcttangcagttggctaaccagaagcaacagcatcttgcttttcgagatcggcgggcctacctatttgcccatgctgttgattttgttcctagtgaananaataacttggtgggcaccttgaaaatttcaggctatgttcgagggcanactctgaatgtcaatangttgctgcatatcgttggatatggtgatttccagatgaaacagatagatgcccccggagaccctttccctttaaatcctagangaattaaaccccaaaaggacccanacatggcaatgganatttgtgctacgggatgctgttnatgatatgggaagaangtcttaaa

SEQ ID NO: 2676 - DNA, 799 bp, Homo sapiens
  misc_feature (331)..(331): "n" may be a, t, c, g, other or unknown
  misc_feature (370)..(370): "n" may be a, t, c, g, other or unknown
  misc_feature (452)..(452): "n" may be a, t, c, g, other or unknown
  misc_feature (506)..(506): "n" may be a, t, c, g, other or unknown
  misc_feature (544)..(544): "n" may be a, t, c, g, other or unknown
  misc_feature (600)..(600): "n" may be a, t, c, g, other or unknown
  misc_feature (623)..(623): "n" may be a, t, c, g, other or unknown
  misc_feature (632)..(632): "n" may be a, t, c, g, other or unknown
  misc_feature (660)..(660): "n" may be a, t, c, g, other or unknown
  misc_feature (697)..(697): "n" may be a, t, c, g, other or unknown
  misc_feature (710)..(710): "n" may be a, t, c, g, other or unknown
  misc_feature (733)..(733): "n" may be a, t, c, g, other or unknown
  misc_feature (756)..(756): "n" may be a, t, c, g, other or unknown
  misc_feature (790)..(790): "n" may be a, t, c, g, other or unknown
  misc_feature (797)..(797): "n" may be a, t, c, g, other or unknown
aaatccttccttccccggggtagaagtccagggtgagaaattggttccgaactcaaaggaacccagtgccgggccacagccgggtcacgtggccggcggccccccatgacgtgctggctgcggggcgtcacggcgacgttcgggcgacctgccgagtggccaggctacctcagtcacctgtgtggtcgcagtgctgccatggacctgggacccatgcgcaagagttaccgcggggaccgagaggcatttgaggagactcatctgacctcccttgacccagtgaaacagtttgctgcctggtttgaggaggctgttcagtgtcctgacatangggaagccaatgccatgtgtctggctacctgcaccaganatggaaaaccctctgctcgcatgttgctgctgaagggcttcgggaaagatggcttccgcttcttcactaacttcgagagtcnaaaaggaaaagactggactctaatccctttgcttcccttgtcttctactggganccacttaaccgtcaggtgcgtgtggaaggcctgtgaanaaactgcctgaagaagaagctgaatgctacttccactcccgccccaagaacaccanattggggctgtggtcaccaccanaattctgtnatccctgatcgggaatttctgaaaaaanaaaaatgaagaactggaacactctacccagaatcaanaagttgccccaancccaaaatccctgggggttggtnattttcctgttcccccccggttnatggaattcctgggcaaggtccaaacccaacccnccctgcntt

SEQ ID NO: 2677 - DNA, 489 bp, Homo sapiens
  misc_feature (424)..(424): "n" may be a, t, c, g, other or unknown
  misc_feature (442)..(442): "n" may be a, t, c, g, other or unknown
  misc_feature (460)..(460): "n" may be a, t, c, g, other or unknown
  misc_feature (467)..(467): "n" may be a, t, c, g, other or unknown
  misc_feature (470)..(470): "n" may be a, t, c, g, other or unknown
agagcatccccggagcatcttaagagctgagcgcagctgacaactaggggccggaccgtcgcaggaggcgtccgctggataccttcccccttccctgacctagagctctacagctgctgcctcggtactgaccgagggttcccagagctgtctcaccattgcaaaaacgttatagcaacagcctctgattacgacatggctgagatcaccaatatccgacctagctttgatgtgtcaccggtggtggccggcctcatcggggcctctgtgctggtggtgtgtgtctcggtgaccgtctttgtctggtcatgctgccaccagcaggcagagaagaagcacaagagcccaccatacaagtttattcacatgctcaaaggcatcagcatatacccagagaccctcagcaacaagaagaaaatcatcnaagtgcggagagacaaanatggtcctgggagggaangtggacntangaacctgttggtggacgca

SEQ ID NO: 2678 - DNA, 768 bp, Homo sapiens
  misc_feature (7)..(7): "n" may be a, t, c, g, other or unknown
  misc_feature (426)..(426): "n" may be a, t, c, g, other or unknown
  misc_feature (595)..(596): "n" may be a, t, c, g, other or unknown
  misc_feature (607)..(607): "n" may be a, t, c, g, other or unknown
  misc_feature (684)..(684): "n" may be a, t, c, g, other or unknown
  misc_feature (711)..(711): "n" may be a, t, c, g, other or unknown
  misc_feature (716)..(716): "n" may be a, t, c, g, other or unknown
  misc_feature (722)..(722): "n" may be a, t, c, g, other or unknown
  misc_feature (752)..(752): "n" may be a, t, c, g, other or unknown
atgtaanatgtgtgacatcttatcctgtggcatgctgagcaccgacagcctctgaagcccacactcaaccaggacacacatgctccctgctcttggggttgacctggggtttatggagtcagtgtgcttgctcacaaacctctttatgccaattgcactggttatcagaattatgtaatttaatgaaatagtaccaaatatttcataaactaattaaatatgactacataaaggtcactgcttctttgaaagttcactattttggaaaagactcaaaattagtcactacagaagcatttctgtcaatgtaaatgtgttatgataactataaaaggcgagggggaatattataaaatctaagaggattctactcttcataagcatcttcagctccgctgacttcaaagaaactagactggaaatcanaccttgttattggagtgagttgtaaaagaaagtctacatggaattccaatgggtagatccttattcagagaactatttgtgcctcatcacaggttagaccggcatgttttgccacaatagctgcgagttcaaaatgttgtaaggtctcgtttatgttttatgtatttcnntatgtattgtnttccaaaaggattttctgctttaatcagcttttaccatttaatttgccttagggcctggaattatgttcagatgaanaaaggatttgggccgttattaaaactnaacanccaccnccttaaaaaaaaggaaaaagttttttcccntttggtttttaaaaag

SEQ ID NO: 2679 - DNA, 858 bp, Homo sapiens
  misc_feature (103)..(103): "n" may be a, t, c, g, other or unknown
  misc_feature (295)..(295): "n" may be a, t, c, g, other or unknown
  misc_feature (335)..(335): "n" may be a, t, c, g, other or unknown
  misc_feature (589)..(589): "n" may be a, t, c, g, other or unknown
  misc_feature (621)..(621): "n" may be a, t, c, g, other or unknown
  misc_feature (633)..(633): "n" may be a, t, c, g, other or unknown
  misc_feature (651)..(651): "n" may be a, t, c, g, other or unknown
  misc_feature (679)..(679): "n" may be a, t, c, g, other or unknown
  misc_feature (701)..(701): "n" may be a, t, c, g, other or unknown
  misc_feature (735)..(735): "n" may be a, t, c, g, other or unknown
  misc_feature (779)..(779): "n" may be a, t, c, g, other or unknown
  misc_feature (815)..(815): "n" may be a, t, c, g, other or unknown
  misc_feature (822)..(822): "n" may be a, t, c, g, other or unknown
  misc_feature (838)..(838): "n" may be a, t, c, g, other or unknown
  misc_feature (854)..(854): "n" may be a, t, c, g, other or unknown
agctgggtcgcggcgtctcgctccggtcgggaggactgaggacagccccgcctccgccccctgggtcaagcccggcttccttttcagttcgtccatcttctanaaacgagtccccgagaccccgggctgccttcttggggctgctccgcctcctgaccagccctcgtcagccactcgaagtccctgaggagacgtggagaggaggagggacacggcatggggggagtccgggaagggagacgagcgtctgaagacgtcctcccgagggcagaaggggccgggggagctggcgcanggctctctacctatcgctgcaggctcctgggcgattgtancgggaccgtcacacacaactggcacccaggccaggggtccagagctaaattctgcctgcaggagcggttattgtggcatccgtttctaaaaagtttaaaggcaacattttattttattttaatttttttgagacaagatctgcctctgtcgcccaggctggagtgcagtggcgagatctcagctcacttgcaacctgtgcctcccggcttcaagcgattctcagcctcagcctcccgagtagctgggattgcangcgcccggcaccacgcccggctaatttttttnttttttctttcngttttgtttgaaactcantctcgctctgtttgcccaagctgaaatncagtgggggcgctctcggctcncttgcaaacctctgcctcccaaggtttcaaagcnattctccttgcctccagcctcccccgaattacctggggaatttncagggaaccgttgccccccccctcccgggcttaaantttttgnttttttttaaagtttnaaaaattgggggtttncccc

SEQ ID NO: 2680 - DNA, 548 bp, Homo sapiens
  misc_feature (376)..(376): "n" may be a, t, c, g, other or unknown
  misc_feature (419)..(419): "n" may be a, t, c, g, other or unknown
  misc_feature (426)..(426): "n" may be a, t, c, g, other or unknown
  misc_feature (473)..(473): "n" may be a, t, c, g, other or unknown
  misc_feature (528)..(528): "n" may be a, t, c, g, other or unknown
  misc_feature (533)..(533): "n" may be a, t, c, g, other or unknown
  misc_feature (536)..(536): "n" may be a, t, c, g, other or unknown
  misc_feature (548)..(548): "n" may be a, t, c, g, other or unknown
tttgctgaggctgttaacttctgcactgttgattggctgccattaggccgacagtgtgtggagcattatcgcttgcttcatcgatattgtgtgttttcccatgatgagatgatctgcaagatggcttccaaggctgatgtattagatgttgtagtggcttcaactgttcagaaagacatggccattatgattgaggatgagaaagctttaagagaaactgtccgtaaattgggagtgattgattcggaaagaatggattttgagctgttgccagatgatgaacgtcagtgtgttaaatgcaaaactacatgcttcatgtctgccatctcctgttcttgtaaacctggccttcttgtttgcctgcatcatgtaaaanaattgtgttcctgtcctccttataaatataaattgcggtatangtacacnctggatgatctctaccctatgatgaatgcattgaagcttccaaccanaatcttacaaccaaatgggccttgaatgtgaatgaagctttggaggcaaacatcnaccanaanaaaaccttgtcn

SEQ ID NO: 2681 - DNA, 529 bp, Homo sapiens
  misc_feature (477)..(477): "n" may be a, t, c, g, other or unknown
  misc_feature (487)..(487): "n" may be a, t, c, g, other or unknown
  misc_feature (490)..(490): "n" may be a, t, c, g, other or unknown
gggagcggggcggcgggcgccggggctggcatggcgtggccctgtatcagccgcctgtgctgcctggcgcggcgctggaaccagctggaccgctccgacgtggcggtgccgctcactctgcacggctactcggacctcgacagcgaggagccgggcacgggcggcgccgcctcgcgcaggggccagcctcccgcgggcgcccgggattccggccgggacgtgccgctcactcagtaccagcgggacttcggcttgtggaccacgcccgccgggcccaaggatccgccgccggggcgcggaccgggggcgggcggccgcaggggcaaatcctccgcgcagtcctccgcgccacctgcgcccggcgcccgcggggtctacgttctgcccatccgcgacacggacgcagctgcagcagtgaccacgtcgtacagacaggaattccaggcttggactggaatgaaaccctccagatccacnaagacggaanccncccgaatcatcacaacccacacttccggattggacaaca

SEQ ID NO: 2682 - DNA, 505 bp, Homo sapiens
  misc_feature (7)..(7): "n" may be a, t, c, g, other or unknown
  misc_feature (26)..(26): "n" may be a, t, c, g, other or unknown
  misc_feature (410)..(410): "n" may be a, t, c, g, other or unknown
  misc_feature (416)..(416): "n" may be a, t, c, g, other or unknown
  misc_feature (487)..(487): "n" may be a, t, c, g, other or unknown
agttctncaggggtgagggatggaangacttttttggcaatgatggaaatgagatgtctgcaggaagatgggatttacaaagaaataggaaatgtttatcattgaccatacaaagctggcttatcttacttgtagaagagtgtttggcagctgaaacccaagggaaagaaaggaattgcgtcattataggcaattcaggctaaatattatactacgtactccatataccctcttttttgtttttgcccccaacaaagagaaggggtcttgctctgtcacccagtctggagtgcagtggctaaatcatggctcactgcagcctgcacctcctgggcacaagtgatcctcccatctctgccttgaatagctgggactccaggtgcacgccacaatgcctaatttcctagttntttgtnaacacagggtctcgctgtgtagcccaggctggtttcaacctcctggcctcaagtgatcctcttgcctcagnctcccaaatatcctctac

SEQ ID NO: 2683 - DNA, 571 bp, Homo sapiens
  misc_feature (221)..(221): "n" may be a, t, c, g, other or unknown
  misc_feature (543)..(543): "n" may be a, t, c, g, other or unknown
  misc_feature (548)..(548): "n" may be a, t, c, g, other or unknown
  misc_feature (558)..(558): "n" may be a, t, c, g, other or unknown
gtcacgtgtcccccccgcggggggcggcccttgagggcggcgcttccggtcggcgggagcctggtggccgcagcggcggtggcgacgacggccgagacgtggggatggcgggcgccgggagcgaatcccggttcgccgggctgtcgctggtgcagctcaacgagctgctggaggacgagggccagctgacggagatggtgcagaagatggaggagacactnaatgttcagcttaacaaagaaatgacacttgccagcaaccggagcctggcagaaagaaaccttttgtaccagccccagctggacacgttgaaagcacgcttgacccagaaataccaggaactccaggttctctttgaagcctatcagataaagaataccaaattagacagacagtctagcagtgcttccttggagaccctgttatcacttcttcacgcacaaggggccaagattgaggacgacactgagaacatggcagagaatttctggatggagaacttcctctggattccttcattgatgtctttcagagcaaacgganactgncccacatgcnacgggtgaaaatc

SEQ ID NO: 2684 - DNA, 567 bp, Homo sapiens
  misc_feature (313)..(313): "n" may be a, t, c, g, other or unknown
  misc_feature (352)..(352): "n" may be a, t, c, g, other or unknown
  misc_feature (438)..(438): "n" may be a, t, c, g, other or unknown
  misc_feature (470)..(470): "n" may be a, t, c, g, other or unknown
  misc_feature (517)..(517): "n" may be a, t, c, g, other or unknown
  misc_feature (522)..(522): "n" may be a, t, c, g, other or unknown
  misc_feature (525)..(525): "n" may be a, t, c, g, other or unknown
  misc_feature (546)..(546): "n" may be a, t, c, g, other or unknown
aataacaatggaacatatgatggtattgcatattttgagtgcaaagaaaagcatggtatttttgctcctcctcaaaaaatatctcacattccagaaaactttgatgactatgtagacattaatgaagatgaagactgttactcaggatgaacgatatcagtgctataatcaagagcaaaatgatacagagggtccaaaagacagagaaaaggatgtcagtgaatatttttatgagaaatccctacctagtgtgaatgatatagaagcctcagttaatagaagtagaagccttaaaatagaaacagacaatgtncaggacatttctggggtacttgaagcccatgttcaccancagtcttcagtggattcacagatttcttcaaaggaaaacaaaggacctcatttctgatgccacagaaaaggtttccatcgctgcanaagatggcactttagacgataccttttccgangaattggagaagccccgcagtttacggaaacaagaagacaacctatntgctnaancttcaaaagagctttgttcancacttctggatcttttaacaa

SEQ ID NO: 2685 - DNA, 690 bp, Homo sapiens
  misc_feature (602)..(602): "n" may be a, t, c, g, other or unknown
  misc_feature (633)..(633): "n" may be a, t, c, g, other or unknown
  misc_feature (665)..(665): "n" may be a, t, c, g, other or unknown
  misc_feature (674)..(674): "n" may be a, t, c, g, other or unknown
  misc_feature (681)..(681): "n" may be a, t, c, g, other or unknown
tttataatattccacctaataatgaaacgaatttagaagattgctcagtaatgcagccacctgttgcctatccagaagaaaatacactactcatcaaggaagaaccagatttagatggtgctctactctcggggccagatggtgataggaatgtgaatgcaaatttattggctgaagctggcactagtcaagatggaggtgatgctggtacttcacatgatttcaagtatggtttgatgcctggtccttcaaatgatttcaagtatggattattgccagaatcttggccaaaacaagaaacctgggaaaatggtgaatcatctctaatcatgaacaagttaaaatgccctcattgtagctatgtagccaaatacagacgaacactaaaaaggcacttgctcattcacacaggagtgagatcatttagctgtgatatttgtggaaaactgtttactcgaagagaacatgtaaaaagacattccctggtgcataaaaaggataaaaaatacaaatgtttggtgtgtaagaagatcttcatgttagcagccagtgttggaataagacatggatctcgacgttatggtgtttgtgtaactgtgcanataaatcacagccaggaaggcaagaagtgtnatcagggacaggatcaaattcccccggatganatacgaganatgagtngaaactgat

SEQ ID NO: 2686 - DNA, 608 bp, Homo sapiens
  misc_feature (105)..(105): "n" may be a, t, c, g, other or unknown
  misc_feature (208)..(208): "n" may be a, t, c, g, other or unknown
  misc_feature (229)..(229): "n" may be a, t, c, g, other or unknown
  misc_feature (394)..(394): "n" may be a, t, c, g, other or unknown
  misc_feature (438)..(438): "n" may be a, t, c, g, other or unknown
  misc_feature (444)..(444): "n" may be a, t, c, g, other or unknown
  misc_feature (538)..(538): "n" may be a, t, c, g, other or unknown
  misc_feature (559)..(559): "n" may be a, t, c, g, other or unknown
  misc_feature (568)..(568): "n" may be a, t, c, g, other or unknown
  misc_feature (581)..(581): "n" may be a, t, c, g, other or unknown
  misc_feature (594)..(594): "n" may be a, t, c, g, other or unknown
aagatgccccggcgtctttctagcctccgcctccaggcgggtgaggaggtgacacctgagaattcctccctctcacccctgaccctgccggaaagcgaaactganatgcgggcattgggccctgggaagcgtggggaaggggaaaggagaaagccagaaaatggagaaattaagtcctttccatggatcattccttctgtaaacaganatcacaaagcaagagcttcancatcctcgtgaaaaagacattttgttctgggtgtcatcatctccttccactacagcttgcaattggaacaagcttcacatcctgggggtgctgcctatctctgtcttgatttctgtctgtctattcctcccattgacaggaatgtcgtttgtatcctccacgcancagtttgcaaaaatccagcaaggtttatggtttatgttgcccancatgtntaaacacaacgctctcaaatgctttttaaaaatctatgaatttgttagatgtcttcacatcctggtcctcctaccccaattctcaaacacaaantactctgttgccctattatantcctgcganaattctggctaangattaagttgacngtctaagcccccaa

SEQ ID NO: 2687 - DNA, 511 bp, Homo sapiens
  misc_feature (415)..(415): "n" may be a, t, c, g, other or unknown
  misc_feature (499)..(499): "n" may be a, t, c, g, other or unknown
  misc_feature (507)..(507): "n" may be a, t, c, g, other or unknown
gtccctcacaccgagagttcctgcgcgtggggagttggagagtttgcgtggcgggaacgcggcggcagtgagagcgagcggcgccggcccttgcgtccggtgcggagatgctgaccccggcgttcgacctcagccaggatccggacttcctgactatcgccatccgcgtgccctacgcccgggtctccgagttcgacgtctacttcgaggggtctgacttcaagttctacgccaagccatactttctcacattgacccttcctggaagaattgtagaaaatggaagtgagcaagggtcctatgatgcagataaaggaatttttaccattcgcctgcccaaaaacccctggccagcattttgaggggctgaacatgttaactgctcttctggcacccagaaaatcccaggacagcnaaaccacttgtggaagaaataggtgcttctgagattcctgaggaattagttgaccatgaagagtttgattgggaaattgagcanacaccctntgaa

SEQ ID NO: 2688 - DNA, 453 bp, Homo sapiens
  misc_feature (411)..(411): "n" may be a, t, c, g, other or unknown
  misc_feature (417)..(417): "n" may be a, t, c, g, other or unknown
  misc_feature (422)..(422): "n" may be a, t, c, g, other or unknown
  misc_feature (431)..(431): "n" may be a, t, c, g, other or unknown
  misc_feature (447)..(447): "n" may be a, t, c, g, other or unknown
gtgccgcccgggagaacaggtcatcggtcggttcccgtgaaaacaaaaacaatcggccgcgccgtcgcaggcacccgaacgtcgcgagcggggcctggggacgcggagccgagtgcagcgagcgaacgggagcagcggcgactcgccggggggctagggcgccatggggcaggcgggctccggctgcgcggggctcccccggcgccgcggctagtgcgcccgccgcctcggccgcctcagcctcccgcgccgcccgcttggggaacgaggagcaggacgcggcctcggtggggcccgggccgaacggctgcggacacctgggcgccgaggagccgagcgccgccgtctccggcatggatcagtgcgtgacggtggagcgcgagctggataaagtgctgcacaagttctcangctacnggcanctgtgcgancgcggcctggaagganctcatc

SEQ ID NO: 2689 - DNA, 742 bp, Homo sapiens
  misc_feature (489)..(489): "n" may be a, t, c, g, other or unknown
  misc_feature (493)..(493): "n" may be a, t, c, g, other or unknown
  misc_feature (547)..(547): "n" may be a, t, c, g, other or unknown
  misc_feature (619)..(619): "n" may be a, t, c, g, other or unknown
  misc_feature (639)..(639): "n" may be a, t, c, g, other or unknown
  misc_feature (698)..(698): "n" may be a, t, c, g, other or unknown
  misc_feature (701)..(701): "n" may be a, t, c, g, other or unknown
  misc_feature (718)..(718): "n" may be a, t, c, g, other or unknown
  misc_feature (731)..(731): "n" may be a, t, c, g, other or unknown
  misc_feature (741)..(741): "n" may be a, t, c, g, other or unknown
agaagagaaagtcaatgaaattaaagaagacagtcattgtggagaaacttttaccccagttccagatgacaggctgaacttccagaagaagaaagcttctcctgaagtaaaatcatgtgacagctttgtgtgtgaagttggcctaggtaactcatcttctaatatgaacatcagaggtgacactggacacaaggcatgtgaatgtcaggaatatggaccaaagccatggaagagtcaacaacctaaaaaagccttcagatatcacccctccttgagaacacaagaaagggatcacactggaaagaaaccctatgcttgtaaagaatgtggaaaaaacattatttaccattcaagcattcaaagacacatggtagtgcacagtggggatggaccttataaatgtaagttttgtgggaaagcattccattgtctcagtttatatcttatccatgaaagaactcacactgggagagaaaccgtatgaatgtnaacnatgtggtaaatcttttagttattctgctacccctcgaatacatgaaagaactcncattggagaaaagccttatgaatgtccggaatgtgggaaagcattccatagtcccagatcctgtcccagacntgaaaggagtcccatggganaaaaggttatccatgttaggaatgtggaaaagccttcctgtgtcccgttatgttcgttnacntgaaagggacccctctnggaaaaaactttntgaatgttanc

SEQ ID NO: 2690 - DNA, 724 bp, Homo sapiens
  misc_feature (149)..(149): "n" may be a, t, c, g, other or unknown
  misc_feature (286)..(286): "n" may be a, t, c, g, other or unknown
  misc_feature (490)..(490): "n" may be a, t, c, g, other or unknown
  misc_feature (550)..(550): "n" may be a, t, c, g, other or unknown
  misc_feature (594)..(594): "n" may be a, t, c, g, other or unknown
  misc_feature (618)..(618): "n" may be a, t, c, g, other or unknown
  misc_feature (653)..(653): "n" may be a, t, c, g, other or unknown
  misc_feature (664)..(664): "n" may be a, t, c, g, other or unknown
  misc_feature (676)..(676): "n" may be a, t, c, g, other or unknown
  misc_feature (704)..(704): "n" may be a, t, c, g, other or unknown
  misc_feature (724)..(724): "n" may be a, t, c, g, other or unknown
gaaaattgcacacttaaagacatcagtggatgaaatcacaagtgggaaaggaaagctgactgataaagagagacagagacttttggagaaaattcgagtccttgaggctgagaaggagaagaatgcttatcaactcacagagaaggacnaagaaatacagcgactgagagaccaactgaaggccagatatagtactaccgcattgcttgaacagctggaagagacaacgagagaaggagaaaggagggagcaggtgttgaaagccttatctgaagagaaagacgtnttgaaacaacagttgtctgctgcaacctcacgaattgctgaacttgaaagcaaaaccaatacactccgtttatcacagactgtggctccaaactgcttcaactcatcaataaataatattcatgaaatggaaatacagctgaaagatgctctggagaaaaatcagcagtggctcgtgtatgatcagcagcgggaagtctatgtnaaaggacttttagcaaagatctttgagttggaaaagaaaacggaaacagctgctcattcnctcccacagcagacaaaaaagcctgaatcagaaggttatcttcnagaaagagaagcagaaatgtttcnacgatctcttggcaagtgcaaaaaaagatcttgangttgaacgacnaaccataactcnctgaattttgaactgagtgatttccaanaaaattttgaagaaaccccn

SEQ ID NO: 2691 - DNA, 563 bp, Homo sapiens
  misc_feature (22)..(22): "n" may be a, t, c, g, other or unknown
  misc_feature (403)..(403): "n" may be a, t, c, g, other or unknown
  misc_feature (475)..(475): "n" may be a, t, c, g, other or unknown
  misc_feature (482)..(482): "n" may be a, t, c, g, other or unknown
  misc_feature (490)..(490): "n" may be a, t, c, g, other or unknown
  misc_feature (531)..(531): "n" may be a, t, c, g, other or unknown
  misc_feature (540)..(540): "n" may be a, t, c, g, other or unknown
ctctcgggcctgggcggcgcanacgaagcctgaggcggcggcgcgaggcagttccagctattcttcagatgctctggattttgagacggagcacaaattggaccctgtatttgattctccacggatgtcccgccgtagtttgcgcctggccacgacagcatgcaccctgggggatggtgaggctgtgggtgccgacagcggcaccagcagcgctgtctccctgaagaaccgagcggccagaacaacaaaacagcgcagaagcacaaacaaatcagcttttagtatcaaccacgtgtcaaggcaggtcacgtcctctggcgtcagccacggcggcactgtcagcctgcaggatgctgtgactcgacggcctcctgtattggacgaatcttggattcgtgaacanaccacagtggaccacttctggggtcttgatgatgatggtgatcttaaaggtggaaataaagctgccattcanggaaacngggatttnggaaccgccgccgccaccgcgcacaacggcttctcctgcancaactgcancatgctgtccgaacgcaaggact

SEQ ID NO: 2692 - DNA, 754 bp, Homo sapiens
  misc_feature (2)..(2): "n" may be a, t, c, g, other or unknown
  misc_feature (586)..(586): "n" may be a, t, c, g, other or unknown
  misc_feature (601)..(601): "n" may be a, t, c, g, other or unknown
  misc_feature (608)..(608): "n" may be a, t, c, g, other or unknown
  misc_feature (666)..(666): "n" may be a, t, c, g, other or unknown
  misc_feature (696)..(696): "n" may be a, t, c, g, other or unknown
  misc_feature (726)..(726): "n" may be a, t, c, g, other or unknown
  misc_feature (734)..(734): "n" may be a, t, c, g, other or unknown
  misc_feature (736)..(736): "n" may be a, t, c, g, other or unknown
gnaactgatatacatttatttgaataatgtgtaactattatggatctattttaatgaacaatttttaccatttcccaagctgcctgtttattataagcatgacatgtttactataaaccttttgcccccataatttctttttttaaaggaaattaatattagtaaaataaacacctctttaatggaagctgcaaccttctagtgatccaagtagacaatagatggtggcatcacagactttatctacacactttcgggtctgaccactacctcccacaatacctagccattttggaaggggaaaacatgcggtggtctagctgtatagctcagggcttaatttcagcttctgagattgtgatgtcatatttcactctcaaaacataggctgaaagcacgaattactcaaaaagtaagcaagccaatacctggtgaatctatgggacagtcatacacatacatcaggggaaaatgtgtgtgtacaacccaaatttacagtatgattgtcattctttgactttgttttgtatagcctgactctgttgaacatgaaattattagtactctaggttttggacagcttganttcatttgaattccntccttangaataagtttttatatacactgctaaatgtgtgatgagaatcataaaacactaaccanctgaaggtagctgtgattcactttcccccnccctaatgaaagactaagccagtatttccngttgtgtnantggactccgttccctcca

SEQ ID NO: 2693 - DNA, 653 bp, Homo sapiens
  misc_feature (292)..(292): "n" may be a, t, c, g, other or unknown
  misc_feature (436)..(436): "n" may be a, t, c, g, other or unknown
  misc_feature (536)..(536): "n" may be a, t, c, g, other or unknown
  misc_feature (582)..(582): "n" may be a, t, c, g, other or unknown
  misc_feature (611)..(611): "n" may be a, t, c, g, other or unknown
  misc_feature (644)..(644): "n" may be a, t, c, g, other or unknown
  misc_feature (646)..(646): "n" may be a, t, c, g, other or unknown
  misc_feature (648)..(648): "n" may be a, t, c, g, other or unknown
gcagccaagcaccacattactattgcagagatctatgagactgaacttgtagacattgagaaggctattgcacattatgaacaatctgctgattattacaaaggagaagaatccaacagctcagcaaacaagtgtctgctgaaggtggcagcatatgctgcccagcttgagcagtaccagaaagccattgagatctatgagcaggttggggcaaacacaatggataatcctttgttgaaatacagtgcaaaggattacttcttcaaagctgccctctgccacttcatagtanacgagttgaatgccaagcttgctcttgggaaatatgaggaaatgtttccagcatttactgattcaagagaatgtaaattattgaaaaaactcctagaaagctcatgaagaacagaacagtgaagcttacactgaagcagtgaangaatttgactcaatatctcgcttggatcagtggctgaccaccatgttgcttcgcatcaaaaagtccatcccaggggatggagaaggagatggagacctanaatgaaatgtttttgtctttgtggcatgcagctaactcctctttanttttgtcttagggtccagtgatctttatngggatgcctatttaatggcttaattttgttgcntntnaacca

SEQ ID NO: 2694 - DNA, 710 bp, Homo sapiens
  misc_feature (478)..(478): "n" may be a, t, c, g, other or unknown
  misc_feature (490)..(490): "n" may be a, t, c, g, other or unknown
  misc_feature (505)..(505): "n" may be a, t, c, g, other or unknown
  misc_feature (573)..(573): "n" may be a, t, c, g, other or unknown
  misc_feature (575)..(575): "n" may be a, t, c, g, other or unknown
  misc_feature (585)..(585): "n" may be a, t, c, g, other or unknown
  misc_feature (652)..(652): "n" may be a, t, c, g, other or unknown
  misc_feature (671)..(671): "n" may be a, t, c, g, other or unknown
  misc_feature (674)..(674): "n" may be a, t, c, g, other or unknown
  misc_feature (688)..(688): "n" may be a, t, c, g, other or unknown
  misc_feature (710)..(710): "n" may be a, t, c, g, other or unknown
gcattttttatggttttgtttcaaaagccattttcttctgggaaaactattaccaaacaccagtggatcaaaatatttaaacatgcagttgctgggtgtattatttcactcttgtggttttttggcctcactctttgtggaccactaaggactttgctgctatttgagcacagtgatattgttgtcatttcactactcagtgttttgttcaccagttctggaggaggaccagcaaagacaaggggagctgcttttttcattattgctgtgatctgtttattgctttttgacaatgatgatctcatggctaaaatggctgaacacccagaaggacatcatgacagtgctctaactcatatgctttacacagccattgccttcttaggtgtggcagatcacaagggtggagtattattgctagtactggctttgtgttgtaaagttggttttcatacagcttccagaaagctctctgtcnacgttggtgganctaaacgtcttcaanctttatctcatcttgtttctgtgcttctcttgtgcccatgggtcattgttctttctgtgacaactganantaaagtggantcttggttttctctcattatgccttttgcaacggttatcttttttgtcatgatcctggatttctacnttggattccatttgttcantcnaaatggaatttccnaatgttgcttgttatggatccn

SEQ ID NO: 2695 - DNA, 506 bp, Homo sapiens
  misc_feature (154)..(154): "n" may be a, t, c, g, other or unknown
  misc_feature (479)..(479): "n" may be a, t, c, g, other or unknown
  misc_feature (483)..(483): "n" may be a, t, c, g, other or unknown
  misc_feature (497)..(497): "n" may be a, t, c, g, other or unknown
ttgcatttccccctcctcagatgggaagcctggcaaagctgcccaaccgggtagtgcccctcacccatcggatcactgccttcttcctcctcttgccccattcacccgcttccttgcactctgggagtggggcagggtaaggtgggccttacanacaggctgaggtttgggtggtgtgatctgtcctaattggcccctcaccaatgcatctatctgtctgccaccagcccaccccaccctgcccccaccctcacccacgcttctgctcattggtctcaatcccagcctggaagcagggagtaaggctggactccaatggcccattcccctcaccccagcccaagacgtgggaggctgcttcccagtaagaatccaggagcaagctttggtgaatccaatgggctgaatggctctatggatgtggttgtttggatgtggtaaggaatgcttagcaaaatgtgtgtgtatctctgaagctntcanggggttggtgggtntttttctct

SEQ ID NO: 2696 - DNA, 454 bp, Homo sapiens
  misc_feature (406)..(406): "n" may be a, t, c, g, other or unknown
  misc_feature (409)..(409): "n" may be a, t, c, g, other or unknown
  misc_feature (419)..(419): "n" may be a, t, c, g, other or unknown
  misc_feature (429)..(429): "n" may be a, t, c, g, other or unknown
  misc_feature (437)..(437): "n" may be a, t, c, g, other or unknown
ccccgcctccgcccccggctggcgtgagctgggtgtttcctgcctctctcagtccgggtttggagactcctgcgtcctccgacttttcgtggaagagatgtcaggagaaagtgtggtgagctcagcggtgccagcggctgctacccgcaccacttccttcaagggcacgagccccagctccaaatacgtgaagctgaatgtgggtggagccctctactataccaccatgcagacgctgaccaagcaggacaccatgctgaaggccatgttcagcgggcgcatggaagtgctcaccgacagtgaaggctggatcctcattgaccgctgtgggaagcactttggtacgatactcaactaccttcgagacggggcggtgcctttacccgagagccgccgggagatcganganctgctagcanaagccaagtnctacctantccaaggcctggtggaa

SEQ ID NO: 2697 - DNA, 729 bp, Homo sapiens
  misc_feature (286)..(286): "n" may be a, t, c, g, other or unknown
  misc_feature (434)..(434): "n" may be a, t, c, g, other or unknown
  misc_feature (466)..(466): "n" may be a, t, c, g, other or unknown
  misc_feature (533)..(533): "n" may be a, t, c, g, other or unknown
  misc_feature (555)..(555): "n" may be a, t, c, g, other or unknown
  misc_feature (567)..(567): "n" may be a, t, c, g, other or unknown
  misc_feature (569)..(569): "n" may be a, t, c, g, other or unknown
  misc_feature (605)..(605): "n" may be a, t, c, g, other or unknown
  misc_feature (645)..(645): "n" may be a, t, c, g, other or unknown
  misc_feature (667)..(667): "n" may be a, t, c, g, other or unknown
  misc_feature (671)..(671): "n" may be a, t, c, g, other or unknown
  misc_feature (675)..(675): "n" may be a, t, c, g, other or unknown
  misc_feature (710)..(710): "n" may be a, t, c, g, other or unknown
tattcaacatggaggcggaggtcgataagctggaactgatgttccagaaagctgagtctgatctggattacattcaatacaggctggaatatgaaatcaagactaatcatcctgattcagcaagtgagctgtcaccactgactaaagaagagaaaactgcggcagagcaattcaaatttcacatgccagatttatgaagtaatggacttggaaaggaaattctaacagagaagagcttaattccggagaaatttaggaagatgtcttgttaacccttgatgtctanagattgggggctggtgaagggggtttggcttcaatgactggataatgatatctttcatgagagagattataagaagaagggcagataacatatgaataaagttcagccaaaaggatcaaatgagaataaaacgatttaaatatatgtncacacgcatgcacacacacacttagtcttgtnatttcaggccagaaattctcaacactattttgcatctgttttctttttctaagtcatgataatatanatgttctggtctatcataaaanaatgtttatgtncntttcagtcattcggtatgtggctttgttaattaaantttaggccaaacatttgtgttatcatgatatataatttcnttttgttaattttgattgcccntgtngtcncattattgttgaaactgcttttatgttacctgttntccccccccaaaacctaaa

SEQ ID NO: 2698 - DNA, 631 bp, Homo sapiens
  misc_feature (444)..(444): "n" may be a, t, c, g, other or unknown
  misc_feature (467)..(467): "n" may be a, t, c, g, other or unknown
  misc_feature (474)..(474): "n" may be a, t, c, g, other or unknown
  misc_feature (541)..(541): "n" may be a, t, c, g, other or unknown
  misc_feature (551)..(551): "n" may be a, t, c, g, other or unknown
  misc_feature (553)..(553): "n" may be a, t, c, g, other or unknown
  misc_feature (573)..(573): "n" may be a, t, c, g, other or unknown
  misc_feature (604)..(604): "n" may be a, t, c, g, other or unknown
aattaaaggtggaaaagggggaaacgtccctgcaaagttctgagacacatcctcctgaagtggctcttcctcctgtgggggagccgcctgccctggaaaattccactgctctccttgagggagttaatacagttgtggtgacaacttctgccccagaggctttgctggcctcctgggcgagaatttcagccagggcgaggacaccagaggcagtggaatctccacaagaggcctctggtaagcgcaacatgaagagcttattctggtccaatggggaaataagcttagtagatattaatcactggtacattttagggtatatcaaaatccctttgagggccggtgattcctggaccctgcccacagagtttctggtgcaggtctagggcaggacctgagcatttatttgcatttctttttttttttcctttttttttttttganacagtttctcccttgttgcccangctagantgcagtggcatgatctcagctcaccgcaacctccacctcccaggttcaagcaattctcctgcctcanccttcctgantnctgggattacaggcattttnccaccatgcccggctaatgttgtgtttttantaaaaatggggtttctccatgttggtc

SEQ ID NO: 2699 - DNA, 742 bp, Homo sapiens
  misc_feature (375)..(375): "n" may be a, t, c, g, other or unknown
  misc_feature (457)..(457): "n" may be a, t, c, g, other or unknown
  misc_feature (533)..(533): "n" may be a, t, c, g, other or unknown
  misc_feature (674)..(674): "n" may be a, t, c, g, other or unknown
  misc_feature (687)..(687): "n" may be a, t, c, g, other or unknown
  misc_feature (721)..(721): "n" may be a, t, c, g, other or unknown
  misc_feature (723)..(723): "n" may be a, t, c, g, other or unknown
  misc_feature (739)..(739): "n" may be a, t, c, g, other or unknown
cggctcctaccctgaaggtgcacctgcagtcctcgccgataagaggcagcagttcggaagccggttcctgagagatccggcgcgcgtcttccaccacaatgcctgggacaatgtggagtggtcggaagagcaagccgcggcggcggagagaaaagtccaggagaacagtatccagcgggtgtgccaggagaaacaagttgattatgagatcaatgcccacaaatactggaatgacttctacaaaatccacgaaaatgggtttttcaaggatagacattggctttttaccgaattccctgagctggcacctagccaaaatcaaaatcatttgaaggactggttcttggagaacaagagtgaagtacctgaatgtanaaacaatgaggatggacctggtttaataatggaagaacagcacaggtgttcttcgaagagccttgaacataaaacacagacncctcctgtggaggagaatgttactcacaaaattagtgacctggaaatttgtgctgatgagtttcctggatcctcanccacctaccgaatactggaagttggctgtggtgtgggaaacacagtctttccaattttacaaacgaacaatgacccgggactctttgtttattgctgtgatttttcttccacagctattagaactggtccaaacaaattcnaaatatgatcctnctccggtgtttttgcctttgttccccaacctgtntnatgaaaaaaaaaattnccc

SEQ ID NO: 2700 - DNA, 560 bp, Homo sapiens
  misc_feature (5)..(5): "n" may be a, t, c, g, other or unknown
  misc_feature (242)..(242): "n" may be a, t, c, g, other or unknown
  misc_feature (428)..(428): "n" may be a, t, c, g, other or unknown
  misc_feature (478)..(478): "n" may be a, t, c, g, other or unknown
  misc_feature (505)..(505): "n" may be a, t, c, g, other or unknown
  misc_feature (508)..(508): "n" may be a, t, c, g, other or unknown
  misc_feature (520)..(520): "n" may be a, t, c, g, other or unknown
  misc_feature (549)..(549): "n" may be a, t, c, g, other or unknown
ccganaggagtagcctgattcccatctccggacatcgggcctctcccaatcctgtggccatggaaacccgaagtgacaacagaccgtctgttcccgttcagttccaatattttttgccaacttaccccccttctgcatacccactggcggcacatacctacaccccaatcaccagttccgtgtccactatccgacagtatccagtttcagctcaggctccaaactctgccatcacagctcanactggtgttggggtagcgtctaccgtccacctaaaccccatgcagttgatgacagtggatgcatcgcatgctcgacatattcaagggatccagccagcacccatcagtacccagggtatccagccggcccccattgggacccagggatacagcctgcaccacttggcacacagggaattcactcancaaccccaatcaacacacaagggcttcagcctgcacctatgggtactcancaacctcagcctgaaggaaaaattcancantggtgttggcanatggaccacaattgtggccaacctattancaatccattca

SEQ ID NO: 2701 - DNA, 773 bp, Homo sapiens
  misc_feature (693)..(694): "n" may be a, t, c, g, other or unknown
  misc_feature (737)..(737): "n" may be a, t, c, g, other or unknown
  misc_feature (755)..(755): "n" may be a, t, c, g, other or unknown
  misc_feature (771)..(771): "n" may be a, t, c, g, other or unknown
caagcatgtgatgttcttgtaccttcttctgatagtacatctcaacagttgactccatatagtcaagtccatatttgtttgagatctggcaactatcaggaggtaatacagattttcattgaagacaacttaaccttgagtttacctgtccagttccgacagtcagtcctaagagaactctttaagaaagctcaacagggaaatgaagctctagatgaaatctgttttaaagtttgtgcctgtaatacagtccgtgatatactggaaggcagaacaattagtgttcaatttaaccagctatttcttagaccaaataaagagaaaatagactttcttcttgaggtatgttcaagatcagtaaatttagaaaaagcttcagagtctttgaaaggaaacatggctgcttttctaaagaatgtgtgtctggggttggaagatctgcagtatgttttcatgatttcttcacatgagcttttcattacattgttgaaagatgaagaacgaaagctacttgttgatcagatgaggaagagatcccctagagtaaatctgtgcattaaacctgtaacttcattttatgatatcccagcttcagcaagtgtcaacattggtcagttagagcatcaacttatattgtcagtggatccttggaagattagacaaattttaattgaattacatggtatgacttcnnaacgccagttctggacagtgtctaattaagtgggaagttcccnctgtctatagtggggttntcccggggaatttaanac

SEQ ID NO: 2702 - DNA, 484 bp, Homo sapiens
  misc_feature (113)..(113): "n" may be a, t, c, g, other or unknown
  misc_feature (401)..(401): "n" may be a, t, c, g, other or unknown
  misc_feature (427)..(427): "n" may be a, t, c, g, other or unknown
  misc_feature (448)..(448): "n" may be a, t, c, g, other or unknown
  misc_feature (464)..(464): "n" may be a, t, c, g, other or unknown
  misc_feature (482)..(482): "n" may be a, t, c, g, other or unknown
cttgttggcctactggctctttttgacagcccccagtgcgaaaggctgccagcatgtcatcagtgagccccatccagatccccagtcgcctcccgctgctgctcacccacganggcgtcctgctgcccggctccaccatgcgcaccagcgtggactcggcccgcaacctgcagctggtgcggagccgccttctgaagggcacgtcgctgcaaagcaccatcctgggcgtcatccccaacacgcctgaccccgccagcgacgcgcaggacctgccgccgctgcacaggattggcacagctgcactggccgttcaggttgtgggcagtaactggcccaagccccactacactctgttgattacaggcctatgccgtttccagattgtacaggtcttaaaaganaaccatatcccattgctgaagtggancagttggaccgacttgaggantttcccaacacctgtnaaatgagggaggagctanga

SEQ ID NO: 2703 - DNA, 696 bp, Homo sapiens
  misc_feature (414)..(414): "n" may be a, t, c, g, other or unknown
  misc_feature (519)..(519): "n" may be a, t, c, g, other or unknown
  misc_feature (526)..(526): "n" may be a, t, c, g, other or unknown
  misc_feature (550)..(550): "n" may be a, t, c, g, other or unknown
  misc_feature (588)..(588): "n" may be a, t, c, g, other or unknown
  misc_feature (601)..(601): "n" may be a, t, c, g, other or unknown
  misc_feature (629)..(629): "n" may be a, t, c, g, other or unknown
  misc_feature (645)..(645): "n" may be a, t, c, g, other or unknown
  misc_feature (651)..(651): "n" may be a, t, c, g, other or unknown
  misc_feature (692)..(692): "n" may be a, t, c, g, other or unknown
aaaaatcagtcagcaaaagaagatgtaacagaaaggcaaagcaccaaacgatctcctcagcaaactgtaccatatgttgttcctctctctcctaagctccccaaaacaaaggagtatgcgtctgaaggagaaccattgtttgctgggggaagtgccattctcaaagaggagaatctttcagaagattctaagagctcatcactaaattcaggaaattatttgaatcctgcctgtagaaatcctatgtatattcatacttcagtctcccaggatttttctcgaagtgtgccaggcaccacaagttcaccactagttggggacatatcccccaagagcagtccccatgaagttaaattccaaatgcagaggaaaagtgaaggaaattgatgggaaggctctgttcctactcaagantgatgtgatgatgaagtatatggggctgaagctggggccagcattaaagctgtgttactacattgaaaagcttaaagaaggaaaatacagttaaaaaaatgtgtnagtttanattgggacataattctcaggtgtnctgttaacattttaatttaaaagtatttctcttaacantttttgttttgtnaacagttcccataaaaatattttatcanaattgcaaaactgttntaacantttcaatccactttgttttttttcctggaatccccaaccancttt

SEQ ID NO: 2704 - DNA, 525 bp, Homo sapiens
  misc_feature (190)..(190): "n" may be a, t, c, g, other or unknown
  misc_feature (206)..(206): "n" may be a, t, c, g, other or unknown
  misc_feature (232)..(232): "n" may be a, t, c, g, other or unknown
  misc_feature (272)..(272): "n" may be a, t, c, g, other or unknown
  misc_feature (284)..(284): "n" may be a, t, c, g, other or unknown
  misc_feature (295)..(295): "n" may be a, t, c, g, other or unknown
  misc_feature (353)..(353): "n" may be a, t, c, g, other or unknown
  misc_feature (408)..(408): "n" may be a, t, c, g, other or unknown
  misc_feature (451)..(451): "n" may be a, t, c, g, other or unknown
  misc_feature (500)..(500): "n" may be a, t, c, g, other or unknown
  misc_feature (502)..(502): "n" may be a, t, c, g, other or unknown
  misc_feature (505)..(505): "n" may be a, t, c, g, other or unknown
  misc_feature (515)..(515): "n" may be a, t, c, g, other or unknown
aatcctggaacaaggctacagcgtcgaagatccccagcgctgcgggctcggagagcagtcctaacggcgcctcgtacgctagtgtcctcccttttcagtccgcgtccctccctgggccgggctggcactcttgccttccccgtccctcatggcgctgctccgacgcccgacggtgtccagtgatttgganaatattgacacagganttaattctaaagttaagaatcatgtnactattaggcgaactgttttagaagaaattggaaataganttacaaccagancagcacaagtngctaagaaagctcagaacaccaaagttccagttcaacccaccaaaacaacaaatgtcnacaaacaactgaaacctactgcttctgtcaaaccagtacagatggaaaagttggntccaaagggtccttctcccacacctgaagatgtctccatgaangaagaaaatctctgccaagctttttctgatgccttgctctgcaaaatcnanganattgataacnaagattggga

SEQ ID NO: 2705 - DNA, 780 bp, Homo sapiens
  misc_feature (500)..(500): "n" may be a, t, c, g, other or unknown
  misc_feature (509)..(509): "n" may be a, t, c, g, other or unknown
  misc_feature (532)..(532): "n" may be a, t, c, g, other or unknown
  misc_feature (557)..(557): "n" may be a, t, c, g, other or unknown
  misc_feature (679)..(679): "n" may be a, t, c, g, other or unknown
  misc_feature (765)..(765): "n" may be a, t, c, g, other or unknown
  misc_feature (767)..(767): "n" may be a, t, c, g, other or unknown
  misc_feature (773)..(774): "n" may be a, t, c, g, other or unknown
  misc_feature (780)..(780): "n" may be a, t, c, g, other or unknown
ttctacaggggatctggacaactctcctctgtccccaccttcaccaagggaccaaaagcagaacgcatactcgggcactcaagaagttaagtgaggtgaacaagcgcctccaggatctccgttcctgtctgagccccaagccacctcagggtcaagagcaacagggccaagaggatgaagtggtcttggtggaagggcccaccctcccagagaccccccgactcttcccactcaaaatccgttgccgggctgacctggtcagattgcccctcaggatgtcggagcccctgcagagtgtggtggaccacatggccacccaccttggggtgtccccaagcaggatccttttgctttttggagagacagagctatcacctactgccactcccaggaccctaaagctcggagtggctgacatcattgactgtgtggtactaacaagttctccagaagccacagagacgtcccaacagctccagctccgggtgcagggaaagganaaacaccanacactggaagtctcactgtctcnagattcccctctaaagacccttatntccactatgaagaagccatgggactgtcgggacggaactctccttcttctttgatggggacaaagctttcaggcaggggactgcccacttgaactgggcatggaatctggggaactcctttnaagtctgggggctgacaccccctccctgtttgacgggcccaccctggaatttgggggaaaatgactttcccttttttggccccctnangggttnnccttan

SEQ ID NO: 2706 - DNA, 512 bp, Homo sapiens
  misc_feature (496)..(497): "n" may be a, t, c, g, other or unknown
  misc_feature (501)..(502): "n" may be a, t, c, g, other or unknown
  misc_feature (511)..(511): "n" may be a, t, c, g, other or unknown
accaatttctctgagtttcttgaaatgtctttaaaacagacatttttctcaccaaacagtttgagtatctttattaaggaaacccttacgaatcctgaaaattatgctagcatgatttttttatatatagaagtttaaaaataaaccaggtcaggtttgtatatgtaaaattgttgacatcaatgatgtctttccatattcttatctgggcttaagaaatacattctgtatttttccagattctttgtagcctttgaaagatttttacagtacatatgtcttgactgagctgtcctttcttaatacaaaagcgtgtataattttcttaacttgtacagttggtaaacttttatgagaggaattgttattctgagtctgtcagctttcattttattttgctaaggtttttctaatgaatttttaagtgtttgtgtagtaattaagtcatatttcttatccaggtggttaaagcattcataaaggattataaaatttnntttnnttttttttnt

SEQ ID NO: 2707 - DNA, 355 bp, Homo sapiens
  misc_feature (348)..(349): "n" may be a, t, c, g, other or unknown
  misc_feature (351)..(351): "n" may be a, t, c, g, other or unknown
agtgccgaaccttcggctgctccccgcctcaggacaccaagatgcctggcgaacagcaggcagaggaagaggaggaggaagagatgcaggaggagatggtgctgctggtgaagggtgaggaggatgagggtgaggagaagtatgaggtggtgaaactcaagatccccatggacaacaaggagagacacgatctcgctttgtcacccaggctggagtgcagtggcacgtgattgtagctcactgcagccttgaactcttgggctcaagtgatcctccttcctcggcctaccaagttgttgggactacaagtgcaccccaccacacctggctaatttttcactttttgtnnanacga

SEQ ID NO: 2708 - DNA, 746 bp, Homo sapiens
  misc_feature (556)..(556): "n" may be a, t, c, g, other or unknown
  misc_feature (656)..(656): "n" may be a, t, c, g, other or unknown
  misc_feature (707)..(707): "n" may be a, t, c, g, other or unknown
  misc_feature (729)..(729): "n" may be a, t, c, g, other or unknown
  misc_feature (736)..(736): "n" may be a, t, c, g, other or unknown
  misc_feature (742)..(742): "n" may be a, t, c, g, other or unknown
actcccagactccttgcggagctcgccgcctgattctaggctggtcactactccgagcctgtgacgtttgcggcagccaggccgtcgacgatgcccagtgaaactctctgggaaattgcaaaagctgaagtggaaaaaaggggaattaatggaagtgaaggtgatggagctgaaattgcagaaaaatttgttttcttcattggcagtaaaaatgggggaaagactactattattctaaggtgtcttgacagagatgaaccaccaaaaccaaccttagctttggaatatacatatggaagaagagcaaaagggcacaacacaccaaaagatatcgctcacttttgggaactcggtggaggaacctctttattggacttaatcagcatacccatcacaggtgacaccttacggacgttttctcttgttctcgttctggatctttcaaaacctaatgatctctggcccaccatgggaaaatctcttgcaagccacaaaaagccatgtagacaaagtgataatgaaactgggaaagacaaatgctaaagcagtttctganatgagacagaagatctggaataatatgccgaaggatcatcctgatcatgaattaattgacccatttccggtacctctggtcataattgggaaattaattntgatgttttcccggattttgagtctgaaaaaaaaaaaggttattttgccanaaccttccaatttgtttgcccntttattntggaancctc

SEQ ID NO: 2709 - DNA, 620 bp, Homo sapiens
  misc_feature (576)..(576): "n" may be a, t, c, g, other or unknown
  misc_feature (604)..(604): "n" may be a, t, c, g, other or unknown
  misc_feature (616)..(616): "n" may be a, t, c, g, other or unknown
agccgcctcgcgcccggtcccgcggtcgcagctccagccgcctcctccgcgcagccgccgcctcagctgctcgctctgtgggtcggtcctctccggcacttgggctccagtcgcgccctccaagcccttcaggccgccccagtgtcctcctccttctccggccagacccagccccgcgaagatggtggaccgcgagcaactggtgcagaaagcccggctggccgagcaggcggagcgctgcgacgacatggccgcggccatgaagaacgtgacagagctgaatgagccactgtcgaatgaggaacgaaaccttctgtctgtggcctacaagaacgttgtgggggcacgccgctcttcctggagggtcatcagtagcattgagcagaagacatctgcacacggcaatgagaagaagattgagatggtccgtgcgttccgggagaagatagataaggagttggaggctgtgtgcccggatgtgctgagcctgctggataactacctgatcaagaattgcagcgagacccactacgagagcaaagtgttctacctgaagatgaaaagggactactaccnctacctggctgaaaatggcccccggaanaaaaaaagggcnacgg

SEQ ID NO: 2710 - DNA, 833 bp, Homo sapiens
  misc_feature (603)..(603): "n" may be a, t, c, g, other or unknown
  misc_feature (663)..(663): "n" may be a, t, c, g, other or unknown
  misc_feature (701)..(701): "n" may be a, t, c, g, other or unknown
  misc_feature (707)..(707): "n" may be a, t, c, g, other or unknown
  misc_feature (715)..(715): "n" may be a, t, c, g, other or unknown
  misc_feature (803)..(803): "n" may be a, t, c, g, other or unknown
  misc_feature (808)..(808): "n" may be a, t, c, g, other or unknown
  misc_feature (810)..(810): "n" may be a, t, c, g, other or unknown
  misc_feature (824)..(824): "n" may be a, t, c, g, other or unknown
  misc_feature (831)..(831): "n" may be a, t, c, g, other or unknown
ttaagctattctttagaaaattcagttctaaggaaagagttgatccttatgagggagattctgatcatattaaaaatctgggtaaactaaaacctgctcataacctcatagtatgcaaccaaagaatactaattcattttatcactttcattggtaaaacttttaaattcaacacctgaaaatcatgagggaaaatgattacctcttgagatatattattgatgacatttaaagggaaaagtcctaaatttaccttaaataactgaaatgaattaagccttcatagcgtattttccttgaagcatttaaatttgctagtgatgaatcaaataaatttgatatacttaaaataatttggacagtttttatgtgaccagattaagtgcttttgtcatttgagctgacaagtttttaaaacttcagtgcttcctaaatgtttatactcatctagtttttctcaatttgtagttttattatgcagttaaatctgtatcagtggacttttaaaacttggtactactactaaatctactatatcatgaatattcatttatttttatagtatcagaacttgggttgatttcaatgttaataaactaggcnaaacaaataactgttagaaggtacaattttcttctcttccctgtaactgaaagttttaanaattgttccttggggaaaaatttttttaaaattccctngaatcntaggggcncattttgttttcctattgaaaaacaattaccctggttacattctccaaaagaatctcccaaatcaatttttataaagttctaatggcncctgntnaataatttaaaaantattttnca

SEQ ID NO: 2711 - DNA, 829 bp, Homo sapiens
  misc_feature (406)..(406): "n" may be a, t, c, g, other or unknown
  misc_feature (445)..(445): "n" may be a, t, c, g, other or unknown
  misc_feature (455)..(455): "n" may be a, t, c, g, other or unknown
  misc_feature (542)..(542): "n" may be a, t, c, g, other or unknown
  misc_feature (567)..(567): "n" may be a, t, c, g, other or unknown
  misc_feature (599)..(599): "n" may be a, t, c, g, other or unknown
  misc_feature (622)..(622): "n" may be a, t, c, g, other or unknown
  misc_feature (641)..(641): "n" may be a, t, c, g, other or unknown
  misc_feature (643)..(643): "n" may be a, t, c, g, other or unknown
  misc_feature (672)..(672): "n" may be a, t, c, g, other or unknown
  misc_feature (748)..(748): "n" may be a, t, c, g, other or unknown
  misc_feature (775)..(775): "n" may be a, t, c, g, other or unknown
  misc_feature (779)..(779): "n" may be a, t, c, g, other or unknown
  misc_feature (808)..(808): "n" may be a, t, c, g, other or unknown
  misc_feature (814)..(814): "n" may be a, t, c, g, other or unknown
agatttttattggactgtggctgggatgagcacttttctatggatattattgattccctgaggaagcatgttcaccagattgatgcagtgctgttgtctcaccctgatcctctccaccttggtgccctcccgtatgctgtcggaaagttgggtctgaactgtgctatctatgcaaccattcctgtttataaaatgggacagatgttcatgtatgatctttatcagtctcgacacaatacagaagattttacactctttacattagatgatgtggatgcagcctttgataaaatacagcagctaaaattctctcagattgtgaatttgaaaggtaaaggacatggcctgtctatcacacctctgccagctggtcatatgataggtggaacaatatggaaaatagtcnaagatggagaagaagaaattgtttatgcagttgacttcnaccacaaganggagatccatttaaatggatgttccctggaaatgctaagcaggccttccctacttatcacagattcattcaatgctacatatgttcngcctagaagaaaacagagagatgancagcttctgacaaatgtcctggaaacacttcnaagtgatggaaatgtgttaatancagtggacacagcaggcananttttggaacttgctcaacttcttgatcanatttgggaggactaaagatgcaggattgggtgtttactcctttggcactcctaaattaatgtcagtttaccaatgntgggtggaagttttcctaagttccccngttnaaatgggattgaatttaataaatttgatnaaaatntttttggaaagaacc

SEQ ID NO: 2712 - DNA, 715 bp, Homo sapiens
  misc_feature (222)..(222): "n" may be a, t, c, g, other or unknown
  misc_feature (389)..(389): "n" may be a, t, c, g, other or unknown
  misc_feature (482)..(482): "n" may be a, t, c, g, other or unknown
  misc_feature (510)..(510): "n" may be a, t, c, g, other or unknown
  misc_feature (543)..(543): "n" may be a, t, c, g, other or unknown
  misc_feature (565)..(565): "n" may be a, t, c, g, other or unknown
  misc_feature (586)..(586): "n" may be a, t, c, g, other or unknown
  misc_feature (629)..(629): "n" may be a, t, c, g, other or unknown
  misc_feature (693)..(693): "n" may be a, t, c, g, other or unknown
  misc_feature (696)..(696): "n" may be a, t, c, g, other or unknown
  misc_feature (700)..(700): "n" may be a, t, c, g, other or unknown
  misc_feature (703)..(703): "n" may be a, t, c, g, other or unknown
aaaattggatggaaagaaattctgtgtgctcccaggattccagttccttaccggaggttggtgccgtctgagtctgaaaagctgccctcttgccgtgttcatgctttggtagaacaccttcagagccttggcaagctctcggtcagagccagcttgctgtgtgcacatttggctcatctccccggcggatggcagttgcacagtcatcccgctgatcttcanagtgttggaaggcttcggggctgaggtggaaaaaggtaacattgatttatgtatctctttctctgggcatctctatatttattttggtggcattctactgcatcagcatttatcaggcaccagtttggatccatccaagggaaaggggaaatctcacagggcagaanaaatgtccggcattttttgtttatgaaagaagatacgaattaactcatttaaaagtttgtttcttaaaagacaaatacacatcccaaatgtangaatctagggataagctaaacagccaanactggagcagtctctcaccttgaccagaaacanttttcgcaagtgatgctttganaaacacgttctcctctctcanggctctgttaatgttcctgaacgggttccgtctcctgctctancttgaacagcttcaaataaaattctggttatctggtttgatgcctgccctaccaaaaaaacatntcntttnccnccttttgtttgt

SEQ ID NO: 2713 - DNA, 749 bp, Homo sapiens
  misc_feature (197)..(197): "n" may be a, t, c, g, other or unknown
  misc_feature (442)..(442): "n" may be a, t, c, g, other or unknown
  misc_feature (519)..(519): "n" may be a, t, c, g, other or unknown
  misc_feature (549)..(549): "n" may be a, t, c, g, other or unknown
  misc_feature (569)..(569): "n" may be a, t, c, g, other or unknown
  misc_feature (572)..(572): "n" may be a, t, c, g, other or unknown
  misc_feature (602)..(602): "n" may be a, t, c, g, other or unknown
  misc_feature (687)..(687): "n" may be a, t, c, g, other or unknown
  misc_feature (690)..(690): "n" may be a, t, c, g, other or unknown
  misc_feature (699)..(699): "n" may be a, t, c, g, other or unknown
  misc_feature (712)..(712): "n" may be a, t, c, g, other or unknown
  misc_feature (746)..(746): "n" may be a, t, c, g, other or unknown
tacacaggacaactccatgtggttgattttactggcatgtcttggtgacgaagagttggccaagtgaatgatgcatcttttacttggagctctccagcctttgtcatagttcccagaccttttttccttgtggtcatccaggaggtgatcaattacatgtgcacagtgctaggacgggaggcagagccggctcagancaggtccaccagcccacctatagcaggaagcgtgtcggtgcttaggaaatctaggacttccagcttccctcatgtcagatagaaaaaaagtcaggaaaccagctcgtggacaggggctttggttccaaaacttggacaaacctgatgccttaaggaaaaggttaagatgagagggggcttccagagtcaatgaacgtcacccttcagccgacggataccgggagcgcttgggcaaaacagcaganaaagaaagactgtggtcggggaagtggaatgcttcgatgcaggccaaaattcaaggctctggggctggcctcacaanaagcttcttccacggggcttgacaccagancagcccccgcgtgaaatganaangcacgcttagcactgggaagaaaagctganttaagaaaattctttatcattgtttgccttcccttggggaaaacattcaggcagtaaaatgacatccacgtgttcctgttcgacncancggcttccnggaacaaatttancgctgggggactatctggggctcgtctctctgtnctt

SEQ ID NO: 2714 - DNA, 819 bp, Homo sapiens
  misc_feature (19)..(19): "n" may be a, t, c, g, other or unknown
  misc_feature (478)..(478): "n" may be a, t, c, g, other or unknown
  misc_feature (557)..(557): "n" may be a, t, c, g, other or unknown
  misc_feature (623)..(623): "n" may be a, t, c, g, other or unknown
  misc_feature (732)..(732): "n" may be a, t, c, g, other or unknown
  misc_feature (771)..(771): "n" may be a, t, c, g, other or unknown
  misc_feature (791)..(791): "n" may be a, t, c, g, other or unknown
  misc_feature (801)..(801): "n" may be a, t, c, g, other or unknown
  misc_feature (812)..(812): "n" may be a, t, c, g, other or unknown
gcaccagggctgactgtanctgggggaagacattttactcatttgctctttcctttcatacagtcagctggtccctcttctcaggtgtagatcacctattataattttacctaattttgatactctgataaggaaagtcccaggacttatcagctgggataggcctcacttacaagacagctctgttcagtatttggaagaaagcctgacaggtttcttcggaaaagtggccatccatggaatgaatgaaatgttctctttctattccagggattgcagtggcaaagctaggctaggtcttggaggctggtgtaaggcgatgtgggtgaaggcaggaggctgatggaaagactggggggaagaaaagccgaaatggattcacggtgccttggatgaaggacgagaggggaactgcaagctccttcaactggttctgtccggtgagaagtgatcaagcttgggctgacaagaagctcanggagccctcacgttctttcgcttttttacctgccaaccaaactgctacaagacaacaccctgatctggcatggacatcncgggtccaagcctgtaaccccaaatcggataatctctgcagctgataacaagcaaaagaaaaccangcaacaccatattaaagaagaaaacaatcaactctgaaatccacttagaaataatgtttcattcaaaataaggctcttgctttaagaaattgttacctggcttgcatcnttcctaaaaactcctatcgtctgttttccaaaccccaanggaaggaaccccctttcctnttttaataantcccccctccntttgcca

SEQ ID NO: 2715 - DNA, 736 bp, Homo sapiens
  misc_feature (663)..(663): "n" may be a, t, c, g, other or unknown
  misc_feature (680)..(680): "n" may be a, t, c, g, other or unknown
  misc_feature (717)..(717): "n" may be a, t, c, g, other or unknown
  misc_feature (725)..(725): "n" may be a, t, c, g, other or unknown
  misc_feature (727)..(727): "n" may be a, t, c, g, other or unknown
tgagtgcccgtcgcgtcgcgccgcgtcgccccccgggccgcctccttgccgccagtggcgggctccgttctccctcgaagcactccccccagctccatgaatggaaatcggctccgcaggacccgctggggcccagcccctactcatggtgcccagaagacctggctatggcgccatgggcaaacccattaaactgctggctaactgttttcaagttgaaatcccaaagattgatgtctacctctatgaggtagatattaaaccagacaagtgtcctaggagagtgaacagggaggtggttgactcaatggttcagcattttaaagtaactatatttggagaccgtagaccagtttatgatggaaaaagaagtctttacaccgccaatccacttcctgtggcaactacaggggtagatttagacgttactttacctggggaaggtggaaaagatcgacctttcaaggtgtcaatcaaatttgtctctcgggtgagttggcacctactgcatgaagtactgacaggacggactttgcctgagccactgggaattagacaagccaatcagcactaaccctgtccatgccgttgatgtggtgctacgacatctgccctccatgaaatacacacctgtggggcgtcatttttctccgctccagaaangatattaccaccctctnggaagggggcagggaaattttggtttggattcatcantctgttcngnctgccatgt

SEQ ID NO: 2716 - DNA, 664 bp, Homo sapiens
  misc_feature (367)..(367): "n" may be a, t, c, g, other or unknown
  misc_feature (498)..(498): "n" may be a, t, c, g, other or unknown
  misc_feature (545)..(545): "n" may be a, t, c, g, other or unknown
  misc_feature (631)..(631): "n" may be a, t, c, g, other or unknown
  misc_feature (638)..(638): "n" may be a, t, c, g, other or unknown
  misc_feature (647)..(647): "n" may be a, t, c, g, other or unknown
  misc_feature (658)..(658): "n" may be a, t, c, g, other or unknown
  misc_feature (660)..(660): "n" may be a, t, c, g, other or unknown
actcgctcgtccccggcttccgggcacagcatggcggtcaaggtgcagacaactaagcgaggggatcctcatgagttaagaaacatatttctacagtatgccagtactgaggttgatggagagcgttacatgaccccagaagactttgttcagcgctatcttggactgtataatgatccaaatagtaacccaaagatcgtgcagctcttggcaggagtagctgatcaaaccaaggatgggttgatctcctatcaagagtttttggcatttgaatctgttttatgtgctccagattccatgttcatagtggctttccagttgtttgacaagagtggaaatggagaggtgacatttgaaaatgtcaaanaaatttttggacagactattattcatcatcatatcccttttaactgggattgtgaatttatccgactgcattttgggcataaccggaagaagcatcttaactacacagaattcacgcagtttctccagganctgcaattggaacatgcaagacaagcctttgcactcaaagacaaaancaaaagtggcatgatttctggtctggatttcagtgacatcatggttaccattagatctcacatgcttactccttttggtggaaganaacttantttccccanctgggaagaantntctc

SEQ ID NO: 2717 - DNA, 684 bp, Homo sapiens
  misc_feature (303)..(303): "n" may be a, t, c, g, other or unknown
  misc_feature (407)..(407): "n" may be a, t, c, g, other or unknown
  misc_feature (483)..(483): "n" may be a, t, c, g, other or unknown
  misc_feature (605)..(605): "n" may be a, t, c, g, other or unknown
  misc_feature (615)..(615): "n" may be a, t, c, g, other or unknown
  misc_feature (649)..(649): "n" may be a, t, c, g, other or unknown
  misc_feature (655)..(655): "n" may be a, t, c, g, other or unknown
  misc_feature (671)..(671): "n" may be a, t, c, g, other or unknown
tcctggacagtttggacgttacagttcgtcaggccgtgatcagtggcctgcagtgggactgctcctttgatatctgaacctctgttatgggcttctctgagacaagtaaatgtcaggtgcaagatctggatactaacagtttcagtttgggaaatccaagaaaaagaattatcaagtttgatagggaagctctgtagccttgactccagcaagaagaaaaggtcaaaaccacgtgtttcccaaaagtccagactacaatgattcagctgacttgaggacaaggcctagcatttggctgagcanagccctcttccttgccctccaacctggtggcataggcttggcaaatggacaacttggttgtccagacaggttgaggattcggttatgatcccctggggaggtancagggacctctgcaactatgcatgatttctcaaacttcaagattcatgtctggatgtattatgctgtggatataantttagtaaggcggtcatttcctactctgagttactggttacctaaccagtccatgggtgtgacttggtccttaagtcaggtcactatctgcctcccaccctgggggcaggactgaagtatanaaaaacatcntggctgttcaggaagctgtggtttgaaaactganccccanaaggcactttcactgncctccattaatgt

SEQ ID NO: 2718 - DNA, 588 bp, Homo sapiens
  misc_feature (3)..(3): "n" may be a, t, c, g, other or unknown
  misc_feature (78)..(78): "n" may be a, t, c, g, other or unknown
  misc_feature (161)..(161): "n" may be a, t, c, g, other or unknown
  misc_feature (213)..(213): "n" may be a, t, c, g, other or unknown
  misc_feature (234)..(234): "n" may be a, t, c, g, other or unknown
  misc_feature (386)..(386): "n" may be a, t, c, g, other or unknown
  misc_feature (418)..(418): "n" may be a, t, c, g, other or unknown
  misc_feature (443)..(443): "n" may be a, t, c, g, other or unknown
  misc_feature (517)..(517): "n" may be a, t, c, g, other or unknown
  misc_feature (541)..(541): "n" may be a, t, c, g, other or unknown
  misc_feature (547)..(547): "n" may be a, t, c, g, other or unknown
  misc_feature (568)..(568): "n" may be a, t, c, g, other or unknown
  misc_feature (579)..(579): "n" may be a, t, c, g, other or unknown
gantgccgaaccgcgggagatttgagccaggcctgttaaaccaagttctcagcaggatgtgcacagagggcccaggangagcctcaggagccggactgccgttggccaaccgagtccccaggggagacacttaagggaaattaaactgcagagtgcaaganatgcctcagtcaagtcagccaaaaacacgcgggtcatccccaagccccaganaggctttgaattgaaggcgantgcctcagaatttgcatccattgttctgtctttcctgggaagttattcatcctggtggccagcccaccgacaaaatggatttggatctactggacctgaatcccacaattattgctgcaattaagaaagccaaactgaaatcggtaaaggangttttacacttttctggaccagacttgaaganactgaccaacctctccagccccgangtctggcacttgctgagaacggctccttacacttgcggggaaacaacatccttacagcactgcagctgcaccancagaaagaacggttccccacgcancaccancgcctgaacctgggctgcccngtgctgggacncgctgctcc

SEQ ID NO: 2719 - DNA, 659 bp, Homo sapiens
  misc_feature (7)..(7): "n" may be a, t, c, g, other or unknown
  misc_feature (282)..(282): "n" may be a, t, c, g, other or unknown
  misc_feature (365)..(365): "n" may be a, t, c, g, other or unknown
  misc_feature (389)..(389): "n" may be a, t, c, g, other or unknown
  misc_feature (409)..(409): "n" may be a, t, c, g, other or unknown
  misc_feature (501)..(501): "n" may be a, t, c, g, other or unknown
  misc_feature (514)..(514): "n" may be a, t, c, g, other or unknown
  misc_feature (585)..(585): "n" may be a, t, c, g, other or unknown
  misc_feature (606)..(606): "n" may be a, t, c, g, other or unknown
  misc_feature (625)..(625): "n" may be a, t, c, g, other or unknown
  misc_feature (637)..(637): "n" may be a, t, c, g, other or unknown
  misc_feature (657)..(657): "n" may be a, t, c, g, other or unknown
agtgtcnatccctcagccagggcatggagctctcctgccccggttcgcggtgcccggtgcaagagcagcgtgcccgctgggagcggaaacgcgcctgcaccgcccgggagctgctagagaccgagcggcgctaccaaaaacagctggggctggtggccacgtactttttggggatcctgaaagccaaggggaccctgcgaccacctgagcgccaggccctgtttggctcctgggagctcatctacggcgccagccaggagctgcttccctacctggaaagangatgctggggccaagggctggagggcttctgccgccacttggagctctataaccaatttgctgccaactcagagaggtcccanaccaccctgcaggagcagctaaanaaaaataaaggtttccggangtttgtacggcttcaggaagccgccctgggtttgggggccttcactccaagacctgctccctctgcctctgcaacggctccagcagtatganaatctcgtcctanctttggctgaaaacacaggtcccaacagccctgaccatcaacaagctcacacctgtccttccctcatgaanaactactgcttatgttcacanaccaagaagaactgtcacnctggtaccacantctgacttgggctatcacancc

SEQ ID NO: 2720 - DNA, 590 bp, Homo sapiens
  misc_feature (494)..(494): "n" may be a, t, c, g, other or unknown
  misc_feature (496)..(496): "n" may be a, t, c, g, other or unknown
  misc_feature (499)..(499): "n" may be a, t, c, g, other or unknown
  misc_feature (545)..(545): "n" may be a, t, c, g, other or unknown
  misc_feature (584)..(584): "n" may be a, t, c, g, other or unknown
ttctttctttctttctttctctttctttcttttgctttccttctttcatctcttttttgtaatttgttgttgcaaatcattgtgaggccacttttctttccccttccttccttcctttttttctgttttttttttttttttttcccaaagtcttgctctgtcgcccaggttggagtgcagtggcacgatctcggctcactgcaccctctgcctcttgggttcaagcgattctcctgcctcagcctcccaagtagctgggattacaggcatacaccaccacgccccactaattttttgtatttttggtagggcggggtttcaccatgatggccaggttggttttgaactcctgacctcaagtaatctgcccacctcggcctcccaaagtgctaggattacaggagtgagccactgcgcctggcccacttttctttctttccttcttattttgttatgctggcagccatttgcccctgcatggtatgggatcaaananganagcctttcctccctcaccttctccaaatctaggtgaaatcacagantacaactcgtgagaatgctgaatgtgtaaagttgcagangggatc

SEQ ID NO: 2721 - DNA, 688 bp, Homo sapiens
  misc_feature (621)..(621): "n" may be a, t, c, g, other or unknown
  misc_feature (628)..(628): "n" may be a, t, c, g, other or unknown
  misc_feature (634)..(634): "n" may be a, t, c, g, other or unknown
agtctccgcgctgctgaggcgcgcccggccgctcccacggcctcccctccgccctgcggtcccgccgcctccggggcctcctgggaccctggccctcgccgggcaggacgccgccagcgctgaaggcgcagcccggaggccgcgcggatgcagatctgtggatccagcgtagcatctgtagcagctgggacatcattccaggttttgggcccggtgtgttggcaacaactggatctgaagatggcagtcagggtgctttggggtggtctcagcctgctccgagtgctgtggtgtctccttccgcagacgggctatgtgcacccagatgagttcttccagtcccctgaggtgatggcagaggacatcctgggcgttcaggccgcgcggccctgggagttttaccccagcagctcctgccgctcggtgctcttccccctgctgatctctggttccaccttctggctgctcaggctctgggaggagctggggccgtggcctggcctggtgagcggctatacgctgctggtggggcctccactcctcctcactgccctttcctttgctctggacgggccgtgtaccacctggccccgccgatgggggccggatcctggaaccccnggccctnctgtcnggttcccaacttcacctgggtctcctacaacaaggaacttctccaaccaccatt

SEQ ID NO: 2722 - DNA, 894 bp, Homo sapiens
  misc_feature (472)..(472): "n" may be a, t, c, g, other or unknown
  misc_feature (615)..(615): "n" may be a, t, c, g, other or unknown
  misc_feature (698)..(698): "n" may be a, t, c, g, other or unknown
  misc_feature (701)..(701): "n" may be a, t, c, g, other or unknown
  misc_feature (719)..(719): "n" may be a, t, c, g, other or unknown
  misc_feature (739)..(739): "n" may be a, t, c, g, other or unknown
  misc_feature (780)..(780): "n" may be a, t, c, g, other or unknown
  misc_feature (810)..(810): "n" may be a, t, c, g, other or unknown
  misc_feature (816)..(816): "n" may be a, t, c, g, other or unknown
  misc_feature (820)..(820): "n" may be a, t, c, g, other or unknown
  misc_feature (870)..(870): "n" may be a, t, c, g, other or unknown
  misc_feature (886)..(886): "n" may be a, t, c, g, other or unknown
attgaagcctacaaccatgcaaagtgcagtgctgagaatgaggaagacaaaaaggtcatctcattacagttggataaagatcaccacgctttatatgtggcgttctctagctgcattatccgcatccccctcagtcgctgtgagcgttatggatcatgtaaaaagtcttgtattgcatctcgtgacccgtattgtggctggttaagccagggatcctgtggtggagtgaccccagggatgctgctgttaaccgaagacttctttgctttccataaccacagtgctgaaggatatgaacaagacacagaattcggcaacacagctcatctaggggactgccatggtgtacgatgggaagtccagtcgggagagtccaaccagatggtccacatgaatgtcctcatcacctgtgtctttgctgcttttgtttcgggggcattcattgcaggtgtggcagtatactgctatcganacatgtttgttcggaaaaacagaaagatccataaagatgcagagtccgcccagtcatgcacagactccagtggaagttttgccaaactgaatggtctctttgacagccctgtccaggaataccaacagaatattgattctccnaaactgtatagtaacctgctaaccagtcggaaagaactacccacccaatggaaatactaaatcccatgggtaatggaccatcnaanggccaccccccaaaattnggtgctcttccctactcccngaattctacacccggtgcttccaccaaaaaaaaacccggcngggccatgaaaaaaccccctccagaaaaanggcccntggnccttgggaacttccaaaggaaaaaaaacccccccagttttttcccgtccnaattcccccccccccntttcccca

SEQ ID NO: 2723 - DNA, 618 bp, Homo sapiens
  misc_feature (596)..(596): "n" may be a, t, c, g, other or unknown
  misc_feature (604)..(604): "n" may be a, t, c, g, other or unknown
  misc_feature (607)..(607): "n" may be a, t, c, g, other or unknown
gcgcgtaatggcagcgccgtggcctcgcgtccatctttgccgttctctcggacctgtcacaaaggagtcgcgccgccgccgccgccccctccctccggtgggcccgggaggtagagaaagtcagtgccacagcccgaccgcgctgctctgagccctgggcacgcggaacgggagggagtctgagggttggggacgtctgtgagggaggggaacagccgctcgagcctggggcgggcggaccggactggggccggggtaggctctggaaagggcccgggagagaggtggcgttggtcagaacctgagaaacagccgagaggttttccaccgaggcccgcgcttgagggatctgaagaggttcctagaagaaggtgttccctctttcgggggtcctcaccaagaagaggtccttgggggtcgcccttctgaggaggctgcggctaacagggcccaggtgagaggcagctatctatctcctggggtggctcctggtaccgatggagtcctgacctactcaggggtgcccgggatagaaagggtagatgaagggacgctttaggagggttctttttgtggagtttaccgtctaggtggcncggatgangcntacctccccca

SEQ ID NO: 2724 - DNA, 647 bp, Homo sapiens
  misc_feature (435)..(435): "n" may be a, t, c, g, other or unknown
  misc_feature (489)..(489): "n" may be a, t, c, g, other or unknown
  misc_feature (583)..(583): "n" may be a, t, c, g, other or unknown
  misc_feature (611)..(611): "n" may be a, t, c, g, other or unknown
  misc_feature (616)..(616): "n" may be a, t, c, g, other or unknown
  misc_feature (618)..(618): "n" may be a, t, c, g, other or unknown
  misc_feature (639)..(639): "n" may be a, t, c, g, other or unknown
ttgagcaacaataagaaattgagtgaaaatacgcaaaatacgtcattatgttctggaactgtagttcatggtagacgttttcatcatgctcatgcacagataccagtagtaaaaacagcagcccaaagcagtctggaccgaaaagaaaggaaagaatacccacctcatgtccaaaaagttgaaattaatcctgtaaggttaagtcggctccaaggtgttgaacgtataatgaagaaaacagaagagtccgaatcacaagtggagcctgaaattaagaggaaagtacaacagaaacggcactgtagtacctatcagcctactcctcctctatctcctgcttcaaaaaaatgtttaacccatttagaggatttgcaaagaaattgcagacaagctattactttgaatgagtctactggaccattattaagaacgtcnattcatcagaattctggaggacagaagtcacaaaacacaggattaacaaccaanaagttttatggcaacaatgtggaaaaggttccaattgatattattgtgaattgtgatgacagtaaacgcacttatttacagactaatggaaaantcattttacctggggcgaaaataccccnaatcncnaacttgaaagaaaggaaaacnagtttgtc

SEQ ID NO: 2725 - DNA, 570 bp, Homo sapiens
  misc_feature (504)..(504): "n" may be a, t, c, g, other or unknown
  misc_feature (524)..(524): "n" may be a, t, c, g, other or unknown
  misc_feature (568)..(568): "n" may be a, t, c, g, other or unknown
atcactcaagatggctgcccccatcaagatgaccggggtgtgccggggggaaaggggcagcatgatggtctgagatggtgtagcgtcggaccatgtggaagtttctgaggctggggagccggataatggggggtggggcccgttggggggtaaaggggcaatagcgtcctttcacaggctaacctcggctcttcccagtcctctggactaaaatggggaacacattgggcctggcaccaatggggactttgccccgccggagcccccgccgagaggaacccctgcccaaccctgggaacttcgatgagctgcaccgtctatgcaaagacgcagcaggccaagttcctgacatggcagtttgatggcgaatatccgggagatgactacacagccactctgaccctaggaaatcctgacctgattggggaatccgtgatcatggttgctcacttcctgcagaacctcactcatcggctggtgctgggaaggaagactagtttatcnccgggcggccaggcgaaganggggccatcttgaccctggctgggaagtactccgctgttcactngg

SEQ ID NO: 2726 - DNA, 623 bp, Homo sapiens
  misc_feature (7)..(7): "n" may be a, t, c, g, other or unknown
  misc_feature (9)..(9): "n" may be a, t, c, g, other or unknown
  misc_feature (171)..(171): "n" may be a, t, c, g, other or unknown
  misc_feature (174)..(174): "n" may be a, t, c, g, other or unknown
  misc_feature (536)..(536): "n" may be a, t, c, g, other or unknown
  misc_feature (552)..(552): "n" may be a, t, c, g, other or unknown
  misc_feature (575)..(575): "n" may be a, t, c, g, other or unknown
  misc_feature (580)..(580): "n" may be a, t, c, g, other or unknown
  misc_feature (609)..(609): "n" may be a, t, c, g, other or unknown
atatcananaagatcctgctgcggctactcaagtacccagatgtcattcaggaactcaagtttgacgagcacaataagtactacgcccgccattacctgtacacccgaaataagccggccgactacttcatcctcatcctgcaggggaaggtggaggtggaggcagggaanganaacatgaagtttgagacgggcgccttctcctactatgggactatggccctgacctcggtcccctctgaccgttccccagcacaccccaccccactcagccgctcagcctccctcagttacccagaccgcacagacgtctcaactgcagcaaccttggcaggcagcagcaaccagtttggcagctctgtcctgggccagtacatctctgacttcagcgtccgggcactcgtggacttgcagtacatcaagatcactcggcagcagtaccagaacgggctgctggcttctcgcatggagaacagccctcagtttcccatagacgggtgcaccacccacatggagaacttggccgaaaatctganctgcctgtggtggacnaaaccacaactcttctcaacgancgttnctccttgctgcacaaagcctcccacgaanaatgccatctgaca

SEQ ID NO: 2727 - DNA, 649 bp, Homo sapiens
  misc_feature (133)..(133): "n" may be a, t, c, g, other or unknown
  misc_feature (204)..(204): "n" may be a, t, c, g, other or unknown
  misc_feature (207)..(207): "n" may be a, t, c, g, other or unknown
  misc_feature (228)..(228): "n" may be a, t, c, g, other or unknown
  misc_feature (256)..(256): "n" may be a, t, c, g, other or unknown
  misc_feature (301)..(301): "n" may be a, t, c, g, other or unknown
  misc_feature (379)..(379): "n" may be a, t, c, g, other or unknown
  misc_feature (513)..(513): "n" may be a, t, c, g, other or unknown
  misc_feature (573)..(573): "n" may be a, t, c, g, other or unknown
  misc_feature (576)..(576): "n" may be a, t, c, g, other or unknown
  misc_feature (633)..(633): "n" may be a, t, c, g, other or unknown
  misc_feature (635)..(635): "n" may be a, t, c, g, other or unknown
  misc_feature (646)..(646): "n" may be a, t, c, g, other or unknown
cctgtcgccgccgcctcgggcgggtgggctgactggcggcaggctcgccgcggcgcggagtcccggctgcgggatagaccgagggccatggccgcctctcccggacccgccggcgttggcggcgccggaacantctacggctccggctcttcgggcttcgccctcgactcgggactggagatcaaaactcgctcggtggagcanacnctactcccgctggtttctcanatcaccacgcttattaatcataaagatnataccaaaaagtctgataaaactctgcaagcaattcagcgtgtangacaagctgtcaacttggcagttggaagatttgttaaagtaggagaagctatagccaatgaaaactgggatttgaaanaagaaataaatattgcttgtattgaagctaaacaagcaggagaaacaattgcagcacttacagacataaccaacttgaaccatctggaatctgatgggcagatcacaatttttacagacaaaacaggagtgatnaaggctgcaagattacttctttcttcagtgacaaaagtgttgttgctggcacaccgagtntcnttaaacagataataacatccaaaaaataaggttctcgccactatgggaaagactaananaaagtgaatanctt

SEQ ID NO: 2728 - DNA, 756 bp, Homo sapiens
  misc_feature (291)..(291): "n" may be a, t, c, g, other or unknown
  misc_feature (542)..(542): "n" may be a, t, c, g, other or unknown
  misc_feature (596)..(596): "n" may be a, t, c, g, other or unknown
  misc_feature (628)..(628): "n" may be a, t, c, g, other or unknown
  misc_feature (681)..(681): "n" may be a, t, c, g, other or unknown
  misc_feature (692)..(692): "n" may be a, t, c, g, other or unknown
  misc_feature (698)..(698): "n" may be a, t, c, g, other or unknown
  misc_feature (720)..(720): "n" may be a, t, c, g, other or unknown
  misc_feature (748)..(748): "n" may be a, t, c, g, other or unknown
tcattgaagaaatagttgaggatggacaaccggaaattttctacacattttggaattcagttactcaggcactttcttctcaatttcatatggcaacaaactcttcgatgtttttgaagcaggcatttgaaggagaataccctaaattattacgtctttataatgacttatggaagcgtcttcaacaatacagtcagcatatccaagggaattttaatgcaagtggaactacagacctctatgttgacctacaacacatggaagatgatgcacaagatatattcataccanaaaagccagattatgatccagaaaaggctttgaaagactcactacaaccctatgaggctgcttatctatcaaaatccttatctcgactcttcgatcctatcaacttggtttttcccccgggtggtcgtaatcctccttcctctgatgaacttgatggtattattaaaactatagcaagtgaactaaatgttgctgctgttgatacaaacctcacattagctgtgtcaaaaaatgtggcaaagaccatccanttatacagtgtaaaatcagagcagcttctctccacacaaggagatgcaagtcangtgattgggcctcttactgaaggacagagaanaaatgtggcagttagtgaattccttgtataagttgccccaatcattaacaaangttgtttccantcaganctcattcccactgggcagcttnaacaaacttataattttcagctcctaanggctattc

SEQ ID NO: 2729 - DNA, 590 bp, Homo sapiens
  misc_feature (377)..(377): "n" may be a, t, c, g, other or unknown
  misc_feature (463)..(463): "n" may be a, t, c, g, other or unknown
  misc_feature (516)..(516): "n" may be a, t, c, g, other or unknown
  misc_feature (519)..(519): "n" may be a, t, c, g, other or unknown
  misc_feature (550)..(550): "n" may be a, t, c, g, other or unknown
  misc_feature (562)..(562): "n" may be a, t, c, g, other or unknown
  misc_feature (590)..(590): "n" may be a, t, c, g, other or unknown
tgggaacagaagaagattgacaaattgatgatagagacagttgaccctgacaataggtctaaatttggagtgaacattatactgggaatctcttttgctgtttgtaaggctggagctgccgaaaagggattctccctgctgtcacagaattgtgaatttgctggcaattctgaaggcatcctgctagttccagctttcactgtgaccggcaatggttctcaatctggcaataagctggcagtataggagttcataatcttccccgtcagcaaacttcagggaagccatgctcgttagagccaaggcttagcacacttgagccgtgtcatcaaagagaaatgtgagaaagctgctgccaatgtgggggattgtggtangctgcataatgtctcctaaagatgtccatgtcctaatccctggaacttgtgaatatactactttacttggccaaagggatttgcanatatgattaaggttatgaaccttaaaacggggacattatcctgtattatccanaanggtccagtgtaatcttatgagtccttaaaancagaaaaaaaanccttttatgtctgtggtcagaaaagtcn

SEQ ID NO: 2730 - DNA, 679 bp, Homo sapiens
  misc_feature (140)..(140): "n" may be a, t, c, g, other or unknown
  misc_feature (287)..(287): "n" may be a, t, c, g, other or unknown
  misc_feature (404)..(404): "n" may be a, t, c, g, other or unknown
  misc_feature (632)..(632): "n" may be a, t, c, g, other or unknown
  misc_feature (635)..(635): "n" may be a, t, c, g, other or unknown
  misc_feature (639)..(639): "n" may be a, t, c, g, other or unknown
  misc_feature (642)..(642): "n" may be a, t, c, g, other or unknown
  misc_feature (673)..(673): "n" may be a, t, c, g, other or unknown
gtgaaactctgaaagtccctcccaaaaagatggaagatttaactaatgtatcaagtctactgaatatggaaagggcacgagacaaagctaatgaagaaggtctggcattactacaggaagaaatagataaaatggtaganaccacagagttaatgactgggaatattcagagcctaaagaacaaaattcagattctggcaagtgaggtggaagaagaagaggagagagtaaaacagatgcatcaaataaatagtagtggagtactctctcttccggaactttctcanaaaactctcaaagcacccacacttcagaaagaaattttggcgctaattccaaaccagaatgctcttctaaaggacttggatattcttcataattcatcacagatgaagagcatgtcnaccttcattgaagaacctataagaaactggatgcatcttaaagagtgttttttttttagattgttccatattaatttaatgttcgtgaatttgtaaaactgttaacctatgattatatgtacagaggctaaggcttctgcaggatttattatctcctgatatgcctttaaaattagtctttgtagttctatcattaacatctaatgtagttctgaagactgtttttancanttgncanatctaggaaaactaacgtttatattgctgtnatctat

SEQ ID NO: 2731 - DNA, 626 bp, Homo sapiens
  misc_feature (594)..(594): "n" may be a, t, c, g, other or unknown
  misc_feature (597)..(597): "n" may be a, t, c, g, other or unknown
  misc_feature (620)..(620): "n" may be a, t, c, g, other or unknown
aaccactaccacgtccccaagtgcaacgggacccacgggaactacatgtgtggggcagggtgagcgtggaaaaagggacgcggatgggggtgcgctttgcaaacgatctggagactgctgtgtgttgagggaagatacgaagtcgcgggagcagttggggactcaatgtgtgggcaacaagggtcctgctgagctcaggagctgcacggaatggtggcagtcaccttgccagtgcagcaggcatggatcagactgcaagctaggggcacgaggcatcagttgggaagaggggacgcacagctaggcttgaggcctcttcatcgggatgtccccaggccccccagcccaggcccagcataaaggccgtgttggggggcccccctgacccaaggggggcttcatgcgccacgtgcaggcggagccgtctccatcctcagagccggaggctggcccttcacagcctccagtcaggcagggggccctccagggtggcctgctcatgggctacagcccagcagggggggcgacatcccccggggtctaccaggcccctgccccaccaagcgaaggctgcttcctgctggaaaaccccanatntctctctgaagaaaaagggccancccctc

SEQ ID NO: 2732 - DNA, 675 bp, Homo sapiens
  misc_feature (136)..(136): "n" may be a, t, c, g, other or unknown
  misc_feature (184)..(184): "n" may be a, t, c, g, other or unknown
  misc_feature (303)..(303): "n" may be a, t, c, g, other or unknown
  misc_feature (326)..(326): "n" may be a, t, c, g, other or unknown
  misc_feature (396)..(396): "n" may be a, t, c, g, other or unknown
  misc_feature (406)..(406): "n" may be a, t, c, g, other or unknown
  misc_feature (429)..(429): "n" may be a, t, c, g, other or unknown
  misc_feature (543)..(543): "n" may be a, t, c, g, other or unknown
  misc_feature (599)..(599): "n" may be a, t, c, g, other or unknown
  misc_feature (618)..(618): "n" may be a, t, c, g, other or unknown
  misc_feature (622)..(622): "n" may be a, t, c, g, other or unknown
  misc_feature (641)..(641): "n" may be a, t, c, g, other or unknown
  misc_feature (654)..(654): "n" may be a, t, c, g, other or unknown
aaaagaaaaaagagagtattaaaatttctcattgtaaaatctatattttagaatcactctacaatataagcaaataatgtgttttttactgattacatgccttttttttggggggggggggttctttttttttganacagggtcttgctctgtcgcccaggctggagtgcagtggcgtgatganacttcaatgcagccttgatctcccgggctcaagtgattctcccgcctcagcctcccaagcaactgggaccacaaggtgtgtgccaccatgcctgggtaattttttgtttttttgtgganatgcgggtctcactgttttccangctggtctcaaattcctgggctcaagtgatcctcccacttcagcctcacattgttgggattacagtcacnaaccactgtncccatccatatgtcattctttanacacactacttactaaatttctctttttaaagggatatactgaatttccggttgaagccaacttaactgctaattttctattttagctttaaaacattgataagcaacatgaancaatctagaacttaacctttaaatggctttattaaagaaatcccctatgaaaatcntgcaaaatgattatttacnaacnatcctacccagcacataanaaattcctcctcnattctgaaataccatcttctc

SEQ ID NO: 2733 - DNA, 466 bp, Homo sapiens
  misc_feature (377)..(377): "n" may be a, t, c, g, other or unknown
  misc_feature (422)..(422): "n" may be a, t, c, g, other or unknown
  misc_feature (428)..(428): "n" may be a, t, c, g, other or unknown
  misc_feature (430)..(430): "n" may be a, t, c, g, other or unknown
  misc_feature (444)..(444): "n" may be a, t, c, g, other or unknown
aagctaaaacttttatgcacgtaaaattgtcttctccatggaagacgtaataattcactctgttttgtagaaaagttgcaataaaccatagaccctaagtcaaattataaacaagaaagagttaaacgtaactgcaattcttcttatagcactggttccctattcttcagtactgcagagtgaaagggcagatgaaaacttttacagtccaactttatttaaaaaccttaagtacaaatcagggtgatttgcaaagccatctcagcagaagtcaatgtagccattccctgatggttggctcttttcttcctgtgtgtgaaattcctatctagtaagcattgagcacggaacgaggtctggctgggcttgtccagganccttgtgagggtgcatcacagaatggggctgtgtgatcatccaantgtganancaagggtcggtganctgcctgtattgcccgtgcaga

SEQ ID NO: 2734 - DNA, 605 bp, Homo sapiens
  misc_feature (141)..(141): "n" may be a, t, c, g, other or unknown
  misc_feature (167)..(167): "n" may be a, t, c, g, other or unknown
  misc_feature (281)..(281): "n" may be a, t, c, g, other or unknown
  misc_feature (379)..(379): "n" may be a, t, c, g, other or unknown
  misc_feature (413)..(413): "n" may be a, t, c, g, other or unknown
  misc_feature (415)..(415): "n" may be a, t, c, g, other or unknown
  misc_feature (517)..(517): "n" may be a, t, c, g, other or unknown
  misc_feature (541)..(541): "n" may be a, t, c, g, other or unknown
  misc_feature (558)..(558): "n" may be a, t, c, g, other or unknown
  misc_feature (588)..(588): "n" may be a, t, c, g, other or unknown
  misc_feature (594)..(594): "n" may be a, t, c, g, other or unknown
atcagtgggccagagctcgccgggtggccgcaagtacgccggcccagcccgcagcgcgcccagccggaaggcggggaatccggctgacaccgcgccccgggttcccaggccacctcctctgttctgaggctgggctggganaccgtggggctgtgaggagcgcatanaaccgtggtggagggcgaggctgggccaccggttcttcaagctcggaatggagggggaagagcgcagagggctggctgggaggaactcgggtgggcgtgaaggagacgagggcnagaaaagaaacttcccttcttccaggaagggtcttcgaaaccctctccccacagcccctctcgtcattagcatggcaatgaggagtttctgtaattcnacttggaggggcggatgatcccttggaaactcananctcgccggaaaagccgggggcggccgggctcttcttccccaccttccctctctcgtcgctctccgcccctttctctttcccactcagttttgcaccgggganccctccgggatgcggaactactcnaccgcccgaatttttangggttaggaagcggggggaaaaaaataacnctggcngacttgcccac

SEQ ID NO: 2735 - DNA, 738 bp, Homo sapiens
  misc_feature (344)..(344): "n" may be a, t, c, g, other or unknown
  misc_feature (373)..(373): "n" may be a, t, c, g, other or unknown
  misc_feature (507)..(507): "n" may be a, t, c, g, other or unknown
  misc_feature (534)..(534): "n" may be a, t, c, g, other or unknown
  misc_feature (555)..(555): "n" may be a, t, c, g, other or unknown
  misc_feature (582)..(582): "n" may be a, t, c, g, other or unknown
  misc_feature (641)..(641): "n" may be a, t, c, g, other or unknown
  misc_feature (649)..(649): "n" may be a, t, c, g, other or unknown
  misc_feature (671)..(671): "n" may be a, t, c, g, other or unknown
  misc_feature (697)..(697): "n" may be a, t, c, g, other or unknown
  misc_feature (704)..(704): "n" may be a, t, c, g, other or unknown
aatagaaaacgatccagatcagagagtgacagtgagaaagttcagccacttccaatttctaccattatccgaggcccaacactgggggcatctgctcctgtgacagtgaaacgggagagcaaaatttctcttcaacctatagcaactgttcccaatggaggcacaacacctaaaatcagcaaaactgtacttttatctactaaaagcatgaaaaagggtcatgaacatggatccaagaaatctcactctaaaaccaagccaggtattcttaaaaaagacaaagcagtaaaggaaaagattcctagtcatcattttatgccaggaagtcctaccaagactgtgtncaaaaaaccccaggaaaagaaagggtgtnaatgtgggcgtgctactcaaaatccaagtgttcttacatgccgaggccaacgctgcccttgctactctaaccgcaaagcctgcttagattgtatatgtcgtggctgccaaaactcctatatggccaatgggganaaaaactggaggcatttgccgtgccanaaaaggcttggagcagaccangctcactttgggcattaacgtgactancattgctgtgcgtaacgctagtaccagcaccagtgtaataaatgtcacagggtccccantaacgacntttttagctgccagtacacatnatgataaaaatttggatgaaactatnacatganatccactgtttaaatccgtgggtcttttaaaacc

SEQ ID NO: 2736 - DNA, 622 bp, Homo sapiens
  misc_feature (246)..(246): "n" may be a, t, c, g, other or unknown
  misc_feature (428)..(428): "n" may be a, t, c, g, other or unknown
  misc_feature (439)..(439): "n" may be a, t, c, g, other or unknown
  misc_feature (501)..(501): "n" may be a, t, c, g, other or unknown
  misc_feature (506)..(506): "n" may be a, t, c, g, other or unknown
  misc_feature (530)..(530): "n" may be a, t, c, g, other or unknown
  misc_feature (540)..(540): "n" may be a, t, c, g, other or unknown
  misc_feature (603)..(603): "n" may be a, t, c, g, other or unknown
  misc_feature (605)..(605): "n" may be a, t, c, g, other or unknown
  misc_feature (616)..(616): "n" may be a, t, c, g, other or unknown
gtcacttttgaagaatggtgggacagtagatggtggcagttgatttttcattttctaactttgcagaataaaaattgaatgatcctgtattggtcccccaagtatttcagagctcccggagtctgggaagtgccatggtaaatagtcacacaggccagatgagagactgaggtgtgcatgttctgtgggaggggaagtgtagcctgcgggtgtggaatggtctgggtggccgtgggaaacgtgganagagccctggaaacagccccgctttgtgccagtgaggagtcggggaagcagctggggagacggggctggagagcctggggagaggggaagctcttctggagggagtgggtgcaccggcgcactgcgcagcctcctagtaaagggcctgcagacccagctggcctcatgcctggaggccttangcgactctgangaaggcagttccagaacagtgagtcaggaccagatgcagtgggttgcaagtagaaccaggancaganactggatgtggtgtattgtttcanaaccttccancgtgagtactaccatatggataccttagcgtgggaagcgcccaggccacccccggtccgggtnanaaaaagcccanaactca

SEQ ID NO: 2737 - DNA, 661 bp, Homo sapiens
  misc_feature (6)..(6): "n" may be a, t, c, g, other or unknown
  misc_feature (34)..(34): "n" may be a, t, c, g, other or unknown
  misc_feature (72)..(72): "n" may be a, t, c, g, other or unknown
  misc_feature (495)..(495): "n" may be a, t, c, g, other or unknown
  misc_feature (522)..(522): "n" may be a, t, c, g, other or unknown
  misc_feature (600)..(600): "n" may be a, t, c, g, other or unknown
  misc_feature (611)..(611): "n" may be a, t, c, g, other or unknown
  misc_feature (625)..(625): "n" may be a, t, c, g, other or unknown
  misc_feature (640)..(640): "n" may be a, t, c, g, other or unknown
  misc_feature (651)..(651): "n" may be a, t, c, g, other or unknown
accgancaggaatccgtatctgggaacaggtganagatgatgtgtgctgggccttggaggaagggggccganaccgggccttacttctgtaacgatactgtgaggcatcggaaggccagcctgttgtgtccgttttgaaggtcggtgggctagactggctggccttctaggggtgtggagacttcccaactctgcccttgtgctttcctggaatccccaatatgcccggaccccggtttactcctttgctgcgagcccttctctcccgtccagagttgctccgagcctatctgctcagtcctagcgattcctgtggggcttgggacgcgcggttcaagcaccccggaccatatggatgcagcacccatgggttctcgctccaatgcttctttcctccttggggcgtaactcagaccctgggcacccctctccactgcccaggggagacctgggttctagatttggctctgcctctactatcttcctacctcctanaacctcagtttggcttgtgtaaaatangatgacttaagggtcctttcagcccctaatcctggggtactttactctgtaccgcctccttacccagccttgtgcacnccatcttgaangcactgaattctancctgtttattgtaantggtgattaanttgggtctca

SEQ ID NO: 2738 - DNA, 715 bp, Homo sapiens
  misc_feature (80)..(80): "n" may be a, t, c, g, other or unknown
  misc_feature (512)..(512): "n" may be a, t, c, g, other or unknown
  misc_feature (591)..(591): "n" may be a, t, c, g, other or unknown
  misc_feature (598)..(598): "n" may be a, t, c, g, other or unknown
  misc_feature (668)..(668): "n" may be a, t, c, g, other or unknown
  misc_feature (682)..(682): "n" may be a, t, c, g, other or unknown
  misc_feature (706)..(706): "n" may be a, t, c, g, other or unknown
  misc_feature (709)..(709): "n" may be a, t, c, g, other or unknown
  misc_feature (714)..(714): "n" may be a, t, c, g, other or unknown
attggacattatctcaagatgaatatcacggtaccagagggattacatcaacgggtttattcgggccaacaataccttcnctctatcagctagtttttgatcccatcaaaaggaaacttattcctctgaacgcctatgaagatgatgttgatcctgaaacactaagctacgctgggcagtatcctttctgaaacagaatggtagaatttgtgcatttttcttcaatatttttatggtgatttttttgtgaggcatttagtaaaaagcttgcacattattttttgctctcttttttatagtgaaatctgtatattgttcatttaaattaccatgctagtgaaaattgagaacaactttttgtttataaacccgaggctcatccactatgcatcctgattacttagattgactgacagaagcatgcacagggtccgtcacttacggtacacattccaaaggtggctcttgagaggacctcctcgtggcaagcaagctcgacttatcaggaagancattctgggcatttgagtgcatcaggagaagatgcccttcccatagccactggccatgttcatgcaggctgatgcaganccctgantcacttaagtggtggctaagactttcccctctgtttcccttaagggaaggaatcagtgatgggcctgggnccttgtcaaaaaanaccaactcctgcggaagacagatnganactanc

SEQ ID NO: 2739 - DNA, 755 bp, Homo sapiens
  misc_feature (553)..(553): "n" may be a, t, c, g, other or unknown
  misc_feature (570)..(570): "n" may be a, t, c, g, other or unknown
  misc_feature (595)..(595): "n" may be a, t, c, g, other or unknown
  misc_feature (659)..(659): "n" may be a, t, c, g, other or unknown
  misc_feature (677)..(677): "n" may be a, t, c, g, other or unknown
  misc_feature (693)..(693): "n" may be a, t, c, g, other or unknown
  misc_feature (701)..(701): "n" may be a, t, c, g, other or unknown
  misc_feature (733)..(733): "n" may be a, t, c, g, other or unknown
atagggaaaatattgccagcgttttcagtcattctgtgcatgctgctttaagcaagagatttatatttgttgagaggaaatattgctacttcctgcacttccaccctctgcagccggcaccgtccctactgttgccattaattggagctgtccttaagatggtcaccatattcttattcaggctgttgtcattttccccagagatggtttgtttaacgaatgataggctctgtgcctggggatgttagcagactctggggtttgtacagtgatgccttctccctggcccagagctgaatattcatctagaattaaagttggatttgatataacaaatttctttctatacaggttttacataagagagacagtaataatgtcaaggatagcctgtgtgggcagaaattggtagtcgtgcttttgaatgtcagctgtagagccaactctgattatctagccattgatcatacaaattgatagaaacattagtcagtaattttagcttcttgccaaattgttcacaacatctaaatgtaatggtgatgtgatgaanataagtagtacaaaganaccaaaataatttggggagaattangaatgatgacaattttttttaacaacttacctctaataaggttacttgggatgaaccaactcancttccttcccatggatangaaaggactctgtgtnttattccngtttattggcacaaaaatacttgtttttaaanttccctgaaaaacccttgatgg

SEQ ID NO: 2740 - DNA, 804 bp, Homo sapiens
  misc_feature (433)..(433): "n" may be a, t, c, g, other or unknown
  misc_feature (445)..(445): "n" may be a, t, c, g, other or unknown
  misc_feature (639)..(639): "n" may be a, t, c, g, other or unknown
  misc_feature (647)..(647): "n" may be a, t, c, g, other or unknown
  misc_feature (663)..(663): "n" may be a, t, c, g, other or unknown
  misc_feature (714)..(714): "n" may be a, t, c, g, other or unknown
  misc_feature (717)..(717): "n" may be a, t, c, g, other or unknown
  misc_feature (775)..(775): "n" may be a, t, c, g, other or unknown
  misc_feature (783)..(784): "n" may be a, t, c, g, other or unknown
attcttgcatagcagtgtgaaaatggtgcatggaaatatcactcctgaaaatataattttgaataagagtggagcctggaaaataatgggttttgatttttgtgtatcatcaaccaatccttctgaacaagagcctaaatttccttgtaaagaatgggacccaaatttaccttcattgtgtcttccaaatcctgaatatttggctcctgaatacatactttctgtgagctgtgaaacagccagtgatatgtattctttaggaactgttatgtatgctgtatttaataaagggaaacctatatttgaagtcaacaagcaagatatttacaagagtttcagtaggcagttggatcagttgagtcgtttaggatctagttcacttacaaatatacctgaggaagttcgtgaacatgtaaagctactgttaaatgtnactccgactgtnagaccagacgcagatcaaatgacaaagattcccttctttgatgatgttggtgcagtaacactgcaatattttgataccttattccaaagagataatcttcagaaatcacagtttttcaaaggactgctaaaggttctaccaaaactgcccaagcgtgtcattgtgccagaaaattttgccttgtttgacttcanaatttgtnaaccctgacatggtancttttgttttgcccaatgttctacttattggctgaaggaatgcccccaaanaanaatatgtctaatttaattccttcctgaactttgggccccgtgttttaagccccaggancccatccnnaatttggtttatttttccca

SEQ ID NO: 2741 - DNA, 652 bp, Homo sapiens
  misc_feature (53)..(53): "n" may be a, t, c, g, other or unknown
  misc_feature (124)..(124): "n" may be a, t, c, g, other or unknown
  misc_feature (234)..(234): "n" may be a, t, c, g, other or unknown
  misc_feature (315)..(315): "n" may be a, t, c, g, other or unknown
  misc_feature (357)..(357): "n" may be a, t, c, g, other or unknown
  misc_feature (454)..(454): "n" may be a, t, c, g, other or unknown
  misc_feature (481)..(481): "n" may be a, t, c, g, other or unknown
  misc_feature (501)..(501): "n" may be a, t, c, g, other or unknown
  misc_feature (519)..(519): "n" may be a, t, c, g, other or unknown
  misc_feature (523)..(523): "n" may be a, t, c, g, other or unknown
  misc_feature (604)..(604): "n" may be a, t, c, g, other or unknown
  misc_feature (619)..(619): "n" may be a, t, c, g, other or unknown
  misc_feature (623)..(623): "n" may be a, t, c, g, other or unknown
  misc_feature (632)..(632): "n" may be a, t, c, g, other or unknown
  misc_feature (638)..(638): "n" may be a, t, c, g, other or unknown
ttctatgtaagagcaagcgagttccacagcgcggggaggccagtggagaggancgcggccttgcctggctcatgtcctgtttccagcttgccctgaaaacgaattactaaatccatggaggaanagcttggggcctgcctggtcctcggccacggtggggctggggcctgtgactgcgtgtgcagagggtccgcgcccagggcccgggaaaggggctgcgctgccccgagcgantccccgggcgcccccagcctgctgcagccacctcgggctccacatttcggccccttctcctctccgctgctctgggctcanccaccaagctccacgctgtgggcagaatccactggggcgcangaaacctcagcttccgcagcccacctggccttcgcagtcttcctctccagggttttatttcaacatggccttttctgctgcgactcaactgtggtangggccaagtttgggtgtgtgaagccanggaagtgcgttgtgttctcncggaaaaaaaaaacgcancganggacccgggcacacggaccagctcaccaaccgcagccaaaccaccaattctgtcccgtggcccttgggtgaacggtgacanggaaggaaagaaacntggncagcttccnccagancacaggcgaaaaca

SEQ ID NO: 2742 - DNA, 610 bp, Homo sapiens
  misc_feature (71)..(71): "n" may be a, t, c, g, other or unknown
  misc_feature (285)..(285): "n" may be a, t, c, g, other or unknown
  misc_feature (391)..(391): "n" may be a, t, c, g, other or unknown
  misc_feature (406)..(406): "n" may be a, t, c, g, other or unknown
  misc_feature (408)..(408): "n" may be a, t, c, g, other or unknown
  misc_feature (449)..(449): "n" may be a, t, c, g, other or unknown
  misc_feature (544)..(544): "n" may be a, t, c, g, other or unknown
  misc_feature (564)..(564): "n" may be a, t, c, g, other or unknown
  misc_feature (566)..(566): "n" may be a, t, c, g, other or unknown
  misc_feature (580)..(580): "n" may be a, t, c, g, other or unknown
  misc_feature (606)..(606): "n" may be a, t, c, g, other or unknown
tccggtgctcagtggctagccgaatagccgtgtttgggacctgggctcgggcttcttgcgtccctgctaanaacatgtcacggggccgaatcgtccgtattctctcagcttcaagctcctctacttttcaaccaggtcactagcccttgactcctcttatcaaacttccggaactgccaccccaccagtgactccacaggcaccagggcatgcaacagggctgggacaggaaggctctcttcttcacctcaagcctgctgggctaacacttgcgatttttactanagttaactttgtaatgtatgtctctgactctagaatttcaagagaagttccacttagtgactcctaagtggaagttctaagatggcttcccagtgaggtgatgaanaagtttgagctttanantgcagttgcaaagctcttctctgacctgaacaatggctgtngctgtggaccaacaaatccagactccttcagtacaagatctccaaatagttaaactggaagaagattcccactgggagcaggaaatttcccttcnagggaattaccctggaccananacatcctgccagancttttggcatttccgttaccaagaancatc

SEQ ID NO: 2743 - DNA, 857 bp, Homo sapiens
  misc_feature (463)..(463): "n" may be a, t, c, g, other or unknown
  misc_feature (497)..(497): "n" may be a, t, c, g, other or unknown
  misc_feature (507)..(507): "n" may be a, t, c, g, other or unknown
  misc_feature (532)..(532): "n" may be a, t, c, g, other or unknown
  misc_feature (544)..(544): "n" may be a, t, c, g, other or unknown
  misc_feature (637)..(637): "n" may be a, t, c, g, other or unknown
  misc_feature (659)..(659): "n" may be a, t, c, g, other or unknown
  misc_feature (665)..(665): "n" may be a, t, c, g, other or unknown
  misc_feature (796)..(796): "n" may be a, t, c, g, other or unknown
  misc_feature (826)..(826): "n" may be a, t, c, g, other or unknown
  misc_feature (830)..(832): "n" may be a, t, c, g, other or unknown
acacgcagctagccggagcccggaccaggcgcctgtgcctcctcctcgtccctcgccgcgtccgcgaagcctggagccggcgggagccccgcgctcgccatgtcgggcgagctcagcaacaggttccaaggagggaaggcgttcggcttgctcaaagcccggcaggagaggaggctggccgagatcaaccgggagcttctgtgtgaccagaagtacagtgatgaagagaaccttccagaaaagctcacagccttcaaagagaagtacatggagtttgacctgaacaatgaaggcgagattgacctgatgtctttaaagaggatgatggagaagcttggtgtccccaagacccacctggagatgaagaagatgatctcacaggtgacaggaggggtcagtgacactatatcctaccgagactttgttgaacatgatgctggggaaacggtcggctgtcctcaanttagtcatgatgtttgaagggaaaagccaacganagcagccccnagccagttggcccccctccagaganaaacattgctancctgccctgaggacccgcctggactccccagccttcccaccccatacctccctcccgatcttgctgccttcttgacacactggtgatctctcnctctctcattttgttttggtcnttgaanggttttgtttgtgttttccctcaatgtcttttgttaaagccccaaatttatctgcctttaaaaggggctctgggttccggggaatcctgaaccttggggttccctcctctcttcttccctccttcccccgntccctgtttcaaaaagggctgaatttccancccnnnaacctttaaaagggggcagggcccc

SEQ ID NO: 2744 - DNA, 586 bp, Homo sapiens
  misc_feature (47)..(47): "n" may be a, t, c, g, other or unknown
  misc_feature (183)..(183): "n" may be a, t, c, g, other or unknown
  misc_feature (296)..(296): "n" may be a, t, c, g, other or unknown
  misc_feature (320)..(320): "n" may be a, t, c, g, other or unknown
  misc_feature (447)..(447): "n" may be a, t, c, g, other or unknown
  misc_feature (454)..(454): "n" may be a, t, c, g, other or unknown
  misc_feature (489)..(489): "n" may be a, t, c, g, other or unknown
  misc_feature (504)..(504): "n" may be a, t, c, g, other or unknown
  misc_feature (530)..(530): "n" may be a, t, c, g, other or unknown
  misc_feature (547)..(547): "n" may be a, t, c, g, other or unknown
  misc_feature (562)..(562): "n" may be a, t, c, g, other or unknown
gtgtgaggggctcttcacgtggggaaggaacagcaggcgcggagganggggcaagcgtgtgtgagattcagtggtccatgcgtgcgtttgtcgtgtaagggtcattcctggggtttggagtgggggaacaaatcaatgtggctgtttttccgtggaaagaattcccactgcagtgtcccggancctgcgtgtggtgggcaagctcctcaaatggtatctcacagggaataggggagtcttgaaaacgcagcttcggcagtaggaacatgaacctcttacctaaaagttccagggantttggctccgttgactattggganaagttcttccagcagcgaggaaagaaagctttcgagtggtatggaacctacctggaactgtgcggggtgctacataaatatatcaagcccagggaaaaggtgctggtgattgggtgtggcaactcanaactgantgagcaactgtatgatgtgggctatcgggatatantgaacatccacatcngtgaggttgtcatcaagcaaatgaangaatgttatgccacccnaccgccccagatgancttcttgaagatggacatgacgca

SEQ ID NO: 2745 - DNA, 633 bp, Homo sapiens
  misc_feature (160)..(160): "n" may be a, t, c, g, other or unknown
  misc_feature (297)..(297): "n" may be a, t, c, g, other or unknown
  misc_feature (318)..(318): "n" may be a, t, c, g, other or unknown
  misc_feature (336)..(336): "n" may be a, t, c, g, other or unknown
  misc_feature (369)..(369): "n" may be a, t, c, g, other or unknown
  misc_feature (430)..(430): "n" may be a, t, c, g, other or unknown
  misc_feature (445)..(445): "n" may be a, t, c, g, other or unknown
  misc_feature (453)..(453): "n" may be a, t, c, g, other or unknown
  misc_feature (508)..(508): "n" may be a, t, c, g, other or unknown
  misc_feature (605)..(605): "n" may be a, t, c, g, other or unknown
  misc_feature (615)..(615): "n" may be a, t, c, g, other or unknown
  misc_feature (621)..(622): "n" may be a, t, c, g, other or unknown
  misc_feature (633)..(633): "n" may be a, t, c, g, other or unknown
gcggcgggatgaggagcttgaggaagcaggcaggggaaatgtctgccgccgccagctctcggggagcgcaacactgcaggtggttctaactttgatggtttgagaccaaatgggaagggagtgcctatggaccaaagctccaggggtcaagataaaccanaaagcttgcaaccaagacagaataaatccaagtccgaaattactgacatggttcgctcctccactatcacagtgtcggacaaggctcatattttatccatgcagaagtttggactgcgagatacaattgtgaaatcncatctactacagaaagaagangattacacctatatccanaacttcaggttttttgcgggaacatacaatgtnaatgggcagtcccccaaagaatgcctccggctgtggctgaacaatggtatccaagccccanatgtctattgtgtanggttccangaacttgatctgagtaaggaagcttttttctttcacgatacccccaaggaagaanaatggttcaaagctgtgtcagaaggtcttcatccagatgccaaatatgccaaggtgaagcttatcccactgggttgggattatgctgctgttatatntcaacaggancatgcnncttatatctcn

SEQ ID NO: 2746 - DNA, 864 bp, Homo sapiens
  misc_feature (590)..(590): "n" may be a, t, c, g, other or unknown
  misc_feature (617)..(617): "n" may be a, t, c, g, other or unknown
  misc_feature (668)..(668): "n" may be a, t, c, g, other or unknown
  misc_feature (675)..(675): "n" may be a, t, c, g, other or unknown
  misc_feature (731)..(731): "n" may be a, t, c, g, other or unknown
  misc_feature (776)..(776): "n" may be a, t, c, g, other or unknown
  misc_feature (792)..(792): "n" may be a, t, c, g, other or unknown
  misc_feature (815)..(815): "n" may be a, t, c, g, other or unknown
  misc_feature (851)..(851): "n" may be a, t, c, g, other or unknown
  misc_feature (859)..(859): "n" may be a, t, c, g, other or unknown
gcgctccaagatggcggcgaacgtgttcccgttccgcgacgcccgtgccgcaccggacccagtgctggaggccggcccggtggcacacgggccactgccggtaccgctggtgctggacaacgggtcgttccaagtccgcgctggctgggcgtgtcccgggcaggacccaggtcccgagccgcgcctgcagttccgcgcggtgtgcgcccgcggtcgtggcggggcacggggcgcgtcgggcccgcaggtggggaacgctctgggcagcctggagccactgcgctggatgctgcgctcgcccttcgaccgcaacgtgccggtcaacctggagcttcaggagttgctgctggactacagcttccagcacctgggtgtctcctcacagggctgtgttgatcatcccatagttttgacagaagctgtgtgcaacccactgtattcacggcaaatgatgtctgagcttctttttgagtgctacgggattcccaaggttgcctatggaataaacagcctcttcagcttctaccacaataagccaaagaactcgatgtgcagtgggctaatcatttcatctggataccaatgttacncatgttttacccatcttagaaaggaanattagatgctaaaaaacttgcaagccgcatccatctttggaggaaaccaancaacttnggtttactcccagcgtctccccccagcttaaaattacccctggggcacctgggcangccatcacccctccagcccgccatgggaagaaaaattctgccttnaaacacaaaccttccntccccttaaaagaattaatgttnggaaaaaaatttacccccaaattggcgggtgttccntgaatttnttaat

SEQ ID NO: 2747 - DNA, 553 bp, Homo sapiens
  misc_feature (126)..(126): "n" may be a, t, c, g, other or unknown
  misc_feature (434)..(434): "n" may be a, t, c, g, other or unknown
  misc_feature (458)..(458): "n" may be a, t, c, g, other or unknown
  misc_feature (487)..(488): "n" may be a, t, c, g, other or unknown
  misc_feature (514)..(514): "n" may be a, t, c, g, other or unknown
  misc_feature (539)..(539): "n" may be a, t, c, g, other or unknown
agttggcgcccatggagccagagctgctggttcggaaggtgtctgcattgcaggcctgcgtccggggcttcttggtccgacgccagttccagagcctgcgagctgagtatgaggcgattgtacganaggtcgagggcgacctgggcacgcttcagtggaccgagggccgcattcccaggccgcgattcctcccagagaaggcaaaatcccatcagacctggaaagcaggagacagggtagcaaatccagagcaggggctgtggaaccacttcccatgtgaagagtctgagggagaggccacctgggaggagatggtgctgaagaagtcaggagagagctcagcaaatcaaggaagcctctgcagagatcacagctcctggcttcagatgaagcagaacaggaaacccagccaagagaagaccagagacacgacnaggatggaaaatccagaagccacngatcaaagactgccccacagccaacctcnncttcaagagcttcagtaccaccggcngccacttggccatggaattgctgtnggctgcgaccggcc

SEQ ID NO: 2748 - DNA, 685 bp, Homo sapiens
  misc_feature (647)..(647): "n" may be a, t, c, g, other or unknown
  misc_feature (651)..(651): "n" may be a, t, c, g, other or unknown
  misc_feature (654)..(654): "n" may be a, t, c, g, other or unknown
  misc_feature (669)..(669): "n" may be a, t, c, g, other or unknown
  misc_feature (676)..(676): "n" may be a, t, c, g, other or unknown
aaatgaaaaaacatgaaaggacttagcataatgttattttatcttttctacaactttgtttaaattacctttccaaagatatttgtgtttatgtaattttccacggaataacattaatactctaggtttataaaccggtttcacattatttcatttgatcatcacaagagctttgtgaagtaagccgagaagttgttactggtatttaataatagcaatagaggagttaaagactttcccacagcttgcaggtcaagacaagaaattcaggtctcctaattctcagtggagctctatttctgttaacccaaattgctgctctgttttaggtctcaatttcatctgtaaaatgatactaatagtacttatcccattggatttttgttgagatttaaataaatagccaaaagccaatacataataaacactcaataaagattaaccataaggagagtcatgatctggttccaggaatacattgttagatgactgaaaaattgtattacttcaatgaaaatactataaataataacattttcatatattagttggttctcatgcatacataatctaattttatttgatcctcacaactgtttaagttttattaaatatacattatccctgtttggtttaaattagaaacntacnatncctggcctgctttcnttccacnaaaattatc

SEQ ID NO: 2749 - DNA, 556 bp, Homo sapiens
  misc_feature (490)..(490): "n" may be a, t, c, g, other or unknown
  misc_feature (495)..(495): "n" may be a, t, c, g, other or unknown
  misc_feature (515)..(515): "n" may be a, t, c, g, other or unknown
  misc_feature (522)..(522): "n" may be a, t, c, g, other or unknown
  misc_feature (548)..(548): "n" may be a, t, c, g, other or unknown
atgtagtaattttgcctggatggttttggatataatagccaattcatcacttgtgatttgatgactcttagggtctctagtttttcttaacagcctccaaattgaagtttcagaatccttactgcaaaaagcacaaaagttttcattgccattttgatagtgatatgtagctcgtaaataataattcttacctctgtgttagataaaacatccagtaaaacagcatcaagtttagctttgatagaagggaacaattagagttggtgtagagacagaccagttaggatgagggcatgaaatacagcagaagcagtaggaagagaagagagactgaggatcttgaattagggtctagatgaaaatttaggatgattcctacgtttgggaatggagggagagcttaaacaagatagagaatatagacacagattttggaggaaatgattttctcaagggactgctgagtccaaggaatgtttacaaatcctcnagaantactccaggctatttgtaanatctgangctcataggccttttctggctctcangatttaaa

SEQ ID NO: 2750 - DNA, 747 bp, Homo sapiens
  misc_feature (387)..(387): "n" may be a, t, c, g, other or unknown
  misc_feature (403)..(403): "n" may be a, t, c, g, other or unknown
  misc_feature (552)..(552): "n" may be a, t, c, g, other or unknown
  misc_feature (564)..(564): "n" may be a, t, c, g, other or unknown
  misc_feature (567)..(567): "n" may be a, t, c, g, other or unknown
  misc_feature (612)..(612): "n" may be a, t, c, g, other or unknown
  misc_feature (694)..(695): "n" may be a, t, c, g, other or unknown
  misc_feature (722)..(722): "n" may be a, t, c, g, other or unknown
  misc_feature (731)..(731): "n" may be a, t, c, g, other or unknown
  misc_feature (738)..(738): "n" may be a, t, c, g, other or unknown
tatgttaaagtctgggacatgttaaaaggaggacaattgctagtatctttgaaaaatcatcacaaaaccgtgacatgtttatgtctaagcagctctggacagaggttactttctggctcactggataggaaggtgaaagtatacagcacaacttcctacaaagtagtccacagttttgattatgcagcttcaattttgagtcttgcccttgcacatgaagatgagacaatagttgtaggaatgaccaatggaatactgagtgttaaacatcggaaatctgaagcaaagaaggaatcacttcccagaagaagaaggcctgcatatcgaacctttattaaaggaaaaaattacatgaagcaacgggatgacattttgattaacaggccngcaaagaagcacctanaattgtatgacagggatctgaaacattttcggatctctaaggcactcgatagaattcttggtcccacttgtacaataaagacacccgagattacggtgtccatcataaaggagttaaatcgaaaaagatccttgcaaatgcgcttgcangtcggggatganaangaaatcagtcatgttcttaattttttgataaggaatctttctcanccaagatttgctcctgttttaatcaatgctgctgaaataattattgatatatatctgcctgttattggtcagtcccctgttnnttgataaaaaatttttactacttccangacttgttnaaaaaanaaattgatt

SEQ ID NO: 2751 - DNA, 570 bp, Homo sapiens
  misc_feature (546)..(546): "n" may be a, t, c, g, other or unknown
  misc_feature (551)..(551): "n" may be a, t, c, g, other or unknown
  misc_feature (555)..(555): "n" may be a, t, c, g, other or unknown
gtagatgcgatggcgccgattccaaagactgtggggcggatcaagctagactgctctctacggcccagctgcccactggaggtcgctgctgcacccaaactttgcaaggaattcggtccagaggattacggcgaagaggacatagtggattttcttcgacggcttgtggagagtgatccccagggcctgcaccggatccatgtggatgggagcagcgggcggctgcagctgtggcaccatgattacctcctgggccacttggatgatgaagggaaatcaactggacagagtgacaggggcaagggggctgagggactgggcacctactgtggtctccgcaagtccttcctgtatcctccccaagagtctgagccctgccctcaaagcccctctgcctctgccaccttccccagtgtctcagacagcctgcctcaggtggccatgccccagaactcctggtgacagaagaggaagccaatcgcctggctgaagaactggtggctgaggaggagcgcatgaaacagaaagcagaaaaaaagcgactcnagaanaacntccaaaggaacggaa

SEQ ID NO: 2752 - DNA, 614 bp, Homo sapiens
  misc_feature (405)..(405): "n" may be a, t, c, g, other or unknown
  misc_feature (519)..(519): "n" may be a, t, c, g, other or unknown
  misc_feature (535)..(535): "n" may be a, t, c, g, other or unknown
  misc_feature (582)..(582): "n" may be a, t, c, g, other or unknown
  misc_feature (593)..(593): "n" may be a, t, c, g, other or unknown
  misc_feature (612)..(612): "n" may be a, t, c, g, other or unknown
tttaaaatgataaacctgggtcagaggatatttaggaagaggcattgtcattaagtccaagacaagatggtcagatttgttatcctagtgggttacaatccaaaatactctggagcatgctgagattaaggtggttgccaagggaacagaaaacagccatgagtaaataaatcaagactttaaaggatttagatcgggtctatggccagttgcagagtgggcaggatcttaagacccgataggtgcagaacccatctggacacggagaccaggaatggagttccatggaggcctggctggcactgcacccgggcatgaggacacatccagtaagaagacctgcctcaagaggtgcactgcggtgaccagtggaggtgactggttggagcctggaattggaagcanattccaagctctggtggacaaactctccaggcctggtgggaatcacagctggggcagacctcatcctggctgcctggccacaggcccccactctctgccactggtggtaggacnatgcctgtgtggaaanctggcttctctgctcccgcctggtccaccacttggctagaagttcanaaacaggaaantgattggtctaagcttacnca

SEQ ID NO: 2753 - DNA, 592 bp, Homo sapiens
  misc_feature (1)..(1): "n" may be a, t, c, g, other or unknown
  misc_feature (40)..(40): "n" may be a, t, c, g, other or unknown
  misc_feature (152)..(152): "n" may be a, t, c, g, other or unknown
  misc_feature (280)..(280): "n" may be a, t, c, g, other or unknown
  misc_feature (296)..(296): "n" may be a, t, c, g, other or unknown
  misc_feature (345)..(345): "n" may be a, t, c, g, other or unknown
  misc_feature (349)..(349): "n" may be a, t, c, g, other or unknown
  misc_feature (455)..(455): "n" may be a, t, c, g, other or unknown
  misc_feature (463)..(463): "n" may be a, t, c, g, other or unknown
  misc_feature (496)..(496): "n" may be a, t, c, g, other or unknown
  misc_feature (498)..(498): "n" may be a, t, c, g, other or unknown
  misc_feature (515)..(515): "n" may be a, t, c, g, other or unknown
  misc_feature (555)..(555): "n" may be a, t, c, g, other or unknown
  misc_feature (587)..(587): "n" may be a, t, c, g, other or unknown
naaaaaaaaaaaaaaaaaaaaaaaaaaaaggtttttgaanatggcggccctcaaggctctggtgtccggctgtgggcggcttctccgtgggctactagcgggcccggcagcgaccagctggtctcggcttccagctcgcgggttcagggaantggtggaaacccaagaagggaaaacaactataattgaaggccgtatcacagcgactcccaaggaaagtccaaatcctcctaacccctctggccagtgccccatctgccgttggaacctgaagcacaantataactatgacaatnttctgctgcttagccagttcatccggcctcatggaggcatgctgccccnaaanatcacaggcctatgccaggaaaaacaccgcaagatcgaggagtgtgtgaaaatggcccaccgagcaggtctattaccaaatcacaggcctcggcttcctgaaaganttgttccnaaaaacaaaccccaactcaaccggtacctgacncnctgggctcctggctccntcaagcccatctacaaaaaaagcccccctggaacaaggtncccattcccctggggtcccccttctgaagganaattt

SEQ ID NO: 2754 - DNA, 631 bp, Homo sapiens
  misc_feature (2)..(2): "n" may be a, t, c, g, other or unknown
  misc_feature (589)..(589): "n" may be a, t, c, g, other or unknown
  misc_feature (605)..(605): "n" may be a, t, c, g, other or unknown
  misc_feature (619)..(619): "n" may be a, t, c, g, other or unknown
  misc_feature (625)..(625): "n" may be a, t, c, g, other or unknown
  misc_feature (627)..(627): "n" may be a, t, c, g, other or unknown
gnaaatctgtacgaactattcaggctgcttttagaggcatgaaagttagacaaaaattgaaaaatgtatcagaggaaaagatggcagccattgttaaccaatctgcactctgctgttacagaagcaaaactcagtatgaagctgttcaaagtgaaggtgttatgattcaagagtggtataaagcttctggccttgcttgttcacaggaagcagagtatcattctcaaagtagggctgcagtaacaattcaaaaagctttttgtagaatggtcacaagaaaactggaaacacagaaatgtgctgccctacggattcagttcttccttcagatggctgtgtatcggagaagatttgttcagcagaaaagagctgctatcactttacagcattattttaggacgtggcaaaccagaaaacagtttttactatatagaaaagcagcagtggttttacaaaatcactacagagcatttctgtctgcaaaacatcaaagacaagtctatttacagatcagaagcagtgttatcattattcaagctagaagtaaaggatttatacagaaacggaagtttcaggaaattaaaaatancaccataaaaattcangctatgtggagganatatananccca

SEQ ID NO: 2755 - DNA, 751 bp, Homo sapiens
  misc_feature (544)..(544): "n" may be a, t, c, g, other or unknown
  misc_feature (587)..(587): "n" may be a, t, c, g, other or unknown
  misc_feature (608)..(608): "n" may be a, t, c, g, other or unknown
  misc_feature (621)..(621): "n" may be a, t, c, g, other or unknown
  misc_feature (664)..(664): "n" may be a, t, c, g, other or unknown
  misc_feature (698)..(698): "n" may be a, t, c, g, other or unknown
  misc_feature (730)..(730): "n" may be a, t, c, g, other or unknown
  misc_feature (733)..(733): "n" may be a, t, c, g, other or unknown
  misc_feature (749)..(749): "n" may be a, t, c, g, other or unknown
atataaactcgacagcgagggcaccccctgcgagtataaaacccccttcaggaggaacaccacgtggcaccgggtgcccactcctgccctgcagcccctctctagagcttcccccatccccggcacgcccgaccggctgccgtgccaacagctgctccagcaggcccaggctgccattcctcgaagcacctccttcgaccggaagctgcccgatggcacgagaagctcacccagcaaccagtcatcctccagcgaccctggacccggcgggagcggaccctggagaccacaagtgggctacgacgggtgccagtcccctctactgctcgaacaccagggctcaggccctttggaatgtgacggagccaggggagagggaagacaccatggaagcaagcaggcacccggaaaccaaatggcatggcccaccttccaaagtcctgggttcctataaagaaagagctctgcagaaagatggaagttgcaaagattcccccaataagctttctcacattggggataaaagttgctccagtcactccancagcaacacgctctccagcaacacctccagcaacagtgaccanaagcactttgggtctgggganctgatggaacccnaattactgggggtgaactacatccaaaggggctccaccgaaantgggatccaaaccggccccctgcattgcttgccncatcctccggcctgttcaccttggcaaggcancanggcccctgattcccancc

SEQ ID NO: 2756 - DNA, 608 bp, Homo sapiens
  misc_feature (542)..(542): "n" may be a, t, c, g, other or unknown
  misc_feature (578)..(578): "n" may be a, t, c, g, other or unknown
  misc_feature (588)..(588): "n" may be a, t, c, g, other or unknown
  misc_feature (591)..(591): "n" may be a, t, c, g, other or unknown
  misc_feature (600)..(600): "n" may be a, t, c, g, other or unknown
gtatcccgtgctgtttccctggcagacacacaggcgctcacgagtctctccttgccagcctgcagggcggcgacccccaaaacccagccccgggtcccaacctaggcaagaagctgcttctctgccaacagctcctcttcggcctccgtcacagccacctggaccctaccctttcgcgactgctgctgctgctgcccggacgtggaagcagcaagaggcgcttggtcaagacacactgacggtacctacagaatactggacatacggattcagaatccataaggctttatcaccttgaatcaaggatttatttgatatcatcctcggtctttacttcctatcaagtaacattgttttgaaaaatagagttaacacatttgccataagggagttttttttttttttttttaaatacttcgcatactctccaatgcccaaaaatagcaaggtggtaaaaagagaattagatgatgatgttactgagtctgtcaaagaccttctttccaatgaagacgcagctgatgatgcttttaagacaagtnaactaattgttgatggccaggaaagaaaaagatacngatgttgaanaangatctgaantccaaaat

SEQ ID NO: 2757 - DNA, 773 bp, Homo sapiens
  misc_feature (56)..(56): "n" may be a, t, c, g, other or unknown
  misc_feature (541)..(541): "n" may be a, t, c, g, other or unknown
  misc_feature (575)..(575): "n" may be a, t, c, g, other or unknown
  misc_feature (591)..(591): "n" may be a, t, c, g, other or unknown
  misc_feature (619)..(619): "n" may be a, t, c, g, other or unknown
  misc_feature (628)..(628): "n" may be a, t, c, g, other or unknown
  misc_feature (650)..(650): "n" may be a, t, c, g, other or unknown
  misc_feature (712)..(712): "n" may be a, t, c, g, other or unknown
  misc_feature (760)..(760): "n" may be a, t, c, g, other or unknown
  misc_feature (769)..(769): "n" may be a, t, c, g, other or unknown
tgaaaatgacctcgggaagggccctgagccagagtccgtcatcggttactccgganaagatttacccagtgcccctaggcgtttccgagtccggcagcccaacctggagacaatcaacctggaatgggatcatcctgagcatccaaatgggatcatgattggatacactctcaaatatgtggcctttaacgggaccaaagtaggaaagcagatagtggaaaacttctctcccaatcagaccaagttcacggtgcaaagaacggaccccgtgtcacgctaccgctttaccctcagcgccaggacgcaggtgggctctggggaagccgtcacagaggagtcaccagcacccccgaatgaggcttacaccaacaaccaagcagacatcgccacccagggctggttcattgggcttatgtgcgccatcgccctcctggtgctgatcctgctcatcgtctgtttcatcaagaggagtcgcggcggcaagtacccagtacgagaaaagaaggatgttccccttggccctgaagaccccaaggaagangatggctcatttgactatagtgatgaagacaacnagcccctgcagggcantcagacatctctggacggcaccatcaancagcagganaatgaccaaagcctggttggantatgggcgaaggtggcgaaaggttcatttcaatgaaaaagggtccttcatcggccaattacncggtccaaaaagggacaaggaagaaaacctaaaggggcaacgaaaaancttcaaaangggg

SEQ ID NO: 2758 - DNA, 697 bp, Homo sapiens
  misc_feature (620)..(620): "n" may be a, t, c, g, other or unknown
  misc_feature (637)..(637): "n" may be a, t, c, g, other or unknown
  misc_feature (660)..(660): "n" may be a, t, c, g, other or unknown
  misc_feature (677)..(677): "n" may be a, t, c, g, other or unknown
  misc_feature (689)..(689): "n" may be a, t, c, g, other or unknown
tagtattaaacattttcaaagttacttgccaacatctagaaagataccaggttttctataaaaaagaaaactggatttctggatgcttcttaaaaatcaggaagtctggcagcctgagcccacatcggctggagctgagccgcacctgcgagttgcatctgggatctccagttcaccggcccctaagctcctgagggttggcctgaccctgaggttgcctgtcaatcaccatttcttccctccactccttgtgttacctgcctggtcctgcggggttggcaacaactcaggagcccacctcgggtggttttggaggtgccgtgcacactgctgattgggaggctggacgctgccagtctgtccggagtttcctttacccctgagtagcccccagactgaactggcagcgaagtggaggccacgatgcatggttctcttgaagctttgctcttcctgccccaaatcaccctgtcccttgcccacgcccatttgatctgctcaaatgcacaactggagatgtgtgtctttccccacaggtttcttggcgatctcacaacagaaggaataaacaagccaggattttacaaagggcccagccggctcccaggttgaccctgaancagcctgggggaaccanacaccaattgcttgctgggaagnaacaaggctcggcaccntgctgaacgaancaaggaac

SEQ ID NO: 2759 - DNA, 751 bp, Homo sapiens
  misc_feature (202)..(202): "n" may be a, t, c, g, other or unknown
  misc_feature (487)..(487): "n" may be a, t, c, g, other or unknown
  misc_feature (567)..(567): "n" may be a, t, c, g, other or unknown
  misc_feature (678)..(678): "n" may be a, t, c, g, other or unknown
  misc_feature (710)..(710): "n" may be a, t, c, g, other or unknown
  misc_feature (721)..(721): "n" may be a, t, c, g, other or unknown
  misc_feature (734)..(734): "n" may be a, t, c, g, other or unknown
  misc_feature (739)..(739): "n" may be a, t, c, g, other or unknown
ggagctctaaattctctttattgtaaaagagatgtaaaggttttatattctaaatcctagtaaaattgacagtgatttttaaatataatgcatcttcctttgtctgcttagtaaaaaatttcatttcataattttggcaagctctgtagtggatccaaagtatctttgagttcttgcaaactacaagttgtttcctttccanaaggcttgatttcattaggagacccctctattgagttctaaatagtttatcttagaaagccttgggtcattcacaggtatccaaccagccattgtttagtttgtttttgaaggggtttgataatgctttttaagttgtacagaatgcttaatccatcttattactgtcctgagccatgtaatatgcctgcatcgtgttggggaaatgtttgggaaatataagccagcataacgtgtaaagctcactctttcaccctggaacagacaagaggtgggcttaatagangcagagactggggatatacctttgtttccctagcatttttatttatttatttttattttattttattttttgagatggantttcactcttgttgcccaggctgggggtgcaatgggcgccaatctttgctcactgcaacccctgccctcccggggctcaaaccgaatctcctggcctcaagcctctcgaanttacttggggaattaacaggccatgcgttcanccactcccaanctaaattttggtnttttncagtaaaaaaaa

SEQ ID NO: 2760 - DNA, 412 bp, Homo sapiens
  misc_feature (236)..(236): "n" may be a, t, c, g, other or unknown
  misc_feature (247)..(247): "n" may be a, t, c, g, other or unknown
  misc_feature (336)..(336): "n" may be a, t, c, g, other or unknown
  misc_feature (372)..(372): "n" may be a, t, c, g, other or unknown
  misc_feature (389)..(389): "n" may be a, t, c, g, other or unknown
ttgcccaatatgggtcaggagaccctcatccatctttggcatgcacgtactggcatcatgtccaagactgctgtgtaaggggaggagataaatgaggacacacgacaactattaactcccatattctgggaagtgacgtgtatcatttctactcgttggccagaaatggtcagctggccctaaggtaatgcagaaagatttggaaaattaggggagtaaatgaaatatttggaacnctttcaatccnagcagttcttaatgtttcccccactatcatgctagcccattccaccacctttgcctgaaatactgcaagtatcctaattaatcttcctnatcctaatcatgctccaatatgatctatgccttctnccattcttgctacctcnaactttttgttttccatctatca

SEQ ID NO: 2761 - DNA, 769 bp, Homo sapiens
  misc_feature (556)..(556): "n" may be a, t, c, g, other or unknown
  misc_feature (634)..(634): "n" may be a, t, c, g, other or unknown
  misc_feature (664)..(664): "n" may be a, t, c, g, other or unknown
  misc_feature (692)..(692): "n" may be a, t, c, g, other or unknown
  misc_feature (717)..(717): "n" may be a, t, c, g, other or unknown
  misc_feature (756)..(756): "n" may be a, t, c, g, other or unknown
atggtgttcaccccacttcatcagcgtacataagttatctcttcttttggacccttattttatgccataatgcaacaagctttagaactagctttggatcgtgcagagtatgtcattgaaagtgcccgacagagacctcctaaaaggaaatacctatcaagtggaagaaaatctgtatttcaaaaactttatgacttgtatattgaagaatgtgaaaaagaacctgaagttaagaaattaagaagaaatgtgaacttgttagagaagcttgttatgcaagagactttgtcatgtttagtggtcaatctatacccaggaaatgagggatattctctgatgctcaggggaaaaaacggatcagattccgagaccattcgactgccctatgaagaaggagagttgcttgaatatttggatgcagaagaattacctcctattttggttgatctcctagaaaaatctcaggttaatatttttcattgcggatgtgtcatagcagaaatacgtgactacaggcagtccagtaacatgaaatctcctggttaccaaagtcggnacattctcttacgtccaacaatgcagactttaatttgtgatgttcattcaataacaaattgataaccacaaatggganccaggaaagacaaacttttgctttgaaaanccagctcatccctagctaccagctgaancactctgtcttgatccctcctatancaagtcccctggcactggcaaaacagaactgctcttttnaccaagccaaaaa

SEQ ID NO: 2762 - DNA, 649 bp, Homo sapiens
  misc_feature (645)..(649): "n" may be a, t, c, g, other or unknown
ttcacaactttctgcctttaaatctggttcctctcttcagcttcaccaagccactgaatgcttttcagttttattaaccctcacattccccatccttctcagcaagagcctctccttatgccatcagcatgtatatacatttcctaggaaatttgatctttcttgtcattcttttttggttccaatcggccttttcctggttctcaaagctctagtttcttctaatttctggatcatcgcaagtctggccctctttgaactttaaaacataatgtctaattccaccccaattttcagcatttcttcaactaaatcgataaagctgtctccattatgagaaaggccagaataatactccgggtaagcataagaaagctggtcattttacaacttctcccgactctaggaagtaatatgatgccatttgttgagcatctacagtgtgccaagcacatggttcatctctgcaaactgctgctacattctgtaaagcaagtattatccgcattttagggattaggaacagcttcctgatctcttgccaaaagtcacagctagtgagtggtttaggcaagatacaaaccctagttagttaatccttactcagaagtgtataggactatgatacattggtctcaagctttnnnnn

SEQ ID NO: 2763 - DNA, 745 bp, Homo sapiens
  misc_feature (548)..(549): "n" may be a, t, c, g, other or unknown
  misc_feature (591)..(591): "n" may be a, t, c, g, other or unknown
  misc_feature (596)..(596): "n" may be a, t, c, g, other or unknown
  misc_feature (654)..(654): "n" may be a, t, c, g, other or unknown
  misc_feature (677)..(677): "n" may be a, t, c, g, other or unknown
  misc_feature (684)..(684): "n" may be a, t, c, g, other or unknown
  misc_feature (710)..(710): "n" may be a, t, c, g, other or unknown
  misc_feature (732)..(732): "n" may be a, t, c, g, other or unknown
caaaaaggaaattcagaagaaaatggataagaagatgaagaaagctagaaagaaagcaaaattacattctagcaaaggagaggaggaagatcctgaggttaatgttgaaatgagtctgcaagatgaaatccagcgggtgactaatataaaaacttctgccaaaatcaagtcctttgacttgattcattcacctcacggagagttaaaggctgtcttcctgctgcagaacaacctggtggaattgtattcactgaatccatccttgcctactcctcagcctgtcaggacaagcagaatcactattgggggtcatcgcagtgatgtgcggactttgtcattcagctcagacaatattgctgttctttcagctgcagctgattccattaaaatatggaacaggtctacactgcagtgtattcgcacaatgacctgtgaatatgcactttgctcattctttgtacctggtgatagacaggtagtcataggaacaaagacagggaaagctgcagctttatgacttggcttcagggaatctgctggagacaatnnatgcccatgatggagctttgtggtccatgtccctctctccanatcancgtggctttgttgacaggtggtgcaaataaatctgtccaaattctgggggattttgantttagttgaaagatgaaaaattnttccccnaaaaaaaactttctgtttaagccaanccccaactttggcacttaaatnaaaaattttctgt

SEQ ID NO: 2764 - DNA, 770 bp, Homo sapiens
  misc_feature (4)..(4): "n" may be a, t, c, g, other or unknown
  misc_feature (98)..(98): "n" may be a, t, c, g, other or unknown
  misc_feature (349)..(349): "n" may be a, t, c, g, other or unknown
  misc_feature (408)..(408): "n" may be a, t, c, g, other or unknown
  misc_feature (429)..(429): "n" may be a, t, c, g, other or unknown
  misc_feature (459)..(459): "n" may be a, t, c, g, other or unknown
  misc_feature (465)..(465): "n" may be a, t, c, g, other or unknown
  misc_feature (578)..(578): "n" may be a, t, c, g, other or unknown
  misc_feature (649)..(649): "n" may be a, t, c, g, other or unknown
  misc_feature (663)..(663): "n" may be a, t, c, g, other or unknown
  misc_feature (707)..(707): "n" may be a, t, c, g, other or unknown
  misc_feature (713)..(713): "n" may be a, t, c, g, other or unknown
  misc_feature (728)..(728): "n" may be a, t, c, g, other or unknown
  misc_feature (750)..(750): "n" may be a, t, c, g, other or unknown
  misc_feature (770)..(770): "n" may be a, t, c, g, other or unknown
ctancgatttcgcccgggacacccacttcctgcacctgcgcagcgccagcctcggttcccagcagctcttgggcctgccccgagacccaggggagcancgtcagcggcacctttggctgcctgggtgggaggctcagcatccccggcacaggggtcagcttgctggtgcccaatggagccattccccagggcaagttctacgagatgtatctactcatcaacaaggcagaaagtaccctcccgctttcagaagggacccagacagtattgagcccctcggtgacctgtggacccacaggcctcctgctgtgccgccccgtcatcctcaccatgccccactgtgccgaantcagtgcccgtgactggatctttcagctcaagacccaggcccaccagggccactgggangaggtggtgaccctggatgangagaccctgaacacaccctgctactgccanctggancccaaggcctgtcacatcctgctggaccagctgggcacctacgtgttcacgggcgaatcctattcccgctcagcagtcaagcggctccaagctggccgtcttccgccccccgncctcttgcacctcccttggaattacaagcctccggggttctactgcctgggaagaacacgccttgttagcncttgaaaggaagtnctgggaacttgggaacggactctggggcgggattactttggttnggaagnaaccccaaaaaccgncttatttttccaagggaacagnttttaccacaaaccttggcn

SEQ ID NO: 2765 - DNA, 578 bp, Homo sapiens
  misc_feature (202)..(202): "n" may be a, t, c, g, other or unknown
  misc_feature (393)..(393): "n" may be a, t, c, g, other or unknown
  misc_feature (446)..(446): "n" may be a, t, c, g, other or unknown
  misc_feature (486)..(486): "n" may be a, t, c, g, other or unknown
  misc_feature (530)..(530): "n" may be a, t, c, g, other or unknown
  misc_feature (534)..(534): "n" may be a, t, c, g, other or unknown
  misc_feature (560)..(560): "n" may be a, t, c, g, other or unknown
  misc_feature (575)..(575): "n" may be a, t, c, g, other or unknown
atgctcatactgggttttggggtgcccatgatatgtgtatatgtatatttcttttcttcatttttcaaagattatttcactttgccatagaaagaaatacaaagaacacaattgttggaaagtaataacaaagactggcaaagcgcattgtgatttttaaagcaactttgacatgaatttatgtgtttaatctttccagganccatatggcacaaagggtattatttctcttgttttgcagttgaacaagggaaggtcagctcatttccccaacatcacacagctaatgagtaactgagccagaacttgaattcaggacctctcacatccagactctaccacatcaaattccctttccccagtggctctaactttgactctgttacatcctanaacatcacctctttacccgatatgaaagacaaccttttcacatagtttagganttgactttctctgttcttaaagctgatctaacttgactanctgccttgtattacatattttctcccaaacacccctttctctangacnaatccaaaatttggcaatcttggganttagctatgtcatantcc

SEQ ID NO: 2766 - DNA, 783 bp, Homo sapiens
  misc_feature (110)..(110): "n" may be a, t, c, g, other or unknown
  misc_feature (159)..(159): "n" may be a, t, c, g, other or unknown
  misc_feature (369)..(369): "n" may be a, t, c, g, other or unknown
  misc_feature (473)..(473): "n" may be a, t, c, g, other or unknown
  misc_feature (485)..(485): "n" may be a, t, c, g, other or unknown
  misc_feature (487)..(487): "n" may be a, t, c, g, other or unknown
  misc_feature (494)..(494): "n" may be a, t, c, g, other or unknown
  misc_feature (540)..(540): "n" may be a, t, c, g, other or unknown
  misc_feature (640)..(640): "n" may be a, t, c, g, other or unknown
  misc_feature (644)..(644): "n" may be a, t, c, g, other or unknown
  misc_feature (709)..(709): "n" may be a, t, c, g, other or unknown
  misc_feature (747)..(747): "n" may be a, t, c, g, other or unknown
  misc_feature (755)..(755): "n" may be a, t, c, g, other or unknown
  misc_feature (762)..(762): "n" may be a, t, c, g, other or unknown
  misc_feature (769)..(769): "n" may be a, t, c, g, other or unknown
gtttgctgccggagcggagtctccggccggcgtccagtttgagtctaggttggagttggaaccgtggagatgcggaaggaaaccccaccccccctagtgcccccggcggnccgggagtggaatcttcccccaaatgcgcccgcctgcatggaacggcanttggaggctgcgcggtaccggtccgatggggcgcttctcctcggggcctccagcctgagtgggcgctgctgggccggctccctctggctttttaaggacccctgtgccgcccccaacgaaggcttctgctccgccggagtccaaacggaagctggagtggctgacctcacttgggttggggagagaggtattctagtggcctccgattcnggtgctgttgaattgtgggaactagatgagaatgagacacttattgtcagcaagttctgcaagtatgagcatgatgacattgtgtctacagtcagtgtcttganctctggcacacnanctgtcantggtagcaaagacatctgcatcaaggtttgggaccttgctcagcangtggtactgaattcataccgagctcatgctgctcaggtcacttgtgttgctgcctctcctcacaaggactctgtttttctttcctggcagcgaaggaaanatanaattttactctggggaataccccccttgttcccaagcccatcatccacagaattgggttggcaanggcgccctgggctaaccttccctaacctccccttgggntttgggcntcccccncccaaanttaaaattcctttg

SEQ ID NO: 2767 - DNA, 685 bp, Homo sapiens
  misc_feature (23)..(23): "n" may be a, t, c, g, other or unknown
  misc_feature (132)..(132): "n" may be a, t, c, g, other or unknown
  misc_feature (134)..(134): "n" may be a, t, c, g, other or unknown
  misc_feature (571)..(571): "n" may be a, t, c, g, other or unknown
  misc_feature (616)..(616): "n" may be a, t, c, g, other or unknown
  misc_feature (664)..(664): "n" may be a, t, c, g, other or unknown
  misc_feature (666)..(667): "n" may be a, t, c, g, other or unknown
  misc_feature (679)..(679): "n" may be a, t, c, g, other or unknown
acttagtatgcttacccgcagantggaggactagctgtatgcccagttccaaaatgaaggagatgagctcgttatttccagaagactggtaccaatttgttctaaggcagttggaatgttatcattcagaananaaggcctcaaatgtactggaagaaattgccaaggacaaagttttaaaagacttttatgttcatacagtaatgacttgttattttagtttatttggaatagacaatatggctcctagtcctggtcatatattgagagtttacggtggtgttttgccttggtctgttgctttggactggctcacagaaaagccagaactgtttcaactagcactgaaagcattcaggtatactctgaaactaatgattgataaagcaagtttaggtccaatagaagactttagagaactgattaagtaccttgaagaatatgaacgtgactggtacattggtttggtatctgatgaaaagtggaaggaagcaattttacaagaaaagccatacttgttttctctggggtatgattctaatatgggaatttacactgggagagtgcttanccttcaagaattattgatccaagtggggaaagttaaatcctgaanctgttagaagtcagtgggccaatctttcatgggaattactttatgccncnnacgatgatgaanaacgtt

SEQ ID NO: 2768 - DNA, 817 bp, Homo sapiens
  misc_feature (196)..(196): "n" may be a, t, c, g, other or unknown
  misc_feature (278)..(278): "n" may be a, t, c, g, other or unknown
  misc_feature (540)..(540): "n" may be a, t, c, g, other or unknown
  misc_feature (564)..(564): "n" may be a, t, c, g, other or unknown
  misc_feature (653)..(653): "n" may be a, t, c, g, other or unknown
  misc_feature (691)..(691): "n" may be a, t, c, g, other or unknown
  misc_feature (712)..(712): "n" may be a, t, c, g, other or unknown
  misc_feature (728)..(728): "n" may be a, t, c, g, other or unknown
  misc_feature (743)..(743): "n" may be a, t, c, g, other or unknown
  misc_feature (762)..(762): "n" may be a, t, c, g, other or unknown
  misc_feature (805)..(805): "n" may be a, t, c, g, other or unknown
  misc_feature (816)..(816): "n" may be a, t, c, g, other or unknown
atgttggagcagcggaggcggcgcagaggcgcgtcttgggtccccgcggcggcgccggtgccaagcgctggtttgcggatacccaggcagatctgcagtgcctaatgccatgagtgtggtggttcagcatgtggaggaaaaagctgtgcactcctggtcgcgcatctccacggcagggaagaaggccctggaagangcactgcttgtctttaacccaatgagccaggatctcagtgccacagaggcccagcttgtggccttcctgcagggcctgcganatgatggcttccaacctaccatcctgcgcagtggtgatgtctatggctatagttcatgcacagctaatcccccaagccagacgaaactgcaagctcgtgcccctaacccaactgccacatcacctccagccagtgctccccgaactgccatgcggttgcctgcaggtcgggccacactgcttcccatgccgctatctggcagactggccaaagcatccacaccagcccttgccaagcatgctaccaccaacctgctgctganctctctgaaacaatcaagtgccanccatgcccggggtgcaacaatgggcttccccacccacctttatccaagtgtctaccctgccatgccggctctctgttgttcttgaaggncctggttccacttaaaaatcccctgccctgcttgggtncccaacacaaagggacaatcnctgcaactctcacttngcaaaatctcctccnaaaactgcggaaaaattcnaggggaaaggttcccggggaaacctcccggcccaaactccccnaaaaaaccccna

SEQ ID NO: 2769 - DNA, 533 bp, Homo sapiens
  misc_feature (180)..(180): "n" may be a, t, c, g, other or unknown
  misc_feature (363)..(363): "n" may be a, t, c, g, other or unknown
  misc_feature (411)..(411): "n" may be a, t, c, g, other or unknown
  misc_feature (449)..(449): "n" may be a, t, c, g, other or unknown
  misc_feature (453)..(453): "n" may be a, t, c, g, other or unknown
  misc_feature (495)..(495): "n" may be a, t, c, g, other or unknown
  misc_feature (528)..(528): "n" may be a, t, c, g, other or unknown
  misc_feature (531)..(531): "n" may be a, t, c, g, other or unknown
attttgagccgctgccgccattggagtgggccccccccctttccccctccgcctcctgacaggaaaggtttaagggggacagagccctgggaggccgggccgggctcgggggccaccccgggggcccgggccatggatgtgcgccgtctgaaggtgaacgaacttcgcgaggagctgcancgccgcggcctggacactcgaggcctcaaggccgagcttgctgagcggctgcaggcggcgttggaggccgaggagcctgacgacgagcgggagctcgacgccgacgacgaaccggggcgacccgggcacatcaacgaggaggtcgagaccgaggggggctccgagctggaggggaccgcgcanccaccgccgcccgggctgcagccgcacgcggagcccggcggctactcngggccggacggacattatgccatggacaatattaccangcanaaccaattctacgatacccaagtcatcaaacaagaaaacgantctggctacgaaaggagaccactggaaatggancanca

SEQ ID NO: 2770 - DNA, 609 bp, Homo sapiens
  misc_feature (565)..(565): "n" may be a, t, c, g, other or unknown
  misc_feature (576)..(576): "n" may be a, t, c, g, other or unknown
  misc_feature (583)..(583): "n" may be a, t, c, g, other or unknown
aagacgcagtcttcagcaagggaagtgctgggaacgccctggagtgaacccaggaagatgcctgcagtgggtgccagggcccctctccaccgtccctgctgggcttcggggccacgcccgactgctgtgaacggcctgcggagcaccacgtgcgacggctggaggcgaaaggtctgcctttgatgtggctgttggtgcagggcctgtggtgccttccgcagcggaaatggcgcgccgcccggggagggcgggagcagcgtcccgggtgcccctgtgaggatgagcgacgagatgactggagggtccctgaagacctcactagggtgcccccagccggtccgctcccaggaagcgacacccccacagccccagggctgcagctgagggggtcgccactctggctgggcgaggctgggcccttgggggcaggcgccagaatggcctcaggctctacaagatgcctgaaaacaccaacctctccagggctcactagcattggacgctttcacgctctgccctgggccggaagccccctcaccccgcgcgatgtgcaaactccttgcanggctcactcantttccanaactttaattattggaaagttctccc

SEQ ID NO: 2771 - DNA, 622 bp, Homo sapiens
  misc_feature (138)..(138): "n" may be a, t, c, g, other or unknown
  misc_feature (304)..(304): "n" may be a, t, c, g, other or unknown
  misc_feature (454)..(454): "n" may be a, t, c, g, other or unknown
  misc_feature (511)..(511): "n" may be a, t, c, g, other or unknown
  misc_feature (543)..(543): "n" may be a, t, c, g, other or unknown
  misc_feature (592)..(592): "n" may be a, t, c, g, other or unknown
  misc_feature (609)..(609): "n" may be a, t, c, g, other or unknown
  misc_feature (615)..(615): "n" may be a, t, c, g, other or unknown
  misc_feature (620)..(620): "n" may be a, t, c, g, other or unknown
ggagacaccggaaggagccgcggctgctgcgggaagtggccagttcaggaggcggaccccccgagggcagcgctgcggggccgttttccggccctcctgacgcgacactgcccctctccgagagctgagaaggaaaanaggagcttgcggaggtgcggctgcaggccgttgttggtcgagctggcgggtcccgcgggccaggccgtggagagctcctgaaggaagcactaaacatggaaaggaacaaccggtaccagccactgcaaaaacatgccaaattgtaaagaccatcgatgttaggaanaaactgcctcaactaatgagcaaaataaccagctaacatcgtaatgacaggatcaaattcacacataacgatattaaccttaaaggtgttacctcattttgaaagtcttgggaaacaggaaaaaattcctaacaaaatgtcagcttttcnaaatcattgtccacatttggattcagttggtgaaataacaaaagaagatttgatacnaaaatcccttggtacttgtcaggattgtaaantccaaggaccaaatctttgggcatgtctggaaaaataaatgttcatatnttggctgtggtgaatcncaattnaatcnca

SEQ ID NO: 2772 - DNA, 420 bp, Homo sapiens
  misc_feature (326)..(326): "n" may be a, t, c, g, other or unknown
  misc_feature (337)..(337): "n" may be a, t, c, g, other or unknown
  misc_feature (418)..(418): "n" may be a, t, c, g, other or unknown
gatttaacttattactttttctgcttctgtttccaccccagctgcctctcttgtcctgagggttaggctggagtgacagtttccgcccaccccccagcccaagaaagaggctgccggaaagaaaatgctgaccattggaggtgcccaacagtagaatgggctactgtgaggggtagtgagagccccatttctggaggtatgcaaatcttgactggacagccagctctgagattttatcagggcacttctatacctgtgggacattggactggatgagccctgagccagcttccactcctacctgaatagaaaactcactgcacccncccacaacacntgataaacacatgtcctcactgaatgttactgattgcggctgaaggcctgcctctggctgtgtggggaagtgggtggaaangt

SEQ ID NO: 2773 - DNA, 499 bp, Homo sapiens
  misc_feature (413)..(413): "n" may be a, t, c, g, other or unknown
  misc_feature (419)..(419): "n" may be a, t, c, g, other or unknown
  misc_feature (422)..(422): "n" may be a, t, c, g, other or unknown
  misc_feature (452)..(452): "n" may be a, t, c, g, other or unknown
  misc_feature (461)..(461): "n" may be a, t, c, g, other or unknown
aaaagaagcagcacctgttgagagaagtgacagttgaggaaaataatgcttccccacattttgagccagatctccatattgaggacctgaggaaatcccttggaacaaaccagaccaaagaggtgtcttcttctctctcccagagcaaggaggacttatacttggacagcctgtcctcccacaatgtctggcacctcctctctgctgagggggtagccctccgtagtgccaaggagttccttgtgcggcagacacgctccatgcggaggcggcagacagctctgaaagctgcccagcagcattggcgccatgagctggccagtgcgcaggaggtggccaaagacccaccaggcatcaaggccctggaagatatgcgcaagaacctggagaaggagaccaggcacctggatganatgaantcngccatgcggaaaggccacaacctgctgaanaagaaagangagaagctgaatcagttggagtcctctctttgggaaga

SEQ ID NO: 2774 - DNA, 668 bp, Homo sapiens
  misc_feature (589)..(589): "n" may be a, t, c, g, other or unknown
  misc_feature (653)..(653): "n" may be a, t, c, g, other or unknown
  misc_feature (657)..(657): "n" may be a, t, c, g, other or unknown
  misc_feature (667)..(668): "n" may be a, t, c, g, other or unknown
gttaaatcatcggaatttttgatgataccttttctatatggattacaatttgatcgctgggaattctccaccttaaagaagtaccctcaggtgactacagatgtgttaacacccagcatgttccggtaggagactttctggatggggaagatttccaggaattggcaacaagctcatttcactggtgggtttgctgaagcattatcacaagacagtcagaatgactgatgagtgctcttcaggtgtgaatcatggcaatacagtgaaagacagtgatttactgcttttgagggcgtgcatgtatatgattaacggatggaagtgcaggactccaagatttacttccttccctttccagcagaattacctgagacgagtaaaatctactggcggagtcactccattattcttatctgtggagatctagatcttgatttgaaagtttctgagaaaatcttcagctcagacttgagggtcaactttaccagctgaaggatctgcatttactgctcaaccacatctaatttgatgtcctctgcagatttaaaatgtgtgccttcttttccgtcaccaagtcatccctgggttnctactggaacatccttctcaattccccccgacccatggatggctgttctccattgtctgtttcnccanatgtcctccnn

SEQ ID NO: 2775 - DNA, 810 bp, Homo sapiens
  misc_feature (283)..(283): "n" may be a, t, c, g, other or unknown
  misc_feature (373)..(373): "n" may be a, t, c, g, other or unknown
  misc_feature (623)..(623): "n" may be a, t, c, g, other or unknown
  misc_feature (628)..(628): "n" may be a, t, c, g, other or unknown
  misc_feature (662)..(662): "n" may be a, t, c, g, other or unknown
  misc_feature (756)..(756): "n" may be a, t, c, g, other or unknown
  misc_feature (762)..(762): "n" may be a, t, c, g, other or unknown
  misc_feature (787)..(787): "n" may be a, t, c, g, other or unknown
  misc_feature (796)..(796): "n" may be a, t, c, g, other or unknown
  misc_feature (805)..(805): "n" may be a, t, c, g, other or unknown
gaaggaagcggtggctgctgcggatgtcggtgtgagcgagcggcgcctgaacacacggcggctgccgagcgcctgacccgggcctgcgccagagcctgcaccgagctccggggccccacacccgctacggtggccctgcgcccgttgctactgaggcggcgtgctctgcattcttcgctgtccaggcctgccggctctggtgtctgctggctcctccttgctcgcctgctccctcctgcttgcctgagtcatcgccgccgccgccgccacagccatggccganagtggtgaaagcggcggtcctccgggctcccaggatagcgccgccggagccgaaggtgctggcgcccccgcggccgctgcctccgcggancccaaaatcatgaaagtcaccgtgaagaccccgaaggaaaaggaggaattcgccgtgcccgaaaatagctccgtccagcagtttaaggaagaaatctctaaacgttttaaatcacatactgaccaacttgtgttgatatttgctggaaaaattttgaaagatcaagataccttgagtcagcatggaattcatgatggacttactgttcaccttgtcattaaaacacaaaacaggcctcaggatcattcanctcancaaacaaatacagctggaaacaatgttacttacntcatccaactcctaatattaactctacatctggttcctgctactaacaaccctttttggtttaagttggccttggggggactttgcaaggtctnaattancttggggtttgaaatactaaccaanctttctctnaaattaacnaaatt

SEQ ID NO: 2776 - DNA, 813 bp, Homo sapiens
  misc_feature (608)..(608): "n" may be a, t, c, g, other or unknown
  misc_feature (629)..(629): "n" may be a, t, c, g, other or unknown
  misc_feature (637)..(637): "n" may be a, t, c, g, other or unknown
  misc_feature (652)..(652): "n" may be a, t, c, g, other or unknown
  misc_feature (674)..(674): "n" may be a, t, c, g, other or unknown
  misc_feature (720)..(720): "n" may be a, t, c, g, other or unknown
  misc_feature (742)..(742): "n" may be a, t, c, g, other or unknown
  misc_feature (812)..(813): "n" may be a, t, c, g, other or unknown
ggttttagaaagtagcattagtattgcagctagccacaataatttagttgaaatttaaatcacaatatttagcccctctaaaaatgcaatacttacatccctatatataactacatatctatattctctctatatagtatcctgtatgttatttatccactatacatctctatatagctaatatgctatatattactatatacagtgataatataaatatacacacattttatgcattatatatataactatacggtaatactatatgtatgtaatatatagtaataagtgtgccataaagtgtcacctaccttggcttccaatatcagagacttctactccagtgtccatttttataccatcaagaatgatagcttgatcaccaccgccttcatcatcttccttctcagagtcttcaagatcaccccaggagttttctactccctctccaatttgggcagttccaggagtccatagcacaggtgtagaaacacttaacaagttaagaaaactgagtaacaaaaatattgctatttgatgaactgttgaagatgagaatgaaagttttcttcttgtaagattgattcaagtgtgccccaagttcctangggaaaaaaaacttaatatanctacactntggatgggtggaacnatggaagaagaaaaaaaactcngggcagattttatgggatgccattaataagaaatgttgaaaaaaanagaatccctcaacatttttaanttattagttactaaaatttaaatttggggccctaaaaatcctggtttttttccccggaaaaacttggaann

SEQ ID NO: 2777 - DNA, 511 bp, Homo sapiens
  misc_feature (370)..(370): "n" may be a, t, c, g, other or unknown
  misc_feature (454)..(454): "n" may be a, t, c, g, other or unknown
  misc_feature (470)..(470): "n" may be a, t, c, g, other or unknown
  misc_feature (473)..(473): "n" may be a, t, c, g, other or unknown
  misc_feature (500)..(500): "n" may be a, t, c, g, other or unknown
  misc_feature (511)..(511): "n" may be a, t, c, g, other or unknown
gcatttgcggccggcgccagggtggagagttgtgcgccggtccctgggcctgagctccggctccggctggggcgcctgcgatgtctcaagatggcggagctgggcgaattaaagcacatggtgatgagtttccgggtgtctgagctccaggtgcttcttggctttgctggccggaacaagagtggacggaagcacgagctcctggccaaggctctgcacctcctgaagtccagctgtgcccctagtgtccagatgaagatcaaagagctttaccgacgacactttccccggaagaccctggggccctctgatctctcccttctctctttgccccctggcacctctcctgtaggctcccctggtcctctanctcccattcccccaacgctgttggcccctgggcaccctgctgggccccaagcgtgaggtggacatgcacccccctctgccccancctgtgcaccctgatntcnccatgaaaccattgcccttctatgaantctatggggan

SEQ ID NO: 2778 - DNA, 577 bp, Homo sapiens
  misc_feature (38)..(38): "n" may be a, t, c, g, other or unknown
  misc_feature (138)..(138): "n" may be a, t, c, g, other or unknown
  misc_feature (455)..(455): "n" may be a, t, c, g, other or unknown
  misc_feature (514)..(514): "n" may be a, t, c, g, other or unknown
  misc_feature (551)..(551): "n" may be a, t, c, g, other or unknown
  misc_feature (554)..(554): "n" may be a, t, c, g, other or unknown
  misc_feature (556)..(556): "n" may be a, t, c, g, other or unknown
  misc_feature (566)..(566): "n" may be a, t, c, g, other or unknown
aagcgcgttcccggcagctgcgggctccgaggccaganagaaaagactgcgaggtggccgcagctgtggccggagagcacaaagaatgaaccagcagtggaagagaaaatactgtaagctggctgactgctggtgaanaaaatgctttatttttgtggcaggcatctgtgggatctgtaatagaaatgatggctggctgtggtgaaattgatcattcaataaacatgcttcctacaaacaggaaagcgaacgagtcctgttctaatactgcaccttctttaaccgtccctgaatgtgccatttgtctgcaaacatgtgttcatccagtcagtctgccctgtaagcacgttttctgctatctatgtgtaaaaggagcttcatggcttggaaagcggtgtgctctttgtcgacaagaaattcccgaggatttccttgacaagccaaccttgttgtcnccagaagaactcaaggcagcaagtagaggaaatggtgaatatgcatggtattatgaaangaagaaatgggtggtggcagtacgatgagcgcactantananaactgggaanatgctttttcc

SEQ ID NO: 2779 - DNA, 400 bp, Homo sapiens
  misc_feature (77)..(77): "n" may be a, t, c, g, other or unknown
  misc_feature (320)..(320): "n" may be a, t, c, g, other or unknown
  misc_feature (333)..(333): "n" may be a, t, c, g, other or unknown
  misc_feature (343)..(343): "n" may be a, t, c, g, other or unknown
atttacacaagtattgttgagggagtgattttttcttgatatgcgtctgttttcatttattattaatttgaaagatnaacagttgtgatccataatggatcatttcttatgtcttttacatagctaataatgttctctgtttatttctcatgaattcccattttgtggctaaagaccagacctttgcactatttcatcaagattattttattgaggtttggcttacatatagtagaggcaatacatatgagatacgcaactttgtttttgcagctacaatgcactttctcgatctcatatgtttttgtcttgtatagacngacacaagttcancatgttgcanattgggaatagtgagctatacaaaagagattttgagcctagatgagcttaggataga

SEQ ID NO: 2780 - DNA, 823 bp, Homo sapiens
  misc_feature (32)..(32): "n" may be a, t, c, g, other or unknown
  misc_feature (256)..(256): "n" may be a, t, c, g, other or unknown
  misc_feature (572)..(572): "n" may be a, t, c, g, other or unknown
  misc_feature (580)..(580): "n" may be a, t, c, g, other or unknown
  misc_feature (611)..(611): "n" may be a, t, c, g, other or unknown
  misc_feature (657)..(657): "n" may be a, t, c, g, other or unknown
  misc_feature (687)..(687): "n" may be a, t, c, g, other or unknown
  misc_feature (694)..(694): "n" may be a, t, c, g, other or unknown
  misc_feature (773)..(773): "n" may be a, t, c, g, other or unknown
  misc_feature (782)..(782): "n" may be a, t, c, g, other or unknown
  misc_feature (800)..(800): "n" may be a, t, c, g, other or unknown
  misc_feature (806)..(806): "n" may be a, t, c, g, other or unknown
  misc_feature (809)..(809): "n" may be a, t, c, g, other or unknown
aaaaaaaaaataaaagatgtatatcaacaaanccaatatctggaatagtgccttagatgcattcagaaatcgaaactttaatccttcatatgcaattgaagtagcatatgttattgaaaatgataattttggaagtgagcatcctggatcaaagcaagaatttctgagtctcttaatgcaacatcttgagaactcatcattgtttgaagggtccttgtcaaagaacttgtctctaaattctcaagctctgaaaganaatctttactatgaagctggcaaaatgcttgccatttctttagttcacggtggtccttcacctggtttcttttctaaaaccttgtttaactgccttgtttatggaccagaaaatacccagccaattttagatgatgtttcagactttgatgtggcacagattataatcaggataaatactgcaacaactgtagctgacttaaagtcaataataaatgaatgctataactaccttgagttaattggatgtctcagacttataacgacattaagtgataaatatatgttagtaaaagacatacttggctaccatgttnattcaganagtccacacaccctttgaaagttttaagcanggtctgaaaacccttggtgttttggagaaaattcaggcttatccanaaacattttgtagcatcctgtgtcataaanctgaaantctttctgccaaaatccttagtgagcttttttacagtacacacattacctgatgttaaaactttgggggtttggaacanttactttcnggctgttgaaaaatggtnaatctnccncaacaatgggaaaa

SEQ ID NO: 2781 - DNA, 650 bp, Homo sapiens
  misc_feature (632)..(632): "n" may be a, t, c, g, other or unknown
  misc_feature (636)..(636): "n" may be a, t, c, g, other or unknown
  misc_feature (650)..(650): "n" may be a, t, c, g, other or unknown
ggcaaatgggcttgggcggctcctcggcgggtggcggtggtggccgtaacggttcctcctggccctgttaatgtcggggccaggccgggggaggatggcgccctagaacccggccttgctggggtaggggcgggaggggacggggtggggaccggccatgtcggaggtgacccggagtctgctgcagcgctggggcgccagttttaggagaggcgccgacttcgactcttggggccagctggtggaggcgatagacgagtatcagatattagcaagacatctacaaaaggaggcccaagctcaacacaataattctgaattcacagaagaacaaaagaaaaccataggcaaaattgcaacatgcttggaattgcgaaatgcagctttacagtccacacagtctcaagaagaatttaaactggaagacctgaagaagctagaaccaatcctaaagaatattcttacatataataaagaattcccatttgatgttcagcctgtcccattaagaagaattttggcacctggtgaagaagagaatttgggatttgaagaagatgaagaagaaggtggtgctggagcagggtctcctgattcttttcctgctaaattccccgtactttattaccaangttnccatccgaaaccan

SEQ ID NO: 2782 - DNA, 627 bp, Homo sapiens
  misc_feature (197)..(197): "n" may be a, t, c, g, other or unknown
  misc_feature (284)..(284): "n" may be a, t, c, g, other or unknown
  misc_feature (501)..(501): "n" may be a, t, c, g, other or unknown
  misc_feature (546)..(546): "n" may be a, t, c, g, other or unknown
  misc_feature (551)..(551): "n" may be a, t, c, g, other or unknown
  misc_feature (599)..(599): "n" may be a, t, c, g, other or unknown
  misc_feature (608)..(608): "n" may be a, t, c, g, other or unknown
  misc_feature (618)..(618): "n" may be a, t, c, g, other or unknown
ccagtctgggcaccggagcctgtgaccgcttcgttagtggagaggtagctggcagtccgcttcggcgggcctgtgccccgcgccgttctcggggcctccctgctgagctcgcggctcacgctgagagggacacgcagtgacgagcggccgaagcagctttgcggtgagagcacgctgggccgggggccgggcgggancctggtggcgggtaacgccggactcgagggttttgtagtgcatccctgagcatgagcacagaatgaagcggcgtttggatgaccagnagtcaccggtgtatgcagcccagcagcgtcggatccctggcagcacagaggcttttcctcaccagcaccgggtgcttgcccctgcccctcctgtgtatgaagcagtgtctgagaccatgcagtcagctacgggaattcagtactctgtaacacccagctaccaggtttcagccatgccacataaactccggcagtcatgggcccgctatatcagcanttcatatcagccatcatcacccaacagcggtgcagccccacggangccangtggtccagaatcatgctcatccagccccaccagttgcaccagtgcanggacagcanccaatttcanaagctgaaa

SEQ ID NO: 2783 - DNA, 648 bp, Homo sapiens
  misc_feature (179)..(179): "n" may be a, t, c, g, other or unknown
  misc_feature (194)..(194): "n" may be a, t, c, g, other or unknown
  misc_feature (331)..(331): "n" may be a, t, c, g, other or unknown
  misc_feature (385)..(385): "n" may be a, t, c, g, other or unknown
  misc_feature (390)..(390): "n" may be a, t, c, g, other or unknown
  misc_feature (463)..(463): "n" may be a, t, c, g, other or unknown
  misc_feature (482)..(482): "n" may be a, t, c, g, other or unknown
  misc_feature (484)..(484): "n" may be a, t, c, g, other or unknown
  misc_feature (499)..(499): "n" may be a, t, c, g, other or unknown
  misc_feature (512)..(512): "n" may be a, t, c, g, other or unknown
  misc_feature (579)..(579): "n" may be a, t, c, g, other or unknown
  misc_feature (585)..(585): "n" may be a, t, c, g, other or unknown
  misc_feature (588)..(588): "n" may be a, t, c, g, other or unknown
  misc_feature (608)..(608): "n" may be a, t, c, g, other or unknown
  misc_feature (642)..(642): "n" may be a, t, c, g, other or unknown
acggcacctggaaatggaaagccagtgaaggctgctttgggccggggcagcgggtgggaccgggcgggagggattccaaagagaccgccgggaaggctagagcttggaattccggctcctcggagtcctggccctcccccaccgccgcctcggagctcagcacaccttggatgggggangcgggcagctcctanccccgcaccccaggaggcgcgctcggagggaagccgccaccgcgccgcctctgcctcggcgcggaacaaacggttaaagattttgggcaccgcctcgcggggggaggagccaggggcccaatccgcaattaaagatnaactttgggtgaactaattgtctgaccaagcggaggaagttcctgcagatgaancgcangaaatacggcttcatctacaagacgcatctgttcgggcggcccaccgtacgggtgatgggcgcggacaatgtncggcgcatcttgctcgganancaccggctggtgtcngtccactggccancgtcggtgcgcaccattctgggatctggctgcctctctaaccttgcacgactcctcgcacaagcaanggcaanaangtgattattcgggccttcanccgccaaggcactccaaatgctacgttcccggtnatcacc

SEQ ID NO: 2784 - DNA, 462 bp, Homo sapiens
  misc_feature (335)..(335): "n" may be a, t, c, g, other or unknown
  misc_feature (365)..(365): "n" may be a, t, c, g, other or unknown
  misc_feature (411)..(411): "n" may be a, t, c, g, other or unknown
  misc_feature (442)..(442): "n" may be a, t, c, g, other or unknown
gcatgtgcgtgtgtgctggctgccgggctgccccgagccggcgggggagccggtccgctccaggtggcgggcggctggagcgaggtgaggctgcgggtggccagggcacgggcgcgggtcccgcggtgcgggctggctgcaggctgccttctgggcacggcgcgcccccgcccggcttcccgggacgcggggactgggcgcaggctgcaagctggtggggttggggaggaacgagagcccggcagccgactgtgccgagggacccggggacacctccttcgcccggccggcacccggtcagcacgtccccccttccctcccgcagggagcggacntggactacgactcgtaccatcactatttcnacgactatgactgcggggaggatttctaccgctccacggcgcccancgaggacatctggaacaaattcgagctggtnccatcgccccccacgtctcc

SEQ ID NO: 2785 - DNA, 713 bp, Homo sapiens
  misc_feature (587)..(587): "n" may be a, t, c, g, other or unknown
  misc_feature (598)..(598): "n" may be a, t, c, g, other or unknown
  misc_feature (616)..(616): "n" may be a, t, c, g, other or unknown
  misc_feature (635)..(635): "n" may be a, t, c, g, other or unknown
  misc_feature (650)..(650): "n" may be a, t, c, g, other or unknown
  misc_feature (699)..(699): "n" may be a, t, c, g, other or unknown
  misc_feature (709)..(709): "n" may be a, t, c, g, other or unknown
ctcttttagcggcggcggcttcttccgtgggacaatatgttcaagagaatggccgaatttgggcctgactccggcgggagagtaaagggtgttactatcgttaaaccaatagtttacggtaatgttgctcggtattttggaaagaaaagagaagaagatgggcacactcatcagtggacagtatatgtgaaaccatatagaaatgaggatatgtcagcatatgtgaagaaaatccagtttaaattacatgaaagctatggcaatcctttaagagttgttactaaacctccatatgaaattactgaaacaggatggggtgaattcgaaataatcatcaaaatatttttcattgaccctaatgaaagacctgtaaccctgtatcatttgctaaagctgtttcaatcagacaccaatgcaatgctggggaaaaagacagtggtttcagagttctatgatgaaatgatatttcaagacccaacagcaatgatgcaacaattattgacaacatctcgtcagctaacattaggagcctataagcatgaaacagaatttgcagagcttgaaagtgaaaaccagagaaaaattanaagctgctaanaaaaaaacaagctttganattgcagaacttaaggganagattaaaaaccaanttcgtgaaactataaattgtttaaaaaatgaaatcagaaaacttggaanaagatgaccnagcc

SEQ ID NO: 2786 - DNA, 576 bp, Homo sapiens
  misc_feature (208)..(208): "n" may be a, t, c, g, other or unknown
  misc_feature (359)..(360): "n" may be a, t, c, g, other or unknown
  misc_feature (396)..(396): "n" may be a, t, c, g, other or unknown
  misc_feature (458)..(458): "n" may be a, t, c, g, other or unknown
  misc_feature (518)..(518): "n" may be a, t, c, g, other or unknown
  misc_feature (538)..(538): "n" may be a, t, c, g, other or unknown
  misc_feature (559)..(559): "n" may be a, t, c, g, other or unknown
  misc_feature (564)..(564): "n" may be a, t, c, g, other or unknown
  misc_feature (575)..(575): "n" may be a, t, c, g, other or unknown
ggtgcttctaggaagtagaacgccggctcgcatgcctgcccgcccgccagcctgccgggtacggccttttccgccggggcttccaggtcaaagaattcgcctttgccgctaccgctttcttaccctccgcacccgttaagttctccggtcgggcggcagtctctgaacacttagccgcgccatccggggtcacaccgcctggaaggangtgacgggggcggcgcggggcgcggacactccccgctgagagtccgcctgccatggactcggaatattacagcggcgaccagtcagatgatggtggtgctaccccagtacaggatgaacgggattcagggtcagacggtgaggatgatgtnnatgagcaacactccggatcagacactggaagtgtanaacgtcattcagagaatgaaactagtgatcgaaaagatggcctccccaaaggacatcatgtnacagactctgagaacgatgagcccttaaatcttaatgctagtgactctgaaagtgaggancttcacaggcaaaaggacancgactctgaatctgaagaacntgcanaacctcctgcna

SEQ ID NO: 2787 - DNA, 591 bp, Homo sapiens
  misc_feature (254)..(254): "n" may be a, t, c, g, other or unknown
  misc_feature (359)..(359): "n" may be a, t, c, g, other or unknown
  misc_feature (384)..(384): "n" may be a, t, c, g, other or unknown
  misc_feature (412)..(412): "n" may be a, t, c, g, other or unknown
  misc_feature (439)..(439): "n" may be a, t, c, g, other or unknown
  misc_feature (504)..(504): "n" may be a, t, c, g, other or unknown
  misc_feature (540)..(540): "n" may be a, t, c, g, other or unknown
  misc_feature (542)..(542): "n" may be a, t, c, g, other or unknown
  misc_feature (581)..(581): "n" may be a, t, c, g, other or unknown
  misc_feature (590)..(590): "n" may be a, t, c, g, other or unknown
gctccggcggcttcgctgctagctcgcggcgacgtcgggccgattttcccaggatgacagagctgaggcagagggtggcccatgagccggttgcgccacccgaggacaaggagtcagagtcagaagcaaaggtagatggagagactgcatcggacagtgagagccgggcagaatccgcacccctgccagtctctgcagatgataccccggaggtcctcaatagggccctttccaacttgtcttcaagatggaanaactggtgggtgagaggcatcctgactttggccatgattgcatttttcttcatcatcatttacctgggaccaatggttttgatgataatcgtgatgtgcgttcanattaagtgtttccatgaaataatcnctattggctacaacgtctaccactcatntgatctgccctggttcaggacgctcanctggtactttctcctgtgtgtaaactatttcttctatggtgagacagtgacggattacttcttcnccctggtccaaaaaaaaaacctttgcggattctcantnaataccaccggttcatttcctttactctctatctaatangattctgcnt

SEQ ID NO: 2788 - DNA, 764 bp, Homo sapiens
  misc_feature (462)..(462): "n" may be a, t, c, g, other or unknown
  misc_feature (536)..(536): "n" may be a, t, c, g, other or unknown
  misc_feature (681)..(681): "n" may be a, t, c, g, other or unknown
  misc_feature (687)..(687): "n" may be a, t, c, g, other or unknown
  misc_feature (703)..(703): "n" may be a, t, c, g, other or unknown
  misc_feature (711)..(711): "n" may be a, t, c, g, other or unknown
  misc_feature (732)..(732): "n" may be a, t, c, g, other or unknown
tcaacatcaattattcaggcccctacagttgtggtattgaggcccctaaaggcttctgcctttcaccaattagtgctgccagttactgaggcttctcccaaaaggtatcagtccagtcttaaagatatttcattgtgaaagaagaaactaaactatcaggcctcttttacaaaatgagagattgaatttaagcttgtcaagcacgtactggaaggtatgaattacactaccatgtgttttgtatcttccctttcaagtgatgatgttaaatgaaggtaagtttttcatccttttttaatttttgttttttataaatcatttcagctttttctggtttatagaggtgtcttatttctaatgcaacagacccccaactttaacagatttgatatggatgcatttattcacaagcaaccccaaaagtccaaaaatgtaataattttgacaaggcccaaagttganatgctatgaagcttgtgtgtgtgaaaagtcagttatgattgtctggaaaaaactgtggtgtgtatgctgtaaanttccacatttcacatgcagtgtactccaaaaagcgggtttgggtcaccatttcccatctctttttaaaaaatgactgctgttgggggccaggggacatcatggggaagtggggctgtccaatttagctttgcccctgcaccttcngcccangaaaagatttgaaccnaaaccaangcttccaaaaaaggcaaaatnttttccggcaaaaaagggacccaggttacccc

SEQ ID NO: 2789 - DNA, 721 bp, Homo sapiens
  misc_feature (643)..(643): "n" may be a, t, c, g, other or unknown
  misc_feature (705)..(705): "n" may be a, t, c, g, other or unknown
  misc_feature (716)..(716): "n" may be a, t, c, g, other or unknown
gtgcgcccgccccctctggggcggagagactcagcccctgcccctcagcggataacctggggactgaccgttccctggggatccgacgggccccagaggacccacgcctgagccccgtgcgactcgtggcctttgggctagaagccatggacgccttcacccgcttcaccaaccagacccagggccgggaccgactcttcagagccactcagtacacatgcatgttgcttagatatttgttagagcccaaagctggcaaagagaaggtggtaatgaagctcaagaaactggagtccagtgtgagcactggtcgtaaatggttcagactaggcaatgtggtacatgctatacaggcaactgagcagagcattcatgccactgacctggtacctcgcttatgcttaacattagccaacctgaaccgtgtgatttatttcatctgtgacaccatcctctgggtgaggagcgtaggtctcacctctggcatcaacaaagagaaatggcgaacgaaggctgctcaccactactactattctcttctgctgagcctggtcagggatctgtatgaaatctccctgcagatgaaacgatttcatgtgacagggcaaagaaagagaatcagcatcccagatccttgttcacntggtgagagaacaaatggtccatcttctctcttttccattctaacactctcctgtctgaccntgaaacttgtnattct

SEQ ID NO: 2790 - DNA, 619 bp, Homo sapiens
  misc_feature (505)..(505): "n" may be a, t, c, g, other or unknown
  misc_feature (527)..(527): "n" may be a, t, c, g, other or unknown
  misc_feature (552)..(552): "n" may be a, t, c, g, other or unknown
  misc_feature (581)..(581): "n" may be a, t, c, g, other or unknown
  misc_feature (597)..(597): "n" may be a, t, c, g, other or unknown
  misc_feature (617)..(617): "n" may be a, t, c, g, other or unknown
atttttttcaagggatgagctttgccagctccacgtggaagtccctaaagctcctccttccacttcgaagcgtgactgatgcctccagggcctcacagccgcttctgaagcacttcctgaaagccagctccaccctggcgaggccctgacctcagcggacccaagcccaggacgatgcctgttgcgttcttctcccccagtagcaagtcaccttccccagcagcctccatgttgtctgggctctccctgtgggggatgccaggggagagtgagagagcagaggtggccaagatggcatgtgctgccttctctcctggaacatgctgcttccacagggcagtgccagtgtctccgtgtgaattcattgattgtggcctgagtgaattcctgggtttgctgttccagatgattctgcagggcttcaaaaccagcaaggccctgagcaaagctgctccttcttctcatgggctgaactcatcgtgatgtcactggctaaggggggcancatggggtccagcccggcccangcacatggaactgcggtcctgtcangctgaatgtggtgtttgccttctaagatnggccccaaggcaccanttcccaaaaaaggtctgtcncc

SEQ ID NO: 2791 - DNA, 551 bp, Homo sapiens
  misc_feature (453)..(453): "n" may be a, t, c, g, other or unknown
  misc_feature (460)..(460): "n" may be a, t, c, g, other or unknown
  misc_feature (489)..(489): "n" may be a, t, c, g, other or unknown
  misc_feature (513)..(513): "n" may be a, t, c, g, other or unknown
  misc_feature (544)..(544): "n" may be a, t, c, g, other or unknown
tttgatgatgcccaacaggaggaccggaagagactggcggagctgctggtctccgtcctggaacagggcttgccaccctcccaccgtgtcatctggctgcagagtgtccgaatcctgtcccgggaccgcaactgcctggacccgttcaccagccgccagagcctgcaggcactagcctgctatgctgacatctctgtctctgaggggtccgtcccagagtccgcagacatggatgttgtactggagtccctcaagtgcctgtgcaacctcgtgctcagcagccctgtggcacagatgctggcagcagaggcccgcctagtggtgaagctcacagagcgtgtggggctgtaccgtgagaggagcttcccccacgatgtccagttctttgacttgcggctcctcttcctgctaacggcactccgcaccgatgtgcgccagcagctgtttcagganctgaaangaatgcgcctgctaactgacacactgganctgacctgggggtgactcctgaanggaacccccaccacgctccttccttcccaanaaactga

SEQ ID NO: 2792 - DNA, 697 bp, Homo sapiens
  misc_feature (657)..(657): "n" may be a, t, c, g, other or unknown
  misc_feature (673)..(673): "n" may be a, t, c, g, other or unknown
  misc_feature (690)..(690): "n" may be a, t, c, g, other or unknown
atcgctgcggttgcgagcgctgtaaggagcctgtgctgtgccgcgcagttaggcagcagcagccgcgggagcagtagccgccgtgggagggagccatgaagcattacgaggtggagattctggacgcaaagacaagggagaagctgtgtttcttggacaaggtggagccccacgccaccattgcggagatcaagaacctcttcactaagacccatccgcagtggtaccccgcccgccagtccctccgcctggaccccaagggcaagtccctgaaggatgaggatgttctgcagaagctgcccgtgggcaccacggccacactgtacttccgggacctgggggcccagatcagctgggtgacggtcttcctaacagagtacgcggggccccttttcatctacctgctcttctacttccgagtgcccttcatctatggccgcaaatatgactttacgtccagtcggcatacagtggtgcacctcgcctgcatctgtcactcattccactacatcaagcgcctgctggagacgctcttcgtgcaccgcttctcccatggcactatgcctttgcgcaacatcttcaagaactgcacctactactggggcttccccgcgtggatggcctattacatcaatcacctctctacactccccctanctacggaactcaacangttaaactggcctcccntctttgt

SEQ ID NO: 2793 - DNA, 747 bp, Homo sapiens
  misc_feature (56)..(56): "n" may be a, t, c, g, other or unknown
  misc_feature (184)..(184): "n" may be a, t, c, g, other or unknown
  misc_feature (381)..(381): "n" may be a, t, c, g, other or unknown
  misc_feature (565)..(565): "n" may be a, t, c, g, other or unknown
  misc_feature (572)..(572): "n" may be a, t, c, g, other or unknown
  misc_feature (605)..(605): "n" may be a, t, c, g, other or unknown
  misc_feature (693)..(693): "n" may be a, t, c, g, other or unknown
  misc_feature (698)..(698): "n" may be a, t, c, g, other or unknown
  misc_feature (702)..(702): "n" may be a, t, c, g, other or unknown
  misc_feature (716)..(716): "n" may be a, t, c, g, other or unknown
  misc_feature (738)..(738): "n" may be a, t, c, g, other or unknown
gtgtgtgtatgtgtgtgtaaatttatatacacacacatggaaacagttcctggaanagaattctgaatgctttgctagcaaaacactgtggtgtgcaaacctagaacccaatagaaaaaaaagccatttatctgaaggctgcatagtggagagagtcttcagtttacctcattctttgtagcancccttgattttaacaggtttttgtaataggtacagataatcccatacctttctaggtgcgattttaagttaagctaaaaattatttgtagggttaatttatttgtatatgatagtagaaggtaagatcatgtcaaaccttataatttggggaatctgacactatttaaattattggcaactgttgtctgttgtacanaaattctttttctactggctcagtctgttacattaataatgcattttatatgttcaggcacactttacataaatacaaagttcgctagtaaatatctggctattttggctatttacaacactaatttcattatttttatctgtaagcattattaatacatctttaccaaaacctgagcaatacnatatttnctttatatgttatatgcccttgtttgctaaaanctaatatttttgcatttactttaaaggggctgttctaaacccccagctttaattcctcccctaaaaaaaaacattgcagctaaccctngaacncccngttttaaaatacantatttctcttccccaatctccntgcctccgc

SEQ ID NO: 2794 - DNA, 645 bp, Homo sapiens
  misc_feature (33)..(33): "n" may be a, t, c, g, other or unknown
  misc_feature (59)..(59): "n" may be a, t, c, g, other or unknown
  misc_feature (81)..(81): "n" may be a, t, c, g, other or unknown
  misc_feature (102)..(102): "n" may be a, t, c, g, other or unknown
  misc_feature (210)..(210): "n" may be a, t, c, g, other or unknown
  misc_feature (216)..(216): "n" may be a, t, c, g, other or unknown
  misc_feature (269)..(269): "n" may be a, t, c, g, other or unknown
  misc_feature (359)..(359): "n" may be a, t, c, g, other or unknown
  misc_feature (432)..(432): "n" may be a, t, c, g, other or unknown
  misc_feature (439)..(439): "n" may be a, t, c, g, other or unknown
  misc_feature (491)..(491): "n" may be a, t, c, g, other or unknown
  misc_feature (533)..(533): "n" may be a, t, c, g, other or unknown
  misc_feature (586)..(586): "n" may be a, t, c, g, other or unknown
  misc_feature (598)..(598): "n" may be a, t, c, g, other or unknown
  misc_feature (609)..(609): "n" may be a, t, c, g, other or unknown
  misc_feature (620)..(620): "n" may be a, t, c, g, other or unknown
  misc_feature (644)..(644): "n" may be a, t, c, g, other or unknown
gcggtgccgggggcggggcgcggcggctgtcanctgactgtggcggcggcggcctcgangtgacaactgtctccgtcgcangctccggcgggggcgcaagangtcgcccggcgcgtcactgtcgggtcggcgagccacgggggccgccgcagcaccatggcgaccaccgtcagctggacgcccaggcggcccagcagctgcagtacggangcgcantgggcaccgtgggccgactgaacatcacggtggtacaggcaaagttggccaanaattacggcatgacccgcatggacccctactgccgactgcgcctgggctacgcggtgtacgaaacgcccacggcacacaatggcgccaanaatccccgctggaataaggtcatccactgcacggtgcccccaggcgtggactctttctatctcgagatcttcnatgaaanaaccttctccatggacgaccgcattgcctggacccacatcaccatcccggantcctgaagcagggcaaggtggaagacaaatggtacacctgancgggaaggcagggggacaacaaggaaggcatgatcaacctcgtcatttctacncgctgcttccanctgccatggtnatgccacccancccgtggtcctgatgccaacaatnt

SEQ ID NO: 2795 - DNA, 760 bp, Homo sapiens
  misc_feature (1)..(1): "n" may be a, t, c, g, other or unknown
  misc_feature (524)..(524): "n" may be a, t, c, g, other or unknown
  misc_feature (635)..(635): "n" may be a, t, c, g, other or unknown
  misc_feature (679)..(679): "n" may be a, t, c, g, other or unknown
  misc_feature (713)..(713): "n" may be a, t, c, g, other or unknown
  misc_feature (721)..(721): "n" may be a, t, c, g, other or unknown
  misc_feature (733)..(733): "n" may be a, t, c, g, other or unknown
  misc_feature (737)..(737): "n" may be a, t, c, g, other or unknown
naaggaactttaaattcttatatttacttttctctcagtaaattgttaaattttcactcagcaaaagattggcatttgttaagtgttctatatttagtactaaaatcacagtcatgaaatcatagtcataaaatggtcttcacacagcagtcatccgtgtcatttatcattttgtaatattaaattatggcaattttatttcaaactaaagtttgaacaccggaaagtcattactcagtgatttgtaatttgggacttggattatttatctagagatgtttgtatattttgtcagtaactaatactgcgctgccatcatggtgactgtcatggttctacagaaatgccctccatgtgtccctctaatgttgcatgtttcagtgggttggaagttttgtatatttattgtattaacacagagtgtcataaaataaaatgctgtttactggatgtttgtttgtataattttgaacactataatagcaattcagagacagacattgttaaaggtttgatgtatatanaaattccatgtttgattttttaaaatatgtgtataagtctgtcatgtgctaaacaaaataatatgaaagacctagttaaaaattctaaccaatgttaaaatgaccattttnctgttgcattaaaacctttacaggttaatggaacatgaacttcnccccatattaaatattttgggccctttaaggtcnaaatacanatctcctaaaanttanattccaaatggaaaaacctattc

SEQ ID NO: 2796 - DNA, 577 bp, Homo sapiens
  misc_feature (482)..(482): "n" may be a, t, c, g, other or unknown
  misc_feature (528)..(528): "n" may be a, t, c, g, other or unknown
  misc_feature (541)..(541): "n" may be a, t, c, g, other or unknown
  misc_feature (557)..(557): "n" may be a, t, c, g, other or unknown
  misc_feature (564)..(564): "n" may be a, t, c, g, other or unknown
tgggggtcacgtccaggtgatggacccggagcccgtccccccaatccctcaccccccacacctcagccactggagactgatgatccaaccacaggatccctactctttggccacgagatcccagtacccagatcctggatcctagactcctatgccccaaccattgggtcatgggatcccagcacccagatcctggatcctagactcctatgccccaaccactgggtcatgcgatccccacccttcagccactagatcccagatccccctgtaaccataactgtggatcccttacttcagcaactcaagtctgctaccctaaccacaagattcaagattatccacaccccagcccttaatccccatcccccaaatcactggatcctgcagccccacatcctaaggtggatcccacgcttccctgtgccccctactggatcctggacctctacgtcttaaccactggatcccacacaaatcantgaatggatcccaacaccccaaccacaggagcacggattccctgtncctcaacacccanaccctgcctccctcangcaccanatccagtgtccta

SEQ ID NO: 2797 - DNA, 737 bp, Homo sapiens
  misc_feature (1)..(1): "n" may be a, t, c, g, other or unknown
  misc_feature (571)..(571): "n" may be a, t, c, g, other or unknown
  misc_feature (671)..(671): "n" may be a, t, c, g, other or unknown
  misc_feature (691)..(691): "n" may be a, t, c, g, other or unknown
  misc_feature (717)..(717): "n" may be a, t, c, g, other or unknown
  misc_feature (723)..(723): "n" may be a, t, c, g, other or unknown
  misc_feature (735)..(735): "n" may be a, t, c, g, other or unknown
naatggcattgaaacgaatgggaattgtaagcgactatgagaaaatccgtacctttgccgtagcaatagtaggtgttggtggagtaggtagtgtgactgctgaaatgctgacaagatgtggcattggtaagttgctactctttgattatgacaaggtggaactagccaatatgaatagacttttcttccaacctcatcaagcaggattaagtaaagttcaagcagcagaacatactctgaggaacattaatcctgatgttctttttgaagtacacaactataatataaccacagtggaaaactttcaacatttcatggatagaataagtaatggtgggttagaagaaggaaaacctgttgatctagttcttagctgtgtggacaattttgaagctcgaatgacaataaatacagcttgtaatgaacttggacaaacatggatggaatctggggtcagtgaaaatgcagtttcagggcatatacagcttataattcctggagaatctgcttgttttgcgtgtgctccaccacttgtattgctgcaaatattgatgaaaagacctgaaacganaaggtgtttgtgcagccagtcttcctaccactatgggtgtggttgctgggatcttaatacaaaacgtgttaaagtttctgttaaattttggtactgttantttttaccttggataccatnccatgccggaattttttcccactatntccatnaaacccaatccncc

SEQ ID NO: 2798 - DNA, 492 bp, Homo sapiens
  misc_feature (435)..(435): "n" may be a, t, c, g, other or unknown
  misc_feature (449)..(449): "n" may be a, t, c, g, other or unknown
  misc_feature (453)..(453): "n" may be a, t, c, g, other or unknown
  misc_feature (470)..(470): "n" may be a, t, c, g, other or unknown
  misc_feature (483)..(483): "n" may be a, t, c, g, other or unknown
aagatcattcttttacttgtctatggctgcttttctgtggcagagtagctgccacagaaactatagcccacaaagcctgatatttactgtctgtctgtttatggaaaaaatttatcaacccatggtctatagtatagtgtgatatgactactgttccaatgtattgaagtgttgggatagttttttcaaatgttttcagatgttcttgttttagaatcattgtcacctttaagaggaaaaaggtcatcactagataatctaaacagattgttgcttctcagtgttagcaaggaaaataatctagtttcaaattacattgcagtataatgaaaaagatccatatactgtggaatgatattcttttaaaattatttgctatggcttggtaaaaatgtactttttccagtagcacatatcacaagaacctcactgtanttgaaagccatctntctntagtatttgtttatccntttaggagagtcnagcaaaggt

SEQ ID NO: 2799 - DNA, 816 bp, Homo sapiens
  misc_feature (509)..(509): "n" may be a, t, c, g, other or unknown
  misc_feature (536)..(536): "n" may be a, t, c, g, other or unknown
  misc_feature (580)..(580): "n" may be a, t, c, g, other or unknown
  misc_feature (748)..(748): "n" may be a, t, c, g, other or unknown
  misc_feature (769)..(769): "n" may be a, t, c, g, other or unknown
  misc_feature (773)..(773): "n" may be a, t, c, g, other or unknown
  misc_feature (789)..(789): "n" may be a, t, c, g, other or unknown
  misc_feature (799)..(799): "n" may be a, t, c, g, other or unknown
cagcccacctcttgcatcgtcacctacaggtatctaagcaatggatccaagccctggaggttggtgagagccatgtattacccctagatgaaattggacaagagaccatgaccgtaaccctcctcgatgccaatcactgtcctggttctgtcatgtttctctttgaaggatattttggaaccatcctctacacaggtgattttcgatacacaccatccatgctaaaggagccagccctgacactggggaaacagatccatactttatacctagacaacaccaattgcaatccagccctggttcttccttcccgacaagaagctgcccaccagattgtccagctcattcgaaaacacccacaacataacataaagattggactctacagcctgggaaaggaatcactgctggagcagctggccctggagtttcagacctgggtggtattgagtcctcggcgcctggagttggtacagctactgggcctggcagatgtgttcacagtggangagaagctggccgcatccatgcagtanaccatatggagacctgccattccaacatgctgcgttggaaccanacccaccctacgattgctatccttcccacaaagccgaaaaatccacagctcccaccctgatatccacgtcatcccttactctgaacattcctcttactccgaacttcctgcctttgtcccaacactgaaaccttgccaagttggttgcccattgttaattccgccggnccctgttggaaaggtttccangganagttctgaaaccccanggattctccngtgccccctgaaattcc

SEQ ID NO: 2800 - DNA, 616 bp, Homo sapiens
  misc_feature (431)..(431): "n" may be a, t, c, g, other or unknown
  misc_feature (456)..(456): "n" may be a, t, c, g, other or unknown
  misc_feature (557)..(557): "n" may be a, t, c, g, other or unknown
  misc_feature (586)..(586): "n" may be a, t, c, g, other or unknown
  misc_feature (588)..(588): "n" may be a, t, c, g, other or unknown
  misc_feature (598)..(598): "n" may be a, t, c, g, other or unknown
  misc_feature (614)..(614): "n" may be a, t, c, g, other or unknown
gagatcagaacaatggcctagggtcaggcccagccccaggcccagtggtattactgaattcactgaatgtggatgcagtatgtgagaagctgaaacaaatagaagggctggaccagagtatgctgcctcagtattgtaccacgatcaaaaaggcaaacataaatggccgtgtgttagctcagtgtaacattgatgagctgaagaaagagatgaatatgaattttggagactggcaccttttcagaagcacagtactagaaatgagaaacgcagaaagccacgtggtccctgaagacccacgtttcctcagtgagagcagcagtggcccagccccgcacggtgagcctgctcgccgcgcttcccacaacgagctgcctcacaccgagctctccagccagacgccctacacactcaacttcagcttcgaaganctgaacacgcttggcctggatgaangtgcccctcgtcacagtaatctaagttggcagtcacaaactcgcagaaccccaagtctttcgagtctcaattcccaggattccagtattgaaatttcaaancttactgataaggtgcaggccgagtatananatgcctatanagaatacattgctccnat

SEQ ID NO: 2801 - DNA, 620 bp, Homo sapiens
  misc_feature (205)..(205): "n" may be a, t, c, g, other or unknown
  misc_feature (304)..(304): "n" may be a, t, c, g, other or unknown
  misc_feature (440)..(440): "n" may be a, t, c, g, other or unknown
  misc_feature (446)..(446): "n" may be a, t, c, g, other or unknown
  misc_feature (481)..(481): "n" may be a, t, c, g, other or unknown
  misc_feature (524)..(524): "n" may be a, t, c, g, other or unknown
  misc_feature (538)..(538): "n" may be a, t, c, g, other or unknown
  misc_feature (544)..(544): "n" may be a, t, c, g, other or unknown
  misc_feature (598)..(598): "n" may be a, t, c, g, other or unknown
  misc_feature (601)..(601): "n" may be a, t, c, g, other or unknown
ctcggttcctctttcctcgctcaagatggcgctgctcgcgatgcattcttggcgctgggcggccgcggcggctgctttcgaaaagcgccggcactccgcgattctgatccggcctttagtctctgttagcggctcaggtccgcagtggaggccacatcaactcggcgccttgggaaccgctcgagcctaccagcagattccagantcattaaaaagtatcacatggcagaaattgggaaaaggcaattcaggacagttcttagatgctgcaaaggctctccaggtatggccactgatagaaaanaagacatgttggcatggtcatgcaggaggaggactccacacagacccaaaagaagggttaaaagatgttgatactcggaaaatcataaaagcaatgctttcttatgtgtggcccaaagacaggccagatctacganctaganttgccatttcgctgggatttttgggtggtgcaaangccatgaatattgtggttcccttcatgtttaaatatgctgtanacagcctcaaccanatgtcnggaaacatgctgaacctgagtgatgcccccaatacattgcaaccatggcaacancanttctgattggctatggtgt

SEQ ID NO: 2802 - DNA, 604 bp, Homo sapiens
  misc_feature (321)..(321): "n" may be a, t, c, g, other or unknown
  misc_feature (375)..(375): "n" may be a, t, c, g, other or unknown
  misc_feature (411)..(411): "n" may be a, t, c, g, other or unknown
  misc_feature (443)..(443): "n" may be a, t, c, g, other or unknown
  misc_feature (469)..(469): "n" may be a, t, c, g, other or unknown
  misc_feature (540)..(540): "n" may be a, t, c, g, other or unknown
  misc_feature (554)..(554): "n" may be a, t, c, g, other or unknown
  misc_feature (570)..(570): "n" may be a, t, c, g, other or unknown
  misc_feature (580)..(580): "n" may be a, t, c, g, other or unknown
  misc_feature (593)..(593): "n" may be a, t, c, g, other or unknown
aagatggcggaccttgattcgcctccgaagctgtcaggggtgcagcagccgtctgagggggtgggaggtggccgctgctccgaaatctccgctgagctcattcgctccctgacagagctgcaggagctggaggctgtatacgaacggctctgcggcgaggagaaagtggtggagagagagctggatgctcttttggaacagcaaaacaccattgaaagtaagatggtcactctccaccgaatgggtcctaatctgcagctgattgagggagatgcaaagcagctggctggaatgatcacctttacctgcaacctggctganaatgtgtccagcaaagttcgtcagcttgacctggccaagaaccgcctctatcangccattcagagagctgatgacatcttggacctgaanttctgcatggatggagttcagactgctttgangaatgaagattatgagcaggctgcancacatattcatccgctacttgtgcctggacaagtcggtcattgaactcagccgacagggccaaggggggancatgattgatgccnacctgaaattgctgcnggaagctgancaacgtctcaaanccattgtggca

SEQ ID NO: 2803 - DNA, 653 bp, Homo sapiens
  misc_feature (99)..(99): "n" may be a, t, c, g, other or unknown
  misc_feature (188)..(188): "n" may be a, t, c, g, other or unknown
  misc_feature (497)..(497): "n" may be a, t, c, g, other or unknown
  misc_feature (564)..(564): "n" may be a, t, c, g, other or unknown
  misc_feature (604)..(604): "n" may be a, t, c, g, other or unknown
  misc_feature (632)..(632): "n" may be a, t, c, g, other or unknown
  misc_feature (638)..(638): "n" may be a, t, c, g, other or unknown
  misc_feature (645)..(645): "n" may be a, t, c, g, other or unknown
ctccgagcaggacactgctacttaacaaggtggtttgagccaaactgtggcacgtttcaggcaggattcctccttcattcaaactgcatcacccaggantctgcaaattccccaaagtaggaggaaaaatgaccacattcaaggaggcagtgaccttcaaggatgtggctgtggtcttcactgaggangagctggggctgctggaccctgcccagaggaagctgtaccgagatgtgatgctggagaacttcaggaacctgctctcagtggggcatcaaccgttccaccaagatacttgccacttcctaagggaagaaaagttttggatgatggggacagcaacccaaagagaagggaattcaggaggcaagatccaaactgagttggagtctgttccagaagcaggagcacatgaagagtggtcctgccagcaaatctgggaacaaattgcaaaagacttaaccaggtctcaggactctatcataaataactctcanttctttgaaaatggtgatgtcccctcccaggttgaagcaggactacccacaattcatacagggacanaaaccttcccaggggtggggaagtgtaaacagtccttcantaatgttcccatctttgatcttcctcancagttntactcanaaaaaaaa

SEQ ID NO: 2804 - DNA, 761 bp, Homo sapiens
  misc_feature (589)..(589): "n" may be a, t, c, g, other or unknown
  misc_feature (594)..(594): "n" may be a, t, c, g, other or unknown
  misc_feature (649)..(649): "n" may be a, t, c, g, other or unknown
  misc_feature (676)..(676): "n" may be a, t, c, g, other or unknown
  misc_feature (714)..(714): "n" may be a, t, c, g, other or unknown
  misc_feature (737)..(737): "n" may be a, t, c, g, other or unknown
  misc_feature (753)..(754): "n" may be a, t, c, g, other or unknown
ggttatattttagcacttgtccattcagacagccattagcacggcctaatacactgacgctggttcatgtccgcttacctcctggattctcagcatcttcaaccgtggaaaagccttcaaaagtacatagagctctttatagtaaaggtattctattgatggcagcctcagaaaatgaggataatgatattttatggtgtgtcaaccatgatacttttcctttccaaaagccaatgatggaaacccagatgacagctggtgttgatggtcattcctgggctctttctgcgatagatgaattgaaagtagataaaataattacacctttaaacaaagatcatattccaataactgattcaccagttgttgtacagcagcacatgttacctccgaagaaatttgttctcctctcagcacaggggagccttatgtttcataaacttagacctgtagatcaactgaggcatctacttgtgagtaatgtgggaggagatggagaagagattgaaagattctttaaattacatcaggaagaccaggcttgtgcaacttgccttattcttgcttgctccactgctgcctgtgatanaaaantatctgcctgggctactcgggctttctttaagtatggtggtgaagcacagatganatttccaaccactcttccgcctccaanttatgttggtcccatcttgggggtccctgtctaatccnagttcccccgttcccaatggtantcccaacccaaatccnnccttttt

SEQ ID NO: 2805 - DNA, 667 bp, Homo sapiens
  misc_feature (168)..(168): "n" may be a, t, c, g, other or unknown
  misc_feature (360)..(360): "n" may be a, t, c, g, other or unknown
  misc_feature (442)..(442): "n" may be a, t, c, g, other or unknown
  misc_feature (527)..(527): "n" may be a, t, c, g, other or unknown
  misc_feature (530)..(530): "n" may be a, t, c, g, other or unknown
  misc_feature (533)..(533): "n" may be a, t, c, g, other or unknown
  misc_feature (544)..(544): "n" may be a, t, c, g, other or unknown
  misc_feature (606)..(606): "n" may be a, t, c, g, other or unknown
  misc_feature (630)..(630): "n" may be a, t, c, g, other or unknown
  misc_feature (637)..(637): "n" may be a, t, c, g, other or unknown
  misc_feature (649)..(649): "n" may be a, t, c, g, other or unknown
  misc_feature (666)..(666): "n" may be a, t, c, g, other or unknown
agtgacgtcgcggccaaaacaagcccgggcttggaggcctgtactgaagctggcctcagatgggaaggcccgactcgctgtctgctgtcgtcggtggtcgcgagaccttgcactctcaccgggtcggcctccagcccctgtgcccgggatccgctcgccgcggatgancgagagtttcttcctgggacttttcgggcacagctggccggtggcgacataacggactttctttcctgcaagagtctcccctccagcgggagacagcgggctcctgtctcgggacgctgggacacctgtcgcctatttttaaatatccagattccaagaacacactggatactgctcttacaaaaccaagangaaatcatgaagaaatgttttagttattgaaactacagttgaaatcatggatacatcaacaaatctggatattggagcccancttatcgtggaagaatgtcccagcacttatagcctaactggcatgccagacattaaaatagaacatccactggacccaaattcanaanaanggtcagctcanggtgttgccatgggaatgaaattcatattgcctaaccgatttgatatgaatgtgtgttctcnatttgttgaaatccttaaatgaanaaaatantaaaaatattcnagatcaggttaactctna

SEQ ID NO: 2806 - DNA, 617 bp, Homo sapiens
  misc_feature (292)..(292): "n" may be a, t, c, g, other or unknown
  misc_feature (324)..(324): "n" may be a, t, c, g, other or unknown
  misc_feature (327)..(327): "n" may be a, t, c, g, other or unknown
  misc_feature (426)..(426): "n" may be a, t, c, g, other or unknown
  misc_feature (474)..(474): "n" may be a, t, c, g, other or unknown
  misc_feature (490)..(490): "n" may be a, t, c, g, other or unknown
  misc_feature (513)..(513): "n" may be a, t, c, g, other or unknown
  misc_feature (528)..(528): "n" may be a, t, c, g, other or unknown
  misc_feature (584)..(584): "n" may be a, t, c, g, other or unknown
  misc_feature (603)..(603): "n" may be a, t, c, g, other or unknown
  misc_feature (608)..(608): "n" may be a, t, c, g, other or unknown
  misc_feature (615)..(615): "n" may be a, t, c, g, other or unknown
tgtgctcggtggcccaggtgttcatcctgggcttgccctcccgcatcgcctcagtgtggtttgggcccaaagaggtgtccacagcttgtgccaccgccgtgctgggcaatcagcttggaactgcagttggctttttgctaccaccagttttagtacccaacacacagaatgacacaaatctcctggcttgtaatatcagcaccatgttttatggaacatcagctgttgccacacttttatttattttaacagcaattgccttcaaagaaaaacctcggtatccaccaagtcnggctcaagcagctcttcaagacagtccccctnaanagtactcctataagaaatcaataagaaacctgtttaaaaacattccttttgtccttctgttgatcacttatggtatcatgactggtgccttttattcantctcaacgtttttaaatcaaatgatattgacatattatgagggagaanaaatctatgctggaangattgggctaacgctagtattanctggaatggtgggcnctattctttgtggcttatggctggattatactaaaacatacaaacagactactctnatagtttatattttgtctnttatngggaatngt

SEQ ID NO: 2807 - DNA, 670 bp, Homo sapiens
  misc_feature (606)..(606): "n" may be a, t, c, g, other or unknown
  misc_feature (631)..(631): "n" may be a, t, c, g, other or unknown
  misc_feature (643)..(643): "n" may be a, t, c, g, other or unknown
  misc_feature (646)..(646): "n" may be a, t, c, g, other or unknown
  misc_feature (659)..(659): "n" may be a, t, c, g, other or unknown
ccatagaaaggcaatcaagcttactccctgcaatcggagtcaatatcaattcttgctcaagcaaacatgttttacagtgttggcgcaatggcaggaactagtcaagggcactttcagatctggaaagaggaaagagaaaatcactcttttgtgtttcttaaacatgccaatcaagcaagaaaatttattccaccccttcatatttgctctaaaatctggggccagtagttgaaatgtgatcttgttctttctcagccttttggcaatttaatgccaaatattccaaatgttagatgaatggcagtaataaaatgattcaaatgtttgataaatacaagctgagagcaaaatctggactctgaaaaatcggaactattttatcatgttgctaaaatgagagcatcattttcttccctctctgtaagtgcggtagtttaatttcctaaaaaaagttgctagtgccttgtttaagatgatcatgttatcatttcatgtggatattattggtctaattagaaggagaagattgattggatttactttaaagaaaattatctcctatgtctctttgaactcaggaatagaaaatgaccaagaagcacatcntcttcagatatgatttttgccctcnctggggatgttnaanccgaataggttcnacatatgctca

SEQ ID NO: 2808 - DNA, 772 bp, Homo sapiens
  misc_feature (303)..(303): "n" may be a, t, c, g, other or unknown
  misc_feature (465)..(465): "n" may be a, t, c, g, other or unknown
  misc_feature (480)..(480): "n" may be a, t, c, g, other or unknown
  misc_feature (489)..(489): "n" may be a, t, c, g, other or unknown
  misc_feature (585)..(585): "n" may be a, t, c, g, other or unknown
  misc_feature (632)..(632): "n" may be a, t, c, g, other or unknown
  misc_feature (647)..(647): "n" may be a, t, c, g, other or unknown
  misc_feature (689)..(689): "n" may be a, t, c, g, other or unknown
  misc_feature (715)..(715): "n" may be a, t, c, g, other or unknown
  misc_feature (730)..(730): "n" may be a, t, c, g, other or unknown
  misc_feature (748)..(748): "n" may be a, t, c, g, other or unknown
  misc_feature (766)..(766): "n" may be a, t, c, g, other or unknown
caactcctccaaggctcaaaatttcttcagaatctagttcctcatagatcttatgtttcaaccatgatcttggaagtagtgaagaatagcgttcatagctgggaccatgttactcagggcctcgtagaacttggtttcattttgatggattcatatgggccaaagaaggttcttgatggaaaaactattgaaaccagcccaagtctttctagaatgccaaaccagcatgcatgtaagctcggagctaatatcctgttggaaacttttaagatccatgagatgatcagacaagaaattttggancaggtcctcaacagggttgttaccagagcatcttctcccatcagtcatttcttagacctgctttcaaatatcgtcatgtatgcacccttagttcttcaaagttgttcttctaaagtcacagaagcttttgactatttgtcctttctgccccttcagactgtncaaaggctgcttaangcagtgcanccccttctcaaagtcagcatgtcaatgagagactgcttgatacttgtccttcggaaactatgtttgccaaccagcttgatgcccgaaaatctgcanttgctgggtttttgctgctcctgaaaaaatttaaagttttaggcagnctgtcatcctctcantgcagtccagtctctcaatgtcagtcaggttcatgttggatnttcacagccattacaattctgtcccnatgaaaactttttgncttgaaatcatgggatantttgaaggaaaatgcttnaaacca

SEQ ID NO: 2809 - DNA, 638 bp, Homo sapiens
  misc_feature (416)..(416): "n" may be a, t, c, g, other or unknown
  misc_feature (511)..(511): "n" may be a, t, c, g, other or unknown
  misc_feature (560)..(560): "n" may be a, t, c, g, other or unknown
  misc_feature (598)..(598): "n" may be a, t, c, g, other or unknown
  misc_feature (618)..(619): "n" may be a, t, c, g, other or unknown
  misc_feature (628)..(628): "n" may be a, t, c, g, other or unknown
ctcggccgccgtaggccggcttggaggctgggggagggcccagaagtggaataattcaggaaagtgcaggttctgggaagtctcggtgggttccccgcaaaatcaggcttgagtgcagtggcgcaatcgtggctcactgcagcctccatctcccggggctcaggtgattttcccacctcagctttcccgagtagctgggactacagagatggcatctcactatgttgcccaggctgatcttgaactcctgacctcaagtgatcctctctccttggcctcctaaagtgctgggattccaggtgtgagccacttcacccagccacatttatccatcttgtaaaatattgctttgttttttggtgcatttcaaagaatcactgaccctggaggatgtggctgtggagttcacttgggangagtggcagctcctcggccctgctcagaaagacctgtaccgagacgtgatgttggagaactatagcaacctcgtgtcagtggggtatcaagccancaaaccagatgcactcttcaagttggaacaaggagaccatggacagtanaaaatgaaatccacagccaaatctgtccagaaatcaanaaagttgacaatcatctacnnatgccctcncaaaagccaa

SEQ ID NO: 2810 - DNA, 646 bp, Homo sapiens
  misc_feature (278)..(278): "n" may be a, t, c, g, other or unknown
  misc_feature (439)..(439): "n" may be a, t, c, g, other or unknown
  misc_feature (586)..(586): "n" may be a, t, c, g, other or unknown
  misc_feature (598)..(598): "n" may be a, t, c, g, other or unknown
  misc_feature (602)..(602): "n" may be a, t, c, g, other or unknown
  misc_feature (631)..(631): "n" may be a, t, c, g, other or unknown
  misc_feature (639)..(639): "n" may be a, t, c, g, other or unknown
aactgagtgtgacgtcagaatcaccatggccagctatccttaccggcagggctgcccaggagctgcaggacaagcaccaggagcccctccgggtagctactaccctggaccccccaatagtggagggcagtatggtagtgggctaccccctggtggtggttatgggggtcctgcccctggagggccttatggaccaccagctggtggagggccctatggacaccccaatcctgggatgttcccctctggaactccaggaggaccatatggcggtgcanctcccgggggcccctatggtcagccacctccaagttcctacggtgcccagcagcctgggctttatggacagggtggcgcccctcccaatgtggatcctgaggcctactcctggttccagtcggtggactcagatcacagtggctatatctccatgaagganctaaagcaggccctggtcaactgcaattggtcttcattcaatgatgagacctgcctcatgatgataaacatgtttgacaagaccaagtcaggccgcatcgatgtctacggcttctcagccctgtggaaattcatccagcagtggaanaacctcttccancaantatgaacgggaacgctcgggctccattanctacacanaacttca

SEQ ID NO: 2811 - DNA, 422 bp, Homo sapiens
  misc_feature (324)..(324): "n" may be a, t, c, g, other or unknown
  misc_feature (331)..(331): "n" may be a, t, c, g, other or unknown
  misc_feature (376)..(376): "n" may be a, t, c, g, other or unknown
agactgctgtgctagcaatcagcgagattccgtgggcgtaggaccctctgagccaggtgtgggatatagtctcgtggtgcgccgtttcttaagccggtctgaaaagcgcaatattcggatgggagtgacccgattttccaggaactgaagttaaaagatgaagaatgtgagaggctttcaaaagtgcgagatcgacttggacaggaattggaagaactcacagctagtctatttgaggaagctcataaaatggtgagagaagcaaatatcaagcaggcaacagcagaaaaacagctaaaagaagcacaaggaaaaattgatgtncttcaanctgaagtagctgcattgaagacacttgtattgtccagttctccancatcacctacgcaggagcctttgccaggtggatagacaccttttaa

SEQ ID NO: 2812 - DNA, 517 bp, Homo sapiens
  misc_feature (434)..(434): "n" may be a, t, c, g, other or unknown
  misc_feature (440)..(440): "n" may be a, t, c, g, other or unknown
  misc_feature (449)..(449): "n" may be a, t, c, g, other or unknown
  misc_feature (455)..(455): "n" may be a, t, c, g, other or unknown
  misc_feature (458)..(458): "n" may be a, t, c, g, other or unknown
gctcccgggtcagctggtgctggcgtcaggcgctgggcgggctcgccaggacctggcaaggcttgtttactatggccgatgatctggagcagcagtctcaaggctggctgagtagctggctgcccacgtggcgccccacttccatgtctcaactgaaaaatgtggaagccaggatcctccagtgtctccagaataagttcctggccagatatgtatccctcccaaaccagaataagatctggacggtgactgtgagccccgagcaaaacgaccgcacccccttggtgatggtgcatggttttgggggcggcgtgggtctctggatcctcaacatggactcactgagtgcccgccgcacactgcacaccttcgatctgcttggcttcgggcgaagctcaaggccagcattcccaagggacccggaaggggctgangatgantttgtgacntccatnganacatggcgggagaccatgggggatccccaacatgatcctcctggcggcacagtttggga

SEQ ID NO: 2813 - DNA, 567 bp, Homo sapiens
  misc_feature (499)..(499): "n" may be a, t, c, g, other or unknown
  misc_feature (509)..(509): "n" may be a, t, c, g, other or unknown
  misc_feature (526)..(526): "n" may be a, t, c, g, other or unknown
  misc_feature (555)..(555): "n" may be a, t, c, g, other or unknown
  misc_feature (565)..(565): "n" may be a, t, c, g, other or unknown
agatggcgcggagcgggaggcggccctggagcgaccccggaggactaagcgggaacgggaccagctgtactacgagtgctactcggacgtttcggtccacgaggagatgatcgcggaccgcgtccgcaccgatgcctaccgcctgggtatccttcggaactgggcagcactgcgaggcaagacggtactggacgtgggcgcgggcaccggcattctgagcatcttctgtgcccaggccggggcccggcgcgtgtacgcggtagaggccagcgccatctggcaacaggcccgggaggtggtgcggttcaacgggctggaggaccgggtgcacgtcctgccgggaccagtggagactgtagagttgccggaacaggtggatgccatcgtgagcgagtggatgggctacggactcctgcacgagtccatgctgagctccgtcctccacgcgcgaaccaagtggctgaaggagggcggtcttctcctgccggcctccgccganctcttcatancccccatcagcgaccanatgctggaatggcgcctgggcttctgganccaggttaanca

SEQ ID NO: 2814 - DNA, 729 bp, Homo sapiens
  misc_feature (413)..(413): "n" may be a, t, c, g, other or unknown
  misc_feature (433)..(433): "n" may be a, t, c, g, other or unknown
  misc_feature (508)..(508): "n" may be a, t, c, g, other or unknown
  misc_feature (530)..(530): "n" may be a, t, c, g, other or unknown
  misc_feature (582)..(582): "n" may be a, t, c, g, other or unknown
  misc_feature (658)..(658): "n" may be a, t, c, g, other or unknown
  misc_feature (686)..(686): "n" may be a, t, c, g, other or unknown
  misc_feature (692)..(692): "n" may be a, t, c, g, other or unknown
  misc_feature (712)..(712): "n" may be a, t, c, g, other or unknown
  misc_feature (715)..(715): "n" may be a, t, c, g, other or unknown
aaaagacgccgggcgcggcggcgcgcggagaagtgcggcggagcggcgcctgcattagcaggtatgcaaagaagccttttcaccctgatgtccttagagataatatggatcagtccagagttctcctctgggtgaaagcagaaccctttatagtgggtgccttgcaggtcccccctccatccaagtttagtcttcactatctcaggaagatatccacctatgtgcaaatccgggccacagaaggagcttacccgcgcctctactggtctacatggaggcacatcgcttgtgggaagctgcagttggccaaggacctggcgtggctttacttcgaaatatttgatagtctttcaatgaagacacctgaggagcgcctggaatggtctgaggttctgtccaactgcatgtctgangaggaagttgaaaagcaganaaatcagctttcagtggacacgctacagtttctgctcttcttatacattcaacagttgaacaaggtctccctaangacatctttgattggcgaaaantggcccagtcccagaaacaaatctcagtctcctgacctgactgaaaaatctnattgtcataataagaactggaatgattacagtccccaaacttttgtctatgaatcatctgtctgatctcctccaancccctgcttttaaatccaaaacaactcncttgcntcatttcattcaacccatantantctaattgtctcca

SEQ ID NO: 2815 - DNA, 667 bp, Homo sapiens
  misc_feature (647)..(647): "n" may be a, t, c, g, other or unknown
  misc_feature (652)..(652): "n" may be a, t, c, g, other or unknown
  misc_feature (667)..(667): "n" may be a, t, c, g, other or unknown
tcttcaccactgctctcccagaggtccaggtccgggagatgacagtggctcccagaaagcccaggattcaatcgctgagagagtgcttaggcccgaatgccggcccaaatcgttctactcaccgtgtcggaggccgagagcgatgagagtacagggaagtgaggaagagggggtggccgccaggctcctccgcttccctgggtccaccgcggatccctcccgcttgtcaggaggcggccagcgggtaagccgactggcggaaatgcgagagaggagaagggaaaggtggagggctaaaggggcaaactgagaggaggcggatcccgcaaccgacactgggatcgtttcccctcgcaaagcgaacccaaaatggcggcggcagcggcggcagcagaatggccgcggcagctcctccagagggagggtgctaagggcgcctagcgacacccccaacctcccactcctccctcctcgcgttcttccccacggtcccccgcttcgcccgactccggccatgttacgcgcacgtcagcccgcacgcgttcgaatgtctacgggctcctcgctggctgctcccaccaaccaccaccttcggccgtcctgcgaaccagccatcccgtacgcgctcacccacgggaacctcctcncccanttctccctcccctcn

SEQ ID NO: 2816 - DNA, 796 bp, Homo sapiens
  misc_feature (143)..(143): "n" may be a, t, c, g, other or unknown
  misc_feature (197)..(197): "n" may be a, t, c, g, other or unknown
  misc_feature (434)..(434): "n" may be a, t, c, g, other or unknown
  misc_feature (503)..(503): "n" may be a, t, c, g, other or unknown
  misc_feature (544)..(544): "n" may be a, t, c, g, other or unknown
  misc_feature (619)..(619): "n" may be a, t, c, g, other or unknown
  misc_feature (628)..(628): "n" may be a, t, c, g, other or unknown
  misc_feature (634)..(634): "n" may be a, t, c, g, other or unknown
  misc_feature (650)..(650): "n" may be a, t, c, g, other or unknown
  misc_feature (715)..(715): "n" may be a, t, c, g, other or unknown
  misc_feature (765)..(765): "n" may be a, t, c, g, other or unknown
  misc_feature (767)..(767): "n" may be a, t, c, g, other or unknown
  misc_feature (771)..(771): "n" may be a, t, c, g, other or unknown
  misc_feature (790)..(790): "n" may be a, t, c, g, other or unknown
tacaaatcattcatgaaaactgaagctcagtctcccaggggtaagtcctgggccacgtgcaaacaatggcaaatccagctcttccatgatagagaaggcaaacacacccaccttcatcctgagcctaaaaggccacctctgancacttgggcagccactcctctgggcctcagagggccatgagcttggccaggtangcacagcggcggggaagtcacagctgtcaggtaccggccatggtgcaggtgggaataggagatgccagagctgctttagctgaggaaagcaaacagtcagcagtgctcaaaggagcaaaacttcgaatgtgcacattgacccctgacacctgcaagcataacacagatcctaagactagagtgaagtaggaagaagaattagaaaatccagtggatgtcctgagtatagggaaccanggccgttgaaaatcagtaaaggttgattacctggggcgagaccgggtgactgtggcagtgcaggtgaangtaccctggaccttctcagttcgctggcacataaggctccnccaataaagcgtggttctctctgtcatacacacacacacacacacacacacacacacacacacaatgattggganggctatatnatccancattagcttcctggtngtgcccaaccatgcttgatcgggaaatttttttttattattattatttttttaacctgttacctnaaggcatttctccgaatgttgaaaaagaaaaaagggaaatcccaaaaccnantccnttttgccctgccatatttnggcttg

SEQ ID NO: 2817 - DNA, 546 bp, Homo sapiens
  misc_feature (211)..(211): "n" may be a, t, c, g, other or unknown
  misc_feature (427)..(427): "n" may be a, t, c, g, other or unknown
  misc_feature (459)..(459): "n" may be a, t, c, g, other or unknown
  misc_feature (462)..(462): "n" may be a, t, c, g, other or unknown
  misc_feature (525)..(525): "n" may be a, t, c, g, other or unknown
  misc_feature (539)..(539): "n" may be a, t, c, g, other or unknown
  misc_feature (546)..(546): "n" may be a, t, c, g, other or unknown
cttccttttctccatggctacactgttgaggaccagcttcagtgaccctggagtgattcctcgggcgctaccagatgaagcagctttcatagaaatggagatagaagctaccaatggtgcggtgccccagggccagcgaccaccgcctcgtatcaagaatttccagataaacaaccagattgtgaaactgaaatactgttacacatgcaanatcttccggcctccccgggcctcccattgcagcatctgtgacaactgtgtggagcgcttcgaccatcactgcccctgggtggggaattgtgttggaaagaggaactaccgctacttctacctcttcatcctttctctctccctcctcacaatctatgtcttcgccttcaacatcgtctatgtggccctcaaatctttgaaaattggcttcttgganacattgaaaagaaactcctggaactgttctanaantcctcatttgcttctttacactctggtccgtcgtgggactgactggatttcatactttcctcntggctctcaaccanacaaccn

SEQ ID NO: 2818 - DNA, 488 bp, Homo sapiens
  misc_feature (361)..(361): "n" may be a, t, c, g, other or unknown
  misc_feature (370)..(370): "n" may be a, t, c, g, other or unknown
  misc_feature (452)..(452): "n" may be a, t, c, g, other or unknown
  misc_feature (471)..(471): "n" may be a, t, c, g, other or unknown
  misc_feature (487)..(487): "n" may be a, t, c, g, other or unknown
ctttcgcgtcccccaccctctcggctccgcctggcagcagctccgccgcccagaggcgtccgagaccctccgactcgtgggtacgcataggcctcgccagcgagccttgcccaggcaacgagtcgccagcccgccccctcgccgcgggctaggtctcacctcgccaccagtacgtcttggacaagtagtgccaggtctgatgccgggtgtggtgagtgccgccgggacccaggtgcgccgcctcgatgaggtcccggcgtcgctccggctgcagcaccacctccagctccgcgaaggtcttgcggtgccgctgccgccgctggtaatacagaatcccgccgcgcaccacgtagcaggcggnagcttttcngattttacgcttgacattgccctcggtgcccggcgcatacagctcgcgctcgttcgtcaggtaacacaggatggcccggtanctttcctcgcttgacatcncggacgcggctccctna

SEQ ID NO: 2819 - DNA, 639 bp, Homo sapiens
  misc_feature (130)..(130): "n" may be a, t, c, g, other or unknown
  misc_feature (421)..(421): "n" may be a, t, c, g, other or unknown
  misc_feature (446)..(446): "n" may be a, t, c, g, other or unknown
  misc_feature (478)..(478): "n" may be a, t, c, g, other or unknown
  misc_feature (508)..(508): "n" may be a, t, c, g, other or unknown
  misc_feature (525)..(525): "n" may be a, t, c, g, other or unknown
  misc_feature (556)..(556): "n" may be a, t, c, g, other or unknown
  misc_feature (571)..(571): "n" may be a, t, c, g, other or unknown
  misc_feature (598)..(598): "n" may be a, t, c, g, other or unknown
  misc_feature (630)..(630): "n" may be a, t, c, g, other or unknown
  misc_feature (633)..(633): "n" may be a, t, c, g, other or unknown
gtagtagctgccaggctgtcccccgccctgcccggcccgagccccgcgggccgccgccgccaccgccgccatgaagaagcagttcaaccgcatgaagcagctggctaaccagaccgtgggcagagctganaaaacagaagtccttagtgaagatctattacagattgagagacgcctggacacggtgcggtcaatatgccaccattcccataagcgcttggtggcatgtttccagggccagcatggcaccgatgccgagaggagacacaaaaaactgcctctgacagctcttgctcaaaatatgcaagaagcatcgactcagctggaagactctctcctggggaagatgctggagacgtgtggagatgctgagaatcagctggctctcgagctctcccagcacgaagtctttgttgagaangagatcgtggaccctctgtacggcntagctgaggtggagattcccaacatccagaancagagggagcagcttgcaagattggtgttngactgggattcagtcanagccaggtggaaccaagctcacaaatcctcngggaaccaactttcnggggcttccatcaaaaatagatctctnaagggaagaaatggatgaagctggaaataaantanaacagt

SEQ ID NO: 2820 - DNA, 633 bp, Homo sapiens
  misc_feature (211)..(211): "n" may be a, t, c, g, other or unknown
  misc_feature (494)..(494): "n" may be a, t, c, g, other or unknown
  misc_feature (535)..(535): "n" may be a, t, c, g, other or unknown
  misc_feature (555)..(555): "n" may be a, t, c, g, other or unknown
  misc_feature (566)..(566): "n" may be a, t, c, g, other or unknown
  misc_feature (600)..(600): "n" may be a, t, c, g, other or unknown
  misc_feature (631)..(631): "n" may be a, t, c, g, other or unknown
ggcagccctccccagtggagcccccgaggacccttttatttctgcaggttattgcttgatgacttgggaatgaattcttgggacagaaggaagaattttcatctattgaagaaaaattcaaaattattgagagagctgaaaaatttggactcccgccagtgccgtgagacacacaaaatcgcagtgttttacattgctgaaggtcaagaanacaagtgttcaatcctctctaatgaaagaggaagccaagcatatgaagactttgttgctggacttggatgggaggtggatctctccacccactgtgggttcatgggtggccttcagcgcaatggcagcaccgggcagacggccccttactatgctacctcaactgtggaagtgattttccatgtttccactcgaatgccgtcagactcagatgattccctcaccaaaaagcttcgtcacttggggaatgacgaggtccatatcgtctggtctgaacactccanagactaccgcaggggtattatcccaactgcctttggagatntttcactcattatttacccnatgaagaatcncatgttcttcatcgcgataacgaaaaaacctgangttcccttttttgggcctctgtttgatggancc

SEQ ID NO: 2821 - DNA, 457 bp, Homo sapiens
  misc_feature (172)..(172): "n" may be a, t, c, g, other or unknown
  misc_feature (339)..(339): "n" may be a, t, c, g, other or unknown
  misc_feature (385)..(385): "n" may be a, t, c, g, other or unknown
  misc_feature (422)..(422): "n" may be a, t, c, g, other or unknown
  misc_feature (453)..(453): "n" may be a, t, c, g, other or unknown
ggattggaagcagaggaagctgaagaaaagtaatgtagtttccttaaaggcatacaaaggactggcagaagtcgctgtgaagagcttgtgtgagctgttggtggcactacctcattttaactttcacaacaacatcatcgtattgattgtccctctcatgaatgacatgtcnaaattgatatctgaaatgtgttgtgaagctgtgaagaaactctttaagcaagataaattaggccaagcttctcttggtgtaattaaagtgatttctggttttgtgaagggcagaaattacgaagttaggccaggagatgttaaaaacatttttatgcctgagaatcnaggaagtagaagtgaaaaaagatacagaagacattgatagaccagnaaaatttatgactttcaaagaaaagagaaaatctctntcgagaatgcagagaaagtgggaagaaagcngaag

SEQ ID NO: 2822 - DNA, 689 bp, Homo sapiens
  misc_feature (7)..(7): "n" may be a, t, c, g, other or unknown
  misc_feature (639)..(639): "n" may be a, t, c, g, other or unknown
  misc_feature (641)..(641): "n" may be a, t, c, g, other or unknown
  misc_feature (680)..(680): "n" may be a, t, c, g, other or unknown
  misc_feature (682)..(682): "n" may be a, t, c, g, other or unknown
  misc_feature (685)..(685): "n" may be a, t, c, g, other or unknown
gcagcancatatctccctattatagaccagaatacaggaatatcgagcacttaagtaacttagctgactttacacaggttataataaagagttgaggttcataaccaggctgttgactccaaaggccataattttactctcagctaccaacatagcctgcgtcttagctagttcactcagttacaccaacccatatctgcatagatgcagtcttttttaggagggaaatactcagtaatttcttttattctaaccaaagtctttgcatcttttaatctggagtctatattttacatacactgtgagtgaagagatctctcaatattagaattgtaaatgtttgctgatctttgcatttttatttccataatccaaatgagtcataatccatatgggttttggttttaaaatggattagtaaatggttaaattaatagacccaatttcaaaataaggttttttttgaattctactctcttgatgttgcacctgaatacacaagtaaatatggcctgctatggcaggctaaaagtgaccaagtttttgaaactaaatccacattgggagcagttttggacagacagacccacttcaagtgctggtagaaataacattatcctgaggggatagtccaactananagtactctgttaaaattagcatccagaaaatctctaaanantangggc

SEQ ID NO: 2823 - DNA, 672 bp, Homo sapiens
  misc_feature (475)..(475): "n" may be a, t, c, g, other or unknown
  misc_feature (500)..(500): "n" may be a, t, c, g, other or unknown
  misc_feature (512)..(512): "n" may be a, t, c, g, other or unknown
  misc_feature (541)..(541): "n" may be a, t, c, g, other or unknown
  misc_feature (593)..(593): "n" may be a, t, c, g, other or unknown
  misc_feature (610)..(610): "n" may be a, t, c, g, other or unknown
  misc_feature (628)..(628): "n" may be a, t, c, g, other or unknown
  misc_feature (648)..(648): "n" may be a, t, c, g, other or unknown
  misc_feature (654)..(654): "n" may be a, t, c, g, other or unknown
ggaagtcagatgaaaaaattgtgattcaccataagccattggagatccacatgggagccaactctctgcggtgaaaagaaagggattatctcagacagtaagccaggaggaaagaaagagacaagaggctatctttgaagtcatatcctctgaacattcatatttactcagcttggagatcttgatacgaatgtttaaaaattctaaagaactgagtgatacaatgactaaaaccgagaggcaccatcttttctccaatattacagatgtctgtgaggcaagcaaaaagttctttatagagttggaagcaagacatcagaataatatcttcatagatgacataagtgacattgtggaaaaacacacagcatccacatttgacccatatgtgaaatactgcacaaatgaagtctaccaacaacgaacactacaaaaattgttagctaccaatccttcctttaaggaagtattgtcnaggattgagtcccatgaagactgtnggaacttacccntgatctcttttctcattctccccatgcanaaggtgacccgccttcccctgctgatggatactatctgtcaaaaaacacctnagggactctccgaagtntgaagtctgccaaaaganccttggaaggaagttagccnagtttngttcgactatgccatgga

SEQ ID NO: 2824 - DNA, 681 bp, Homo sapiens
  misc_feature (467)..(467): "n" may be a, t, c, g, other or unknown
  misc_feature (488)..(488): "n" may be a, t, c, g, other or unknown
  misc_feature (500)..(500): "n" may be a, t, c, g, other or unknown
  misc_feature (602)..(602): "n" may be a, t, c, g, other or unknown
  misc_feature (639)..(639): "n" may be a, t, c, g, other or unknown
  misc_feature (648)..(648): "n" may be a, t, c, g, other or unknown
  misc_feature (669)..(669): "n" may be a, t, c, g, other or unknown
  misc_feature (677)..(677): "n" may be a, t, c, g, other or unknown
tagcattaaagccttaatgaatgggtgtcattttctaccagcctaagtttcatcaagaacaaatacaagtatattttgaatttagatacctcctttaatccatttggcatcaactgtttcaaatcatgagaaaaatactaggaaatttaagttttagtaaaactctgtcaagttaactttgaattttatatcaagaagaaactattgagaaaaaaacctcatgcttttacacaatagtatactattttcttaacagcaaacagacatttttctcttacgtaccagctcataatatgtctgtctaaaattgttgggacggatgttttgtcccaaagactttctcagagttgtgcacttagtgttgagccataactactgtctggatgcccagaggaggcacatataattttattattttaaaatagcatctgttagccagccacggtggctcatgcctgtaatcccancacgtggggaggctgaagcangcggatcatgangtcaggagattgagaccatcctggctaacacagtgaaaccccatctctactaaaaatacaaaaaaattagccaggcatggtggcgggcgcctgttctcccancaactcagggaggccctacctcccacctcagtagganaaatggtgntgaaccccggggaggcgggancttggcantgga

SEQ ID NO: 2825 - DNA, 406 bp, Homo sapiens
  misc_feature (57)..(57): "n" may be a, t, c, g, other or unknown
  misc_feature (103)..(103): "n" may be a, t, c, g, other or unknown
  misc_feature (320)..(320): "n" may be a, t, c, g, other or unknown
  misc_feature (400)..(400): "n" may be a, t, c, g, other or unknown
  misc_feature (403)..(403): "n" may be a, t, c, g, other or unknown
aatgcggaaaaaaaaaaaaaaaaaaaggaaaatccttagcaggttctagcatgcaanagttcagtaaatggttatcgtcattattatctttggtatagtaaanattggcatgttaacatacactgaggatttagtaaatgtggtgtaagtatggtgcatgctctttgttttgtttggcgtaacagctttattgagctatacaacttacccatttaaactgtacagttcagtaggctttagtgtattcccagggttgtacatccatcacaatagtttcaggtagctctgcattgggcaatgctgttgggagcatcaggaanagcttcccaggaggtcacattaagtggatgttggcagacaggacttagaacagtggggaggagggtggtgtcccaagcanaancaa

SEQ ID NO: 2826 - DNA, 611 bp, Homo sapiens
  misc_feature (37)..(37): "n" may be a, t, c, g, other or unknown
  misc_feature (276)..(276): "n" may be a, t, c, g, other or unknown
  misc_feature (358)..(358): "n" may be a, t, c, g, other or unknown
  misc_feature (421)..(421): "n" may be a, t, c, g, other or unknown
  misc_feature (424)..(424): "n" may be a, t, c, g, other or unknown
  misc_feature (450)..(450): "n" may be a, t, c, g, other or unknown
  misc_feature (453)..(453): "n" may be a, t, c, g, other or unknown
  misc_feature (484)..(484): "n" may be a, t, c, g, other or unknown
  misc_feature (530)..(530): "n" may be a, t, c, g, other or unknown
  misc_feature (562)..(562): "n" may be a, t, c, g, other or unknown
  misc_feature (573)..(573): "n" may be a, t, c, g, other or unknown
  misc_feature (581)..(581): "n" may be a, t, c, g, other or unknown
  misc_feature (588)..(588): "n" may be a, t, c, g, other or unknown
gtcaccgtggtcggcggcggcggcggcggcggcacanaaccggtggtggagccgccgaggccacctcgtgtatgcagagaccatgtgtgtctgatctgctgggatcctagagctggaacaggagggtcacgcagcacaatgccagctctgcccctggaccaactccagatcacccacaaggacccgaagacaggaaagctgaggacttcaccagcgctgatttgtacctgtaactccatgatacaaatttgatttaaatgggagggggtcctgcanacccacatgagaggtggccttgaagaatccttgtggtacccacaggctctacagtttggaaactcgccaccccgagcagaangcagaccggtattttgtgttatacaaaccgccccctaaagacaacattcccgccctagtggangantacctggaaacgcgccaccttcgtanccnatgacctcgactggctcctggccttgcctcncgataaattctggtgccaggtgatctttgacgaaactctacagaantgcctggactcctacctgcgctattgtccccncaaattccacnaaggggtngcctccnccccttgaagttgtttaacatgc

SEQ ID NO: 2827 - DNA, 598 bp, Homo sapiens
  misc_feature (125)..(125): "n" may be a, t, c, g, other or unknown
  misc_feature (356)..(356): "n" may be a, t, c, g, other or unknown
  misc_feature (563)..(563): "n" may be a, t, c, g, other or unknown
  misc_feature (569)..(569): "n" may be a, t, c, g, other or unknown
  misc_feature (598)..(598): "n" may be a, t, c, g, other or unknown
aggcctgcgcttccgctcgcgagggggaggcgggacccgcgaggagtcgcgcggaggacggaggccacgatacctgcgtggctggggctgcgggctccggggtcaccaccctgggcgacccggangtggcgcctccgccggccgcagctggagaggagcgtgtccccaagccgggggagcaggacttgagcaggcacgcggggtcaccgccgggcagcgtggaagagccatctcctggaggagaaaactcacctggtggcggaggctccccttgtttgtcctcccggagcctggcgtggggttcttctgcgggaagagagagtgcgcgcggagatagcagtgtggaaacacgcgangagtctgagggcacgggcggccagcgctcagcctgcgccatgggtggtcccgggaccaagagcggggagcctttgtgtcctccgttactgtgtaatcaggacaaagaaaccttgactctgctcattcaggtgcctcggatccagccgcaaagtcttcaaggagatttgaatcccctctggttacaaattacgcttctccgcacaaanacttantttattccttctttttgcaatttgctccn

SEQ ID NO: 2828 - DNA, 724 bp, Homo sapiens
  misc_feature (476)..(476): "n" may be a, t, c, g, other or unknown
  misc_feature (532)..(532): "n" may be a, t, c, g, other or unknown
  misc_feature (647)..(647): "n" may be a, t, c, g, other or unknown
  misc_feature (667)..(667): "n" may be a, t, c, g, other or unknown
  misc_feature (689)..(689): "n" may be a, t, c, g, other or unknown
  misc_feature (707)..(707): "n" may be a, t, c, g, other or unknown
  misc_feature (721)..(721): "n" may be a, t, c, g, other or unknown
ggtttgcctatccagtatgtactcttcttccttgctaacagaatcttgaatttgcttgagataatagtaaataatttaaaatacctccataaatgcccttccagctagggtggtcatctagtccattggccaataaactagatcaaaagctacttcatggaaagctgttttttccttgatacctatatctttctgtaaaggactgctcagctggcataagctttctacttttaacctgtcttttctcttgtccagattgtgattcagtgtcaaagtggggcagtcattcgtaagtgctgagcattgtggagcaggaggggaaaggggcctgttctctcaaggaccttcactatccattcatttcctacccccagactcttgttagattgggctgatccaaactcataatatgaatagatggacattgaccaaagagaccagcagcagaacaaaagcataaacaaacatgagagtangctaattttaccaacctgaggtcaaaaagttctcatgagatctggtcgtttgaaancatgtaccacttccctcttcgctcactctctccctcccgctccaccatgttgaagattgtgcctgtttctccttcaccttctgccatgattgtaaatttcctgaagcctccccanccatgcctccttgtacaganactgtggaactgaagcccctanaacctggaaaaacatgtncatttacttttttngcc

SEQ ID NO: 2829 - DNA, 486 bp, Homo sapiens
  misc_feature (161)..(161): "n" may be a, t, c, g, other or unknown
  misc_feature (199)..(199): "n" may be a, t, c, g, other or unknown
  misc_feature (336)..(336): "n" may be a, t, c, g, other or unknown
  misc_feature (347)..(347): "n" may be a, t, c, g, other or unknown
  misc_feature (353)..(353): "n" may be a, t, c, g, other or unknown
  misc_feature (356)..(356): "n" may be a, t, c, g, other or unknown
  misc_feature (406)..(406): "n" may be a, t, c, g, other or unknown
  misc_feature (438)..(438): "n" may be a, t, c, g, other or unknown
  misc_feature (474)..(474): "n" may be a, t, c, g, other or unknown
  misc_feature (477)..(477): "n" may be a, t, c, g, other or unknown
  misc_feature (486)..(486): "n" may be a, t, c, g, other or unknown
aattatacctcaagaaagttgttttttaaaaagacagcgtaaggggtggggggcagttgagatgaagcaggaaaactgtgatcagaagcaaagctcaggggctgtctggcctggctgccccaagtcaaagcctgcatttcatacaggcaatgttagggtancccccaagccatgattcggaaagataaattgaccccanaaggaatagggctgggtcccttctcccttgacagctccctttctgtgttttttctggcacaagaaactctgtcatcttgtataaataggaaaaatttatggcagttttccctcttcttctccctggtgggctactangaaaggtctangggganganggacctgaaattccaaaaatataaatgtggaaagactggaaggggtcgangaatctctttgcctgccttactctggccccanctctcctttccctttgcatgtttgaccatctgggtnatnaagaaggtn

SEQ ID NO: 2830 - DNA, 267 bp, Homo sapiens
  misc_feature (42)..(42): "n" may be a, t, c, g, other or unknown
  misc_feature (151)..(151): "n" may be a, t, c, g, other or unknown
  misc_feature (186)..(186): "n" may be a, t, c, g, other or unknown
  misc_feature (229)..(229): "n" may be a, t, c, g, other or unknown
  misc_feature (262)..(262): "n" may be a, t, c, g, other or unknown
agaacgttgtgacagagcggtggcgggctgagcggtttcganccggcgtcggggaacggcggtaccgggcggctgcggggctggctccacccagcttgaagtctcggcgtccgcgtcctgcggtgccctggggtctcccgaagaccttgtncccgcgcggtttccttgggctggctttggacgacnctttccccttcctgctgcctaagatccgccgacattaatcccntcctagtggtccacggcggcggaaccggtcccntctcc

SEQ ID NO: 2831 - DNA, 385 bp, Homo sapiens
  misc_feature (11)..(11): "n" may be a, t, c, g, other or unknown
  misc_feature (188)..(188): "n" may be a, t, c, g, other or unknown
  misc_feature (338)..(338): "n" may be a, t, c, g, other or unknown
  misc_feature (357)..(357): "n" may be a, t, c, g, other or unknown
  misc_feature (368)..(368): "n" may be a, t, c, g, other or unknown
acctcccggangctctgctggtgcaggccccgcattggagggctcgattggctgcccggctggcactgacgtccccttggagctgggtggcaaaagagataaacagccatgtgcaactctctacactatatttaacagctgcggcggaaaaggcagggaagcagccacggtggcggctctgggggcanctcttgtcttcggggaaaaagcccttggaaccgggctggcatccgccttctcgcggtgagcgaagtcaccatgccagcttcccaaaaccgggcccgtgcccgggaccgcaacaacgtcctcaaccgggctgaattcctgtccctgaaccncccccccaaggggggcccngaaccccccanctcgggcagaaagcctc

SEQ ID NO: 2832 - DNA, 484 bp, Homo sapiens
  misc_feature (278)..(278): "n" may be a, t, c, g, other or unknown
  misc_feature (304)..(304): "n" may be a, t, c, g, other or unknown
  misc_feature (364)..(364): "n" may be a, t, c, g, other or unknown
  misc_feature (410)..(410): "n" may be a, t, c, g, other or unknown
  misc_feature (416)..(416): "n" may be a, t, c, g, other or unknown
  misc_feature (461)..(461): "n" may be a, t, c, g, other or unknown
  misc_feature (464)..(464): "n" may be a, t, c, g, other or unknown
  misc_feature (482)..(482): "n" may be a, t, c, g, other or unknown
accgtcttccgccgcacgtggattcagcgcgatgcccaaatccaagcgcgacaagaaagtctccttaaccaaaactgccaagaaaggcttggaattgaaacaaaacctgatagaagagcttcggaaatgtgtggacacctacaagtaccttttcatcttctctgtggccaacatgaggaacagcaagctgaaggacatccggaacgcctggaagcacagccggatgttctttggcaaaaacaaggtgatgatggtggccttgggtcggagcccatctnatgaatacaaagacaacctgcaccangtcagcaaaaggttgaggggtgaggtgggtctcctgttcaccaaccgcacaaaggaagangtgaatgagtggttcacgaaatacacagaaatggactacgcccganctggtnacaaagcagctttcactgtgagcctggatccaggggccctggaancanttcccccactccatggancc

SEQ ID NO: 2833 - DNA, 540 bp, Homo sapiens
  misc_feature (57)..(57): "n" may be a, t, c, g, other or unknown
  misc_feature (262)..(262): "n" may be a, t, c, g, other or unknown
  misc_feature (265)..(265): "n" may be a, t, c, g, other or unknown
  misc_feature (273)..(273): "n" may be a, t, c, g, other or unknown
  misc_feature (370)..(370): "n" may be a, t, c, g, other or unknown
  misc_feature (501)..(501): "n" may be a, t, c, g, other or unknown
  misc_feature (503)..(503): "n" may be a, t, c, g, other or unknown
  misc_feature (514)..(514): "n" may be a, t, c, g, other or unknown
  misc_feature (534)..(534): "n" may be a, t, c, g, other or unknown
  misc_feature (540)..(540): "n" may be a, t, c, g, other or unknown
gctgttatggccgcctccttgaggtagtatccgcacatgggaattctagggccgcangtgtatttacggtaactgtcgccactagatttcagcgcctttggactctcctgttttcactttcttttgttgactcccgtgtggccctcgtgggagcctgttttggctgcagcggtgtctggggtgatgtggaccccggagctggcaattctgaggggattccccactgaggctgagcggcagcaatggaaacaggagggggtcntcngttcaganagtggatctttcctacaattgctgctggaagggaactatgaagccatattcttaaattcaatgactcaaaatatttttaattcaacaacaaccgctnaagaaaagattgatagctacctggagaagcaggtagtaacattcctggattactcaacagatttggacacaacggaaagacaacagttgatatttctacttggtgtgagcagtttgcaactttttgttcanancaactgggacngggccccctgttgacttacnccctcn

SEQ ID NO: 2834 - DNA, 546 bp, Homo sapiens
  misc_feature (139)..(139): "n" may be a, t, c, g, other or unknown
  misc_feature (437)..(437): "n" may be a, t, c, g, other or unknown
  misc_feature (474)..(474): "n" may be a, t, c, g, other or unknown
  misc_feature (485)..(485): "n" may be a, t, c, g, other or unknown
  misc_feature (501)..(501): "n" may be a, t, c, g, other or unknown
  misc_feature (536)..(536): "n" may be a, t, c, g, other or unknown
  misc_feature (545)..(545): "n" may be a, t, c, g, other or unknown
cattccatgcagacaagcgtgtccttcatgagacaggattcagtactgagctagatcgtgtaaagaatctgcctcattgtgaaacggaaatatttgaagtgagatttgacccacagggggccaatcttcctgttggaancaaagaagtcattctgcccatcaaggtggttggagggccaacagttcacatctgtctccaagccaaggtgaccattccaaccatgactctctctcgtggaaaagtggactttgccacaattcagtgtggacagtgcctggtggaaactattcagctttccaatcatctccaagtcccttgtgaatggttcgtccagagccaaaagcctgttgacaagctggagaaacacatgccgaagtacttaagacagaaactacgcgctgaattaaagccaaagacacggatcttcgaaatccancccatttctggagtcttggatcctggtgagaaatccnacgtgcaagtnaaattcatgccaaaanaaaaaaaattctacagcccaaccctggtgtttcanattgcccana

SEQ ID NO: 2835 - DNA, 458 bp, Homo sapiens
  misc_feature (9)..(9): "n" may be a, t, c, g, other or unknown
  misc_feature (77)..(77): "n" may be a, t, c, g, other or unknown
  misc_feature (127)..(127): "n" may be a, t, c, g, other or unknown
  misc_feature (144)..(144): "n" may be a, t, c, g, other or unknown
  misc_feature (363)..(363): "n" may be a, t, c, g, other or unknown
  misc_feature (394)..(394): "n" may be a, t, c, g, other or unknown
  misc_feature (427)..(427): "n" may be a, t, c, g, other or unknown
  misc_feature (436)..(436): "n" may be a, t, c, g, other or unknown
  misc_feature (446)..(446): "n" may be a, t, c, g, other or unknown
gcgcatgcncgcgcccgggcggcgcgggatctgggtctggggatgtggtaccggctgctggcggcggccggcaatanaacggtggccaggccgctggccttgctgtggcgatgtggtggcccaggangcggcaggacggccaanaccagcgcgagggccctgggcaaggcccgacagtggttatggccagtgagaatgtgcggtgttgcattgcagaagaagctaggaaagctcatctggcctcctgttccagtgcttccaggggatccacgttcagaagctgactctgcaggcaagaccgacgttattttcctggtggctgtgttcaaaaccacccaaagggtttgagaaatactttaagangagtggaaggaacacaaactgagaaacatcnacagcaccaaaaaaagagactggtgaactaganaatgctgantctggaaganacggaggccgga

SEQ ID NO: 2836 - DNA, 634 bp, Homo sapiens
  misc_feature (9)..(9): "n" may be a, t, c, g, other or unknown
ggataaaancctaagagtttgggaatgggatatccctgtggatttcaagtacatagcagaacccagtatgcactcaatgcctgcagtgactttgtctccaaatggaaaatggctagcatgccaatcaatggacaaccaaatcttaatttttggagcacagaacagatttagattaaataagaaaaaaatttttaagggccatatggtagcaggctatgcttgtcaggtggacttttcaccagacatgagttatgtgatttcaggagatggaaatggaaaattaaacatttgggactggaagaccacaaaactctacagtcgatttaaagctcatgataaagtgtgtataggtgcagtgtggcatcctcatgaaacttctaaggtcataacatgtggttgggatggtctcattaaattgtgggattaatgagattaatccttaaactagctgggatcatttttgatccattgtcatatttatatttaattattaaatgtatctgatgataacttgatttacagataatgttgatgacattgaccctttgtttaaaaaaagaaactgtaaatttgacataatttcatttgcaacttcattttgttttttataaatgttatttatacagaaagtttg

SEQ ID NO: 2837 - DNA, 644 bp, Homo sapiens
  misc_feature (291)..(291): "n" may be a, t, c, g, other or unknown
  misc_feature (363)..(363): "n" may be a, t, c, g, other or unknown
  misc_feature (453)..(453): "n" may be a, t, c, g, other or unknown
  misc_feature (459)..(459): "n" may be a, t, c, g, other or unknown
  misc_feature (563)..(563): "n" may be a, t, c, g, other or unknown
  misc_feature (611)..(611): "n" may be a, t, c, g, other or unknown
  misc_feature (618)..(618): "n" may be a, t, c, g, other or unknown
  misc_feature (640)..(640): "n" may be a, t, c, g, other or unknown
  misc_feature (644)..(644): "n" may be a, t, c, g, other or unknown
ggaggaggccgcagcagtcgccgcgcgaacatggcggccgaaatccactccaggccgcagagcagccgcccggtgctgctgagcaagatcgaggggcaccaggacgccgtcacggccgcgctgctcatccccaaggaggacggcgtgatcacggccagcgaggacagaaccatccgggtatggctgaaaagagacagtggtcaatactggcccagcatttaccacacaatggcctctccttgctctgctatggcttaccatcatgacagcagacggatatttgtgggccangataatggagctgtaatggaatttcacgtttctgaagattttaataaaatgaactttatcaagacctacccngctcatcagaaccgggtgtctgcgattatcttcagcttggccacagagtgggtgatcagtaccggccacgacaagtgtgtgagctggatntgcacncggagcgggaacatgctcgggaggcacttcttcacgtcctgggcttcgtgtctgcaatatgactttgacactcagtatgctttcgttggtgattattctgggcngatcaccctgcttgaaacttgaacagaaaacgtgttcagtcctcaccnaccctcnaaaggaaatgaaagttttgttncccn

SEQ ID NO: 2838 - DNA, 539 bp, Homo sapiens
  misc_feature (143)..(143): "n" may be a, t, c, g, other or unknown
  misc_feature (186)..(186): "n" may be a, t, c, g, other or unknown
  misc_feature (189)..(189): "n" may be a, t, c, g, other or unknown
  misc_feature (248)..(248): "n" may be a, t, c, g, other or unknown
  misc_feature (312)..(312): "n" may be a, t, c, g, other or unknown
  misc_feature (354)..(354): "n" may be a, t, c, g, other or unknown
  misc_feature (397)..(397): "n" may be a, t, c, g, other or unknown
  misc_feature (443)..(443): "n" may be a, t, c, g, other or unknown
  misc_feature (507)..(507): "n" may be a, t, c, g, other or unknown
  misc_feature (512)..(512): "n" may be a, t, c, g, other or unknown
  misc_feature (527)..(527): "n" may be a, t, c, g, other or unknown
  misc_feature (536)..(536): "n" may be a, t, c, g, other or unknown
gctttcccagctagtcgaatcactggtgcacctccggaatccgaggttcgcattgctctcggacagagttctgcctccccagtactcccaaactcccagtcctgtgcaccaatgaggtccagctctgaggcttctttcctganaaaaaaatttggaagtccgtgactgtttcctggaggagctganaanaggaagctcacttccggcgtagggaggctttctgacccggaatggaggaggcggagganctgctcttggaggggaagaaggcgctgcaactcgcccgcgagccgcgcctgggcctggacttangatggaacccttccggagaaggctgtacgcagggcctcaaanacgtcccacccgagccgacccgagacatcctcgctttaaaganccttccccggggcttggcccttggcccctcactcgccaaggaacancgcttgggggtctggtgtgtcggggaccccctgcagcccggcctgctgtgggggccgctggaanaagantctgcctccaagganaagggcgangga

SEQ ID NO: 2839 - DNA, 764 bp, Homo sapiens
  misc_feature (70)..(70): "n" may be a, t, c, g, other or unknown
  misc_feature (139)..(139): "n" may be a, t, c, g, other or unknown
  misc_feature (544)..(544): "n" may be a, t, c, g, other or unknown
  misc_feature (648)..(648): "n" may be a, t, c, g, other or unknown
  misc_feature (680)..(680): "n" may be a, t, c, g, other or unknown
  misc_feature (683)..(683): "n" may be a, t, c, g, other or unknown
  misc_feature (723)..(723): "n" may be a, t, c, g, other or unknown
  misc_feature (747)..(747): "n" may be a, t, c, g, other or unknown
  misc_feature (757)..(757): "n" may be a, t, c, g, other or unknown
gggctccgtttgaaacatggcgcgggctggccctcggctggtgctgagcgaggaggcggttcgggcgaanagcggcttagggcctcaccgcgacctggctgagcttcagtcattgtctattcctggaacttaccaaganaagatcacccacctgggacattctctgatgagtttaacaggtctgaaatctttggatctctcgcgcaactccttggttagtctggagggcattcagtacctgactgcattggagagtctcaatctctactacaactgcatctcctcgttggcgaagtgtttcggctccacgccttaaccgagctcgtggatgtggacttccggctgaaccccgtggtgaaggttgagcctgactaccgcctttttgttgtgcacctgctccccaagctccagcagctggacgatcgccccgtgagagcaagcgagcggaaggcttcccgactgcattttgcatcagaggactcactcgactccaaagagagcgtcccagcttctttgaaagagggcagaccacaccaccccaganccaagtgcaccgaagccttggccaagcaaaacctggtcatggatgcggatgacgaagcagtcctgaacctcattggcagaatgcgaatggggaactcggcaggnctcccgggaacacgaacttcaccagaaagggngtnaggcccaatctcgttggttcccaaaaatccaaacttcttnttgaaccccgccatttggttacanttaccagttntggggga

SEQ ID NO: 2840 - DNA, 572 bp, Homo sapiens
  misc_feature (285)..(285): "n" may be a, t, c, g, other or unknown
  misc_feature (478)..(478): "n" may be a, t, c, g, other or unknown
  misc_feature (509)..(509): "n" may be a, t, c, g, other or unknown
  misc_feature (521)..(521): "n" may be a, t, c, g, other or unknown
  misc_feature (524)..(524): "n" may be a, t, c, g, other or unknown
  misc_feature (555)..(555): "n" may be a, t, c, g, other or unknown
ggccccacccccggcggcgcagcccgcccgcccgcgcgtccctcggtccacctgcagcagggaggaagacaggcaatccctccggctgtccgaccaagagaggccggccgagcccgaggcttgggcttttgctttctggcggagggatctgcggcggtttaggaggcggcgctgatcctgggaggaagaggcagctacggcggcggcggcggtggcggctagggcggcggcaaataaaggggccgccgccgggtgatgcggtgaccgctgcggcaggcccagganctgagtgggccccggccctcagcccgtcccgccggacccgctttcctcaactctccatcttctcctgccgaccgagatcgccgaggcggcctcaggctccctagccccttccccgtcccttccccgcccccgtccccgccccgggggccgccgccacccgcctcccaccatggctctgaagaaaatccacaangaattgaatgatctggcacgggaccctccancacagtgttcancangtcctgttggaaatgatatgttccattggcnactacaataatggggcc

SEQ ID NO: 2841 - DNA, 592 bp, Homo sapiens
  misc_feature (61)..(61): "n" may be a, t, c, g, other or unknown
  misc_feature (132)..(132): "n" may be a, t, c, g, other or unknown
  misc_feature (218)..(218): "n" may be a, t, c, g, other or unknown
  misc_feature (325)..(325): "n" may be a, t, c, g, other or unknown
  misc_feature (377)..(377): "n" may be a, t, c, g, other or unknown
  misc_feature (510)..(510): "n" may be a, t, c, g, other or unknown
  misc_feature (538)..(538): "n" may be a, t, c, g, other or unknown
  misc_feature (574)..(574): "n" may be a, t, c, g, other or unknown
  misc_feature (590)..(591): "n" may be a, t, c, g, other or unknown
ggttaatgttgctatcttaagcactggcatttgggcaaaacgtgactgtgttctgtggganaatccaaaggcattattcactctagttgaaatagaattgggtggctaaacagggtgtgtggtacccaaaanattaaatgttacatgtccttttagtccttgaccaggtctagccttggcagaagcaagggagccactaagccaaactccctgtgcanacagaccatgtttcaaggctggaagtagtgccctggcaacacacaaaaggaacggtgaaatggtaggcaaagtgaacttggctctgctggcctctttggggtcacanaaattgctccttgtggtaatcttatatttctgtcaggcacagggccaagaanctgtgtaacagacattactttgcttgcatctctttttcataccttttccctctgaagcagcttttgcttagaaaacagtcccttcactctgcctttcctcctaacttcctgtgcctcttcatgttctgctcangctttttaaagcaacgaagctgttgganaacttaaatccttgcaactgaaaaataagctacttnaaggcggtagaaatcnnt

SEQ ID NO: 2842 - DNA, 774 bp, Homo sapiens
  misc_feature (574)..(574): "n" may be a, t, c, g, other or unknown
  misc_feature (577)..(577): "n" may be a, t, c, g, other or unknown
  misc_feature (595)..(595): "n" may be a, t, c, g, other or unknown
  misc_feature (615)..(615): "n" may be a, t, c, g, other or unknown
  misc_feature (687)..(687): "n" may be a, t, c, g, other or unknown
  misc_feature (706)..(706): "n" may be a, t, c, g, other or unknown
  misc_feature (718)..(718): "n" may be a, t, c, g, other or unknown
  misc_feature (755)..(755): "n" may be a, t, c, g, other or unknown
  misc_feature (764)..(764): "n" may be a, t, c, g, other or unknown
gtcgggaccggcaagatggcggcgcggacagcgttcggtgctgtgtgccggcgcctctggcagggattagggaatttttctgtaaacacttctaagggcaatacagccaaaaatggtggcttgcttctcagtaccaatatgaagtgggtacagttttcaaacctacacgttgatgttccaaaggatttgaccaaacctgtggcaacaatctctgatgaaccagacatattatataagcgcctctcggttttggtgaaaggtcacgataaggctgtattggacagttatgaatattttgctgtgcttgctgctaaagaacttggtatctctattaaagtacatgaacctccaaggaaaatagagcgatttactcttctccaatcagtgcatatttacaagaagcacagagttcagtatgaaatgagaacactttacagatgtttagagttagaacatctaactggaagcacagcagatgtctacttggaatatattcagcgaaacttacctgaaggggttgccatggaagtaacaaagacacaattagaacagttaccagaacacatcaaggganccnatctgggaaacactatcngaagaaaaagaagaaagccngtcctaaagcctcagggaagccatttttgcctaaatttgaaatgaaggtgggccaaataaattatgtttaantggaaaatgcttcccactnaaaataattgantctgtcctaactgcctcccttgaattccccttgcccncatccactnaaaggcaggg

SEQ ID NO: 2843 - DNA, 565 bp, Homo sapiens
  misc_feature (516)..(516): "n" may be a, t, c, g, other or unknown
  misc_feature (529)..(529): "n" may be a, t, c, g, other or unknown
  misc_feature (553)..(553): "n" may be a, t, c, g, other or unknown
ctgcctgcgttagcggcggtggaggaggaggcagagaggagtggagggcggagtagacggaggaggctgctgcagagaagaaagtgtcagagccggttcggctttagagtgtggtgaagggtacttttcatggtgcatggaaggaaagccaatgcgcaggtgtaccaacattcgaccaggagagactggaatggatgtaacaagccgctgcacccttggagaccccaacaaactgccagaaggggttccccaacctgcccgcatgccctatatctcagacaagcaccctcgacaaaccttggaagtgattaaccttctgagaaagcaccgggagctatgtgatgtggtgctagttgtgggcgccaagaagatatatgcccatcgagtcattttgtcagcctgtagtccctacttccgagctatgtttacaggagaattggcagagagccgtcagacagaagtagtgatccgagacattgacgagagggctatggaattactgattgactttgcgtntacctcccagatnacagtagaagaaggcaatgttcanactcttctgcca

SEQ ID NO: 2844 - DNA, 704 bp, Homo sapiens
  misc_feature (92)..(92): "n" may be a, t, c, g, other or unknown
  misc_feature (444)..(444): "n" may be a, t, c, g, other or unknown
  misc_feature (522)..(522): "n" may be a, t, c, g, other or unknown
  misc_feature (548)..(548): "n" may be a, t, c, g, other or unknown
  misc_feature (555)..(555): "n" may be a, t, c, g, other or unknown
  misc_feature (634)..(634): "n" may be a, t, c, g, other or unknown
  misc_feature (669)..(669): "n" may be a, t, c, g, other or unknown
  misc_feature (675)..(675): "n" may be a, t, c, g, other or unknown
  misc_feature (677)..(677): "n" may be a, t, c, g, other or unknown
  misc_feature (691)..(691): "n" may be a, t, c, g, other or unknown
caaacgattctcctgccttagcctccccagtagctgggattacagttgcctgctgccatacctggctcattttttttttttttttaataaanacagggtgatctgtcaggtgatccatccacctcagccttccaaagtgttgggattacaggcatgagccacagtgcgtggcccaagtctattcttttctagtcatactggcaatgtagattgaggagtaagacatttacatgattctgctcccactacatgtccttttaattttccccatcagagtagtaaaagccttcattctgatgatctggccagtttctcatttggctaatttgtataaataaacatacggatttgaagcatttagtgaatatatagtctttttatggttttttgatctaaaggatggttttgtggcccttacaactatttcagataactgacccagantccatttgagaagtgttcattactttgatcagaatatggtcctgattgtgattgtttggattctagtgtttaatgtantaaaacctacatttattttatgaaantcccaanaactttttcccatttgagtgactgaacatgcctccttcctctaatgttaaaatatatttttggtaaattgtgccagaanggcatttgccaaaaaaatttgtgcagcaaaaaatnccttgntncaacccatttatgntccccctatgttc

SEQ ID NO: 2845 - DNA, 505 bp, Homo sapiens
  misc_feature (447)..(447): "n" may be a, t, c, g, other or unknown
  misc_feature (460)..(460): "n" may be a, t, c, g, other or unknown
  misc_feature (469)..(469): "n" may be a, t, c, g, other or unknown
  misc_feature (497)..(497): "n" may be a, t, c, g, other or unknown
  misc_feature (501)..(501): "n" may be a, t, c, g, other or unknown
tttacaatgggcatagaccttacaaaaccatttgaatacctttttgctactgggaatctgcgttctaaaacaggtcttggcctcctacaagattctggactttgtgttgtggctgacaagctgaacttcatacgctacctctcccatttccgctgcgtgcacagaggggctgattttgccaagatgaggaccaccacagtacgcaggctgctgccagagtcctggggcttcctttgtcccgtgcataccccagacggggagccctgtggcctgatgaaccacctaactgccgtatgtgaggttgtcacacagtttgtgtatacggcatctattccagctttactgtgcaacttgggggtcactcccattgatggagctccccaccgatcatacagtgagtgctaccctgtcctgctggacggtgtcatggttggctgggtggataangatcttgctccangcatcgcanattctcttcgtcattttaaggtgttganaaanaaaa

SEQ ID NO: 2846 - DNA, 637 bp, Homo sapiens
  misc_feature (216)..(216): "n" may be a, t, c, g, other or unknown
  misc_feature (231)..(231): "n" may be a, t, c, g, other or unknown
  misc_feature (376)..(376): "n" may be a, t, c, g, other or unknown
  misc_feature (552)..(552): "n" may be a, t, c, g, other or unknown
  misc_feature (582)..(582): "n" may be a, t, c, g, other or unknown
  misc_feature (593)..(593): "n" may be a, t, c, g, other or unknown
  misc_feature (603)..(603): "n" may be a, t, c, g, other or unknown
  misc_feature (632)..(632): "n" may be a, t, c, g, other or unknown
tgtacaaaggagaaatacatcattatttaaaagcatcatcttttttttttatattgtaagataaataccattctgatgtatttctcttggaaagggatgctggtatcctgggaggtttatgatttttgatgtttttactcaggtgattggcttgtatagctgaaatgctgatgaaaaggagttttcccttctccctttttcttttcttttcctttnttttttttttttganatggagtctcgcactgttgcaggggctggtgtgcagtggcacagtctcggctcactgcaacctccgcctctcgggttcaagtgatgctcctgcctcagcctcctgaatagctaggattacaggtgcccaccaccacgcccagctnattttttgtatttttagtaaagatggggtttcactatgttgggcagtctggtcttgaactcctgacctggtgatcctcctgcctcagcctcccaaagtgctgggattataggcgtgagccactgcgcccagcctgtccctttttcttaaatgacctttttggtgaggaccattatnggtttgtaccaggataaggttgtaaagttnatcataatatnctcttatatnaattctaaaaattgatgttctaagaaganaggta

SEQ ID NO: 2847 - DNA, 801 bp, Homo sapiens
  misc_feature (415)..(415): "n" may be a, t, c, g, other or unknown
  misc_feature (597)..(597): "n" may be a, t, c, g, other or unknown
  misc_feature (642)..(642): "n" may be a, t, c, g, other or unknown
  misc_feature (694)..(694): "n" may be a, t, c, g, other or unknown
  misc_feature (704)..(704): "n" may be a, t, c, g, other or unknown
  misc_feature (733)..(733): "n" may be a, t, c, g, other or unknown
  misc_feature (787)..(787): "n" may be a, t, c, g, other or unknown
  misc_feature (794)..(794): "n" may be a, t, c, g, other or unknown
  misc_feature (797)..(797): "n" may be a, t, c, g, other or unknown
acaatgaatggaggtaattgatttagtctgattccttcctgaaatctaaatattagcacaatagtttctgaaattttacaatgttaaattatgatctaattcatgagaaaccacgggtttaacatagggattcaaaaaaacaaaaacaaaagaataggaataaataacccttaattgtatattggactagttcagcccttaaacagctttacctttatttaggaatgtacattttaggtattatcttgatcatggagcttagatttaatttagatagcaaaaataaagatttgtatttcttttccaatagctaaaagttacataacactaatacttataacctatcaatatcagatattaatgactttgtagtgttgtaaaattttgaggaattttggagtctttatcataggtnacctggaccacagttactatttattgacaatgtgattgagtgtatggaggaaagcacagtggatgctaggctttgtaaatatggggatgtagaaaagcagatagttcagtgtctacctttttctagaactaccttgaaaccttaaattttaagtcatgttcattgctagaaaattaaatgtncttattaaaaccaatgaaaaagcaatttctgaaatgaaattaganataatctttgtgtcttataaaaaagacattaataaaaaatctgaaaggggcngggcgccatnggctcacgcctgttatccccaacattttnggggaagcccaaggtggggcggatcatcctaaggccaggaattccaaaaacagncctgggnccnccat

SEQ ID NO: 2848 - DNA, 506 bp, Homo sapiens
  misc_feature (153)..(153): "n" may be a, t, c, g, other or unknown
  misc_feature (159)..(159): "n" may be a, t, c, g, other or unknown
  misc_feature (163)..(163): "n" may be a, t, c, g, other or unknown
  misc_feature (220)..(220): "n" may be a, t, c, g, other or unknown
  misc_feature (245)..(245): "n" may be a, t, c, g, other or unknown
  misc_feature (261)..(261): "n" may be a, t, c, g, other or unknown
  misc_feature (287)..(287): "n" may be a, t, c, g, other or unknown
  misc_feature (307)..(307): "n" may be a, t, c, g, other or unknown
  misc_feature (431)..(432): "n" may be a, t, c, g, other or unknown
  misc_feature (439)..(439): "n" may be a, t, c, g, other or unknown
  misc_feature (457)..(457): "n" may be a, t, c, g, other or unknown
  misc_feature (486)..(486): "n" may be a, t, c, g, other or unknown
ggacgattaacaagaacaatagccaaggaccacaggacatctcaactggttcaaaattgaagttgagcaagctttccactcgatgggtgccaaaaccgttgtgcccagatcagctgcagacaagagcagagctttcaatggaaattttaaacnagtggnatcnagaccctgaagcatttccttgaattataacaggagatggaacaggactttaccagtnccatcctgaagacaaaccacaatcnaagcaatggctaccangaggtagaagtggcctagtcaaggcnaatgtggacaagtcaaagtnaggtcatggcaacagtttcttgggatgctcaatgcattttgcttgttgactttctggaaggcccaagaacattttttttttttttttgaaatggagtctcgctctgtcgccaggctgggagtgnngtggccnatctcagctagcttgcgnagctctgcctcccaggttcacgccattcncctgcctcagccttccgagt

SEQ ID NO: 2849 - DNA, 590 bp, Homo sapiens
  misc_feature (37)..(37): "n" may be a, t, c, g, other or unknown
  misc_feature (153)..(153): "n" may be a, t, c, g, other or unknown
  misc_feature (345)..(345): "n" may be a, t, c, g, other or unknown
  misc_feature (437)..(437): "n" may be a, t, c, g, other or unknown
  misc_feature (534)..(534): "n" may be a, t, c, g, other or unknown
  misc_feature (550)..(550): "n" may be a, t, c, g, other or unknown
  misc_feature (552)..(552): "n" may be a, t, c, g, other or unknown
  misc_feature (583)..(583): "n" may be a, t, c, g, other or unknown
  misc_feature (586)..(586): "n" may be a, t, c, g, other or unknown
gcagaccacgttagaacctcggctcctggagtagcanaacctcggcttcaatgggaccctcatttcataaatgaagaaactgagattcaaagaggggaactaccgaaggttacagagcgagttcgtggatggggaaactgagcctcacatgtntgaattccagcatataagcaacagactccagatttggacatgtatatcttattccaggcttcccagatgaccaccaaggtggaagggatgatgatgtccaggcagaagggagctaggccggcccaggcttttcctctaggcacagcggactccaggttcagccttcccggatggtaatgttgcattctgaanagctactttcccgccaactcatctctggacttctctggggcccaactctggtttcctgcctgcaggaggtcccctctgacttccgacagtanatgacccttctgactcacagttctactgctgggaaatgcctccagagctgctgcccaccctctctgcatccctccaggtcactgggtgttgaatcangggaagcagggatacncncgggcgggaaactcaggtctcctaaatgtcngancctc

SEQ ID NO: 2850 - DNA, 760 bp, Homo sapiens
  misc_feature (3)..(3): "n" may be a, t, c, g, other or unknown
  misc_feature (267)..(267): "n" may be a, t, c, g, other or unknown
  misc_feature (342)..(342): "n" may be a, t, c, g, other or unknown
  misc_feature (474)..(474): "n" may be a, t, c, g, other or unknown
  misc_feature (488)..(488): "n" may be a, t, c, g, other or unknown
  misc_feature (490)..(490): "n" may be a, t, c, g, other or unknown
  misc_feature (509)..(509): "n" may be a, t, c, g, other or unknown
  misc_feature (519)..(519): "n" may be a, t, c, g, other or unknown
  misc_feature (596)..(596): "n" may be a, t, c, g, other or unknown
  misc_feature (630)..(630): "n" may be a, t, c, g, other or unknown
  misc_feature (712)..(712): "n" may be a, t, c, g, other or unknown
  misc_feature (715)..(715): "n" may be a, t, c, g, other or unknown
  misc_feature (729)..(729): "n" may be a, t, c, g, other or unknown
  misc_feature (758)..(759): "n" may be a, t, c, g, other or unknown
ganagccggacgttccggccgcttcgggctggcggctggagagcgctcgggtcatgtctgcccagggggactgcgagttcctggtgcagcgagcccgggagttggtgccgcaagacctgtgggcagccaaggcgtggctgatcacggcccgcagcctctacccggcagactttaacatccagtatgagatgtacaccatcgagcggaatgcagagcggaccgccaccgccgggaggctgctgtacgacatgtttgtgaatttcccanaccagccggtggtgtggagagaaatcagcattattacatcagcattaaggaacgattacaggacaaacaaacccnatttttaagaagtttatttgaaactcttcctggtcgagtccagtgtgaaatgttactaaaggtcacggaacaatgcttcaacacgttagaaacgatcagaaatgttgcttctacttttgaggcgcttccctnaaacggtggtgcancntggggttggccttggggangcactattanaagctgaaactattgaagaacaagaatctccagtgaactgctttagaaaattatttgtttgtgatgtccttcctctnataattaacaaccatgattttcgattacctgccnatttattgtataaagttcttgaacaaagcagcctgaattttatatcaattattgtcctaggtctactccaattagaaaatcnccntccaggcgcccagnaatacatctgaattttaattgttcccctnnc

SEQ ID NO: 2851 - DNA, 860 bp, Homo sapiens
  misc_feature (99)..(99): "n" may be a, t, c, g, other or unknown
  misc_feature (406)..(407): "n" may be a, t, c, g, other or unknown
  misc_feature (568)..(568): "n" may be a, t, c, g, other or unknown
  misc_feature (614)..(614): "n" may be a, t, c, g, other or unknown
  misc_feature (616)..(616): "n" may be a, t, c, g, other or unknown
  misc_feature (654)..(654): "n" may be a, t, c, g, other or unknown
  misc_feature (767)..(767): "n" may be a, t, c, g, other or unknown
  misc_feature (772)..(772): "n" may be a, t, c, g, other or unknown
  misc_feature (812)..(812): "n" may be a, t, c, g, other or unknown
  misc_feature (842)..(842): "n" may be a, t, c, g, other or unknown
  misc_feature (844)..(844): "n" may be a, t, c, g, other or unknown
ctctctctctctctcctgctgcattgtgaagaaactgcttgcttccctctcaccctctgcagtttcctgaggcctccccagccatgcggaacgctgtanaccaagacctggaattaacacatcagaagattctatggggaaacccatttaaaaataggatgcatttttttcttttctgcacagggagaaagtttaagctctcctcactatgagttttcaagtataaaagactttttcttccacgattttgagaacaactgaggactcttgtgaccaggacaacagggaagcttgcagcaagatagctccaggttggattcatgcttcgcaccccaagggctgccagccagagaggaggagaagcaatcactcctgcagtttctgaacactacacagacgccaggtnncttcttcaggagaacagccctctgaggaggcaggaagaggaggcttatctttcagcagccggagctgctgagatctctgggcagattaagctctctctaatggatgggctccagcctggcacattcagtggagagggatccactcatccatcatcaacatnatatggtcctccctgcacttcacagtgtcctcttgctattgaaaangnttttttgccttctcaagtttctttgtcacagtctacanggaagaactcaggccgccaccggcagaagttaatgccagctcacgttttatttctgactgcttaatccttggcctcgatcctggctccagctctggccttttgtttcccaaanggttncttttgggaaaacttcctttttcctatgctgaaatttatngggaaggcaaaaattaattcccttgataancnaaacctttaaactccc

SEQ ID NO: 2852 - DNA, 542 bp, Homo sapiens
  misc_feature (174)..(174): "n" may be a, t, c, g, other or unknown
  misc_feature (200)..(200): "n" may be a, t, c, g, other or unknown
  misc_feature (275)..(275): "n" may be a, t, c, g, other or unknown
  misc_feature (351)..(351): "n" may be a, t, c, g, other or unknown
  misc_feature (483)..(484): "n" may be a, t, c, g, other or unknown
  misc_feature (491)..(491): "n" may be a, t, c, g, other or unknown
  misc_feature (503)..(503): "n" may be a, t, c, g, other or unknown
  misc_feature (538)..(538): "n" may be a, t, c, g, other or unknown
ttaacagaaagatggaaattaagcctttgcaatttgaaattatgattgacagacttgaaaaagccagttctaatcagcttgtaacacttcaagaagcaaaactgctgctaaacgaagatgattaccttattaaagctgtatatgactactgggtgagaaaacgtaaaaactgcngggggccatccctcattcctcagatnaaacaagagaaaagagatggctctaccaacaatgacccttatgttgcctttcggagaagaacagagaaaatgcanactcgaaagaatcgtaagaatgatgaagcctcttatgaaaagatgttgaaactgagacgagaatttagtagagccntaacaattttggaaatgattaagagaagagagaaaaccaaacgagaattattgcacttaaccttagaagttgtggagaaaagataccatttgggagactatggtggtgaaatccttaatgaagtttaaatcnntagatcngaaaaagagttntttgccactcccgcaactcttcataatggaaatcntccc

SEQ ID NO: 2853 - DNA, 628 bp, Homo sapiens
  misc_feature (22)..(22): "n" may be a, t, c, g, other or unknown
  misc_feature (86)..(86): "n" may be a, t, c, g, other or unknown
  misc_feature (367)..(367): "n" may be a, t, c, g, other or unknown
  misc_feature (484)..(484): "n" may be a, t, c, g, other or unknown
  misc_feature (486)..(486): "n" may be a, t, c, g, other or unknown
  misc_feature (530)..(530): "n" may be a, t, c, g, other or unknown
  misc_feature (576)..(576): "n" may be a, t, c, g, other or unknown
  misc_feature (587)..(587): "n" may be a, t, c, g, other or unknown
  misc_feature (610)..(610): "n" may be a, t, c, g, other or unknown
  misc_feature (626)..(626): "n" may be a, t, c, g, other or unknown
gtcaagatggcggctgcggcantggcggcggcggcggcggcggccgcggctgcatctcttcaggtactggagatggagagcatggnagacggccgccgccggctcggcaggactggccgccgaggtccgaggcagcggcacggtggacttcgggcctgggccggggatctctgcaatggaggcgagcgggggcgatccgggcccagaagccgaggatttcgagtgcagctctcactgctcagagctgtcctggcggcagaacgagcagcggcgccagggcctcttctgcgacattaccctgtgcttcggcggggctggaggccgcgagttccgggcccaccgctcggtactggctgccgccaccgantacttcacgcccctgctctcgggccagttttccgagtcccgctcgggacgggtggagatgcgcaagtggagctccgagccggggcccgaacccgacacagtggaagccgtaatcgantncatgtacaccgggcgcatccgcgtcagcacgggcagcgtgcacnaagtgcttggaattggccgacaggttcctactcattcctttaaaanaatttgtgganaatttctcaagaaaaaaacttcntctctcaaattgtgtngc

SEQ ID NO: 2854 - DNA, 816 bp, Homo sapiens
  misc_feature (391)..(391): "n" may be a, t, c, g, other or unknown
  misc_feature (472)..(472): "n" may be a, t, c, g, other or unknown
  misc_feature (545)..(545): "n" may be a, t, c, g, other or unknown
  misc_feature (554)..(554): "n" may be a, t, c, g, other or unknown
  misc_feature (591)..(591): "n" may be a, t, c, g, other or unknown
  misc_feature (701)..(701): "n" may be a, t, c, g, other or unknown
  misc_feature (703)..(703): "n" may be a, t, c, g, other or unknown
  misc_feature (712)..(712): "n" may be a, t, c, g, other or unknown
  misc_feature (757)..(757): "n" may be a, t, c, g, other or unknown
  misc_feature (803)..(803): "n" may be a, t, c, g, other or unknown
  misc_feature (805)..(805): "n" may be a, t, c, g, other or unknown
  misc_feature (810)..(810): "n" may be a, t, c, g, other or unknown
  misc_feature (814)..(814): "n" may be a, t, c, g, other or unknown
ttttaaaataaaaagagtgtttttaaaattcttaattctttaaaatacctctagaaaagtcatatagtatgtctctaatagctaaaatgaagtagcagttgattcttcatatcttcttacacacattaaatgaaacataatatttttgtgagttttcttgtttaatggaaactatactgttaattgcatttgtagaaaggtgaggaagatggaaatgtatcagctgaaggtgactcagttgaggcaggaagtaaggaagcctttccctgagagaaagctttggttagcttttgtgcgtggcttgattggtccatgttattgagggatgcttgagtaccatagagaaatccttcaacaacgtgaagagaactttaagccaattatatacctnaattaaacattgacaagaatgttaatttaacagacaaattttgtctgttaatgttacagacaaaaactgttagagaaaganaacacaattgggactttttattttaaattgacatactgtaaattcttttgtattgagcatataaatgcaaccnaacccagtngtttctaacagttaatttatgcatgttttgagtttcnaatattaatttagtaattccacaactacttgaatttctttatcatgaatctctgcatttctgtgtctttcctgtgcctatcccctattgttctcccaaaaacctaagttncntgaatatanttttcctcattgggttttccttgggttggggatcatttatttttnaatatacccccctggtccaatattccctaatattccttgaaatttncnctccntttnat

SEQ ID NO: 2855 - DNA, 753 bp, Homo sapiens
  misc_feature (530)..(530): "n" may be a, t, c, g, other or unknown
  misc_feature (563)..(563): "n" may be a, t, c, g, other or unknown
  misc_feature (596)..(597): "n" may be a, t, c, g, other or unknown
  misc_feature (727)..(727): "n" may be a, t, c, g, other or unknown
  misc_feature (739)..(739): "n" may be a, t, c, g, other or unknown
  misc_feature (741)..(741): "n" may be a, t, c, g, other or unknown
  misc_feature (748)..(748): "n" may be a, t, c, g, other or unknown
  misc_feature (750)..(750): "n" may be a, t, c, g, other or unknown
atatcagcttccagtgtattgcttggcaccgccaatcaacatgatagaggaaaagagcgacatagagactctggatattcctgagccaccacccaattctggatatgaatgtcagcttcgtttgcgcctttccacaggcaaagacctcaagcttgtggttcgcagcacagacacagtattccacatgaagagacggttgcatgcagcagagggagtggaaccaggtagtcagcggtggtttttttctggcagacctctcactgacaaaatgaagttcgaagagctgaagatcccaaaggactatgttgtacaggttatagtgagccaacctgtgcagaacccaacaccagtggagaactgaactgagccctgttggccagctcccacatccctctgctcctttttatggttcttgttgtcatttcctactctgcggcgtgaaatctatttcactgctctaaattccctatgaatggatttagttctgaggaattaccagtgaaaaattccatctgtgatggagaccaacnaaaattattaaacacaaagagccaggctttganactcatgttattaccatttctaatttgaaaggnngtttagaaatagattaccatttattttagaacactccacaactatgttatggctatatttcagtgacttggactgttaaatgaaacattgcatccatgaaggacagcccccagcccctttttgaaatacngaaatttttttnanaaaaatntntcc

SEQ ID NO: 2856 - DNA, 649 bp, Homo sapiens
  misc_feature (355)..(355): "n" may be a, t, c, g, other or unknown
  misc_feature (564)..(564): "n" may be a, t, c, g, other or unknown
  misc_feature (577)..(577): "n" may be a, t, c, g, other or unknown
  misc_feature (590)..(590): "n" may be a, t, c, g, other or unknown
  misc_feature (605)..(605): "n" may be a, t, c, g, other or unknown
  misc_feature (607)..(607): "n" may be a, t, c, g, other or unknown
gttgaaggcgagagcttgcttggcccgtgtcgcttctgtcccaagaaccggacggagagtgagggcacgagggtcgctgtcgggggctgtcgtcttccacgtacacgtcgtcgtgaggagcgcagtccggactcttcccgcaacccctccggctccctttccgcacgcctcgaggcggcggcggccaccgagacagcagcgcaccttcccccatcccttccccttatcccccagcccaaaagggcccggtctgcgccccacccccgcccgtccgcccgctacgccgccgccatgtcggcgcaggcccagatgcgcgcgatgctggaccagttgatgggcacctcccgggacgganatacaactcgtcaacgaatcaaattcagtgatgacagagtatgcaagagtcaccttctcaactgttgtcctcatgatgtcctttctggaactagaatggatcttggagaatgtctgaaagtccatgacctggctttaagagcggattatgaaattgcatccaaagaacaagattttttctttgaacttgatgccatggatcatctgcantcattcattgcanattgtgatcgtanaacagaaagtggccnanaaaagattagcagaaactccagaagaaattaatgctgaaatt

SEQ ID NO: 2857 - DNA, 582 bp, Homo sapiens
  misc_feature (117)..(117): "n" may be a, t, c, g, other or unknown
  misc_feature (123)..(123): "n" may be a, t, c, g, other or unknown
  misc_feature (156)..(156): "n" may be a, t, c, g, other or unknown
  misc_feature (243)..(243): "n" may be a, t, c, g, other or unknown
  misc_feature (255)..(255): "n" may be a, t, c, g, other or unknown
  misc_feature (268)..(268): "n" may be a, t, c, g, other or unknown
  misc_feature (279)..(279): "n" may be a, t, c, g, other or unknown
  misc_feature (333)..(333): "n" may be a, t, c, g, other or unknown
  misc_feature (361)..(361): "n" may be a, t, c, g, other or unknown
  misc_feature (387)..(387): "n" may be a, t, c, g, other or unknown
  misc_feature (414)..(414): "n" may be a, t, c, g, other or unknown
  misc_feature (417)..(417): "n" may be a, t, c, g, other or unknown
  misc_feature (459)..(459): "n" may be a, t, c, g, other or unknown
  misc_feature (468)..(468): "n" may be a, t, c, g, other or unknown
  misc_feature (499)..(499): "n" may be a, t, c, g, other or unknown
  misc_feature (538)..(538): "n" may be a, t, c, g, other or unknown
  misc_feature (552)..(552): "n" may be a, t, c, g, other or unknown
  misc_feature (565)..(565): "n" may be a, t, c, g, other or unknown
  misc_feature (574)..(574): "n" may be a, t, c, g, other or unknown
cccgacgctatctcgcgctcgtgtgcaggcccggctcggctcctggtccccggtgcgagggttaacgcgaggccccggcctcggtccccggactaagccgtgaccccgggtgccatnaagcangagggctcggcgcggcgccgcggcgcggacaangcgaaaccgccgcccggcggaggagaacaagaacccccaccgccgccggccccccaggatgtggagatgaaagaggaggcagcgacnggtggcgggtcnacgggggaagcanacggcaagacngcggcggggtcggctgaacactcccatcgagagctggacacattcaccttgganggactcaaggagcacgtgaaacagctanaaaaagcggtttcaggcaaagaaccnacattcgtgctgcgggccctgcggatnctnccttccacatcacgccgcctcaaccactatgttctgtataangctgtgcanggcttcttcacttcaaataatgccactcganactttttgctccccttccttggaacagccatggacacanaagctgatttacanttccgtccccgcncgggaaaanctgcgtca

SEQ ID NO: 2858 - DNA, 464 bp, Homo sapiens
  misc_feature (37)..(37): "n" may be a, t, c, g, other or unknown
  misc_feature (115)..(115): "n" may be a, t, c, g, other or unknown
  misc_feature (118)..(118): "n" may be a, t, c, g, other or unknown
  misc_feature (220)..(220): "n" may be a, t, c, g, other or unknown
  misc_feature (347)..(347): "n" may be a, t, c, g, other or unknown
  misc_feature (407)..(407): "n" may be a, t, c, g, other or unknown
  misc_feature (442)..(442): "n" may be a, t, c, g, other or unknown
  misc_feature (444)..(444): "n" may be a, t, c, g, other or unknown
  misc_feature (456)..(456): "n" may be a, t, c, g, other or unknown
  misc_feature (459)..(459): "n" may be a, t, c, g, other or unknown
acactgggctccggcggccagagtgggggactaggtnaagcggcgccgggccggggctggccgggaccaggcccgaggctgagcggcggcgacagcggtggccgggagggggganganaggcgcagccagaggagccgccgcagtagctcccccgcctcccgggctgagggcggaaagaaaacatgcatatatgattttcttctgatgaaacctaatgtnttcaagaaaaagaatcttgctttttggaaggatggaaaaattgggaataattttttcccctttgataattagaccactcagtactgttgcttagtttttggttcagttactttgatgtggttacaanaagaattttggctgtaatggatttcatacatttttaatgtctaatttaatagggatatanacagttggtttaaaccaacatttttggacgaaganangctatggaaatnaanaaaga

SEQ ID NO: 2859 - DNA, 478 bp, Homo sapiens
  misc_feature (2)..(2): "n" may be a, t, c, g, other or unknown
  misc_feature (438)..(438): "n" may be a, t, c, g, other or unknown
  misc_feature (440)..(440): "n" may be a, t, c, g, other or unknown
  misc_feature (450)..(450): "n" may be a, t, c, g, other or unknown
  misc_feature (459)..(459): "n" may be a, t, c, g, other or unknown
  misc_feature (465)..(465): "n" may be a, t, c, g, other or unknown
anagagctaccagctgccctgttggcttcgctggtcggatcgtcctcctggccccgccaaacaggcggggggagcggccccgactgtggggccatggcagtagtctcctcgttctccgccgccgctagcctatctgagtcgccggcttctgcgctaggggctcccaccgcctccgcaggctaaggagccgctgccaccaacgagctgtgagggttactatgctccctctttgccgccgtctcctcctcttgcccgcgcaggcacccctctggctgctcagtcctgcctcagtgtcaaaccagaagagaagtaaaattcaacaaaaatttatgtgtggagttccttcttaaaagaagaaaaaagtgattatttagactatggatcggagcaaacggaattcaattgcaggatttcctccacgtgtggagcgtcttgaanantttgaaggangtggtggangagaangaaatgtgagcca

SEQ ID NO: 2860 - DNA, 762 bp, Homo sapiens
  misc_feature (77)..(77): "n" may be a, t, c, g, other or unknown
  misc_feature (360)..(360): "n" may be a, t, c, g, other or unknown
  misc_feature (470)..(470): "n" may be a, t, c, g, other or unknown
  misc_feature (477)..(477): "n" may be a, t, c, g, other or unknown
  misc_feature (520)..(520): "n" may be a, t, c, g, other or unknown
  misc_feature (552)..(552): "n" may be a, t, c, g, other or unknown
  misc_feature (555)..(555): "n" may be a, t, c, g, other or unknown
  misc_feature (610)..(610): "n" may be a, t, c, g, other or unknown
  misc_feature (723)..(723): "n" may be a, t, c, g, other or unknown
  misc_feature (731)..(731): "n" may be a, t, c, g, other or unknown
  misc_feature (741)..(741): "n" may be a, t, c, g, other or unknown
  misc_feature (746)..(746): "n" may be a, t, c, g, other or unknown
  misc_feature (752)..(752): "n" may be a, t, c, g, other or unknown
ggaaaaatgtgtgcaaagaaatgatggcccctgaggacagactctgggcgatcacagtcacctgtgaaggttttatnaagatgaaatctgatgaaaatgcaagccttcagcaaaccataaaaccctgtatcaaggttagagagaaggaaaagccttccttactgaagctctttcgggacaacacggccattccaacctctagtgactctacgtaggtgtaaacttttttgtgggcattcaaagaaacactcagcatccttcccataaatatatttattaacttctacaagcaatctaatttccttaattacaagcctaatttaatttccctttaagcctttttgttaattttctttgganatttttcacgtctttcatttatttatttggagacagagtctcgctctttttcatgtctttaattaattaattaatttattttgagacggagtcttcactgtgtcactcangctggantgcagtggcgcaatcacggctcactgcaacctctgcctcccangtccaagtgattcttctgcctcagcctctcangtngctggaattacaggcatgtgccaccacgccccgctaaattttgtatattttttantagaaacagggtttcaccatattggccaggctggtctcaaactcctgatctcaggtgatcccctgccccagcctccctgaaattgttgggattacaggcatgaacccaccggngccccgancttcttgttnttttnaaaaanttggcccaaa

SEQ ID NO: 2861 - DNA, 690 bp, Homo sapiens
  misc_feature (60)..(60): "n" may be a, t, c, g, other or unknown
  misc_feature (146)..(146): "n" may be a, t, c, g, other or unknown
  misc_feature (166)..(166): "n" may be a, t, c, g, other or unknown
  misc_feature (406)..(406): "n" may be a, t, c, g, other or unknown
  misc_feature (569)..(569): "n" may be a, t, c, g, other or unknown
  misc_feature (588)..(588): "n" may be a, t, c, g, other or unknown
  misc_feature (600)..(600): "n" may be a, t, c, g, other or unknown
  misc_feature (641)..(641): "n" may be a, t, c, g, other or unknown
  misc_feature (652)..(652): "n" may be a, t, c, g, other or unknown
  misc_feature (672)..(672): "n" may be a, t, c, g, other or unknown
  misc_feature (688)..(688): "n" may be a, t, c, g, other or unknown
atctaatgaggagcgaggtgcggtgcccccgaagcgctcgcttcccgcggtgcgatctantcctgcagtaggcggcccggggccacaccgcggccgcccaagccagtgcaaggcccaggggcctgacatcgctcccagcgctcgangaccgaggcctgctgtggangacaccgtgctccctcgggacctgctctggattccggcccggacgtccccttggagctctgcatctccaacctggaacccaacccagaagtctcaagtttgacgcatcacgtggcgtgcggatccactgagggtccacagagaggggcgcccatctcctgcgtctcagttatcctggtgttgggaattctgtgccctaaagaattccgactcacatccgaacggggatctggtggaatcnagggtgaaagaccagagggacaatgttctactatcccaacgtgcttcagcgccacaccggctgctttgccaccatctggctggcggcgactcgcggcagccgggttggtgaaacgcgaatacctgaaggtgaatgtggtgaaaacctgcgaagaaatcctcanttacgtgctggtacgaatngcaaccccgcancccggccttgccgcgggcccgcttctccctctatctctcancccaacttcanatctgtgtgatccgcgtctnttctccaccaatgccntt

SEQ ID NO: 2862 - DNA, 751 bp, Homo sapiens
  misc_feature (556)..(556): "n" may be a, t, c, g, other or unknown
  misc_feature (571)..(571): "n" may be a, t, c, g, other or unknown
  misc_feature (589)..(589): "n" may be a, t, c, g, other or unknown
  misc_feature (613)..(613): "n" may be a, t, c, g, other or unknown
  misc_feature (675)..(675): "n" may be a, t, c, g, other or unknown
  misc_feature (684)..(684): "n" may be a, t, c, g, other or unknown
  misc_feature (699)..(699): "n" may be a, t, c, g, other or unknown
  misc_feature (716)..(716): "n" may be a, t, c, g, other or unknown
  misc_feature (724)..(724): "n" may be a, t, c, g, other or unknown
gtacgccgattccatatgggcgccggcgcggagcgccgcggggcagcgcggggtcgccatggctgagctgcagcagctccgggtgcaggaggcgatggagtccatggtgaagagtctggaaagagagaacatccggaagatgcagggtctcatgttccggtgcagcgccagctgttgtgaggacagccaggcctccatgaagcaggtgcaccagtgcatcgagcgctgccatgtgcctctggctcaagcccaggctttggtcaccagtgagctggagaagttccaggaccgcctggcccggtgcaccatgcattgcaatgacaaagccaaagattcaatagatgctgggagtaaggagcttcaggtgaagcagcagctggacagttgtgtgaccaagtgtgtggatgaccacatgcacctcatcccaactatgaccaagaagatgaaggaagctctcttatcaattggaaaataaaagtatttgccagtggccatcaggctgaaggcaagaatatattttttataagggaattgggaattttagtcttttaagccnagtttacgaatgaanaaatgaaggatggccccnagcgtaaggcatatgtccttgccnctggacactggttatttatgtttcagtccctaaaaaaatgaaatggaaaaaaagtggtgctnaaatccaantcaaaaatattaacngggaaaatttttaaaancttattantttccctgtgggccagttgctttgttc

SEQ ID NO: 2863 - DNA, 823 bp, Homo sapiens
  misc_feature (220)..(220): "n" may be a, t, c, g, other or unknown
  misc_feature (530)..(530): "n" may be a, t, c, g, other or unknown
  misc_feature (541)..(541): "n" may be a, t, c, g, other or unknown
  misc_feature (714)..(714): "n" may be a, t, c, g, other or unknown
  misc_feature (736)..(736): "n" may be a, t, c, g, other or unknown
  misc_feature (785)..(785): "n" may be a, t, c, g, other or unknown
  misc_feature (811)..(811): "n" may be a, t, c, g, other or unknown
  misc_feature (813)..(813): "n" may be a, t, c, g, other or unknown
  misc_feature (822)..(822): "n" may be a, t, c, g, other or unknown
actgcaggctggggctccgctccccggcgggagcccgcgcgtggttcccagcgaagtccccgcgcggctgggcccagcgtgagtattctccgcccgctgtcctccccctggaggcggcagcgcccgtttatttgaggcttctaatgtgaggaaaaacacggaatgacaagtgtgggaaagagcaagcactaaattactgtcagaaaaataaacggagtancacagtgctgctcggtgatttacgggggcaattagtcaccaccccacggcgctgctgaggacagcacggcagcagacaagtcaggcccgtgaggaagaaaagctttgcactgctctccagacaacttttcaaacaacaagagaggatatttgagcacattaggttttgtgtcttcattctgggtacctactcttcatattattctaccaacttaatacataaacatatttttagcacaatatgaacctgttctatgtgtgtttaaaagcctccagcagcaacttttttctctcccactgtccaaaagttnggttttccccntcccttaaaaaacaaaacaaaaaaacctttcttcactccaaattgtcccctggtgtgtggttttggtctttctcattacttcttgcatcttgctacatgttctgcatttgctcaaaacccctgggttgctaaggaatttgggtctgctgctcctctggggaaaatttggtaanctgggtacaaggaagtttaatnaacaaaggctaaaatgaaaatcatacattaacttccccattattttgtnaacattttctttaacataccaaacanantttccaatnt

SEQ ID NO: 2864 - DNA, 727 bp, Homo sapiens
  misc_feature (5)..(5): "n" may be a, t, c, g, other or unknown
  misc_feature (212)..(212): "n" may be a, t, c, g, other or unknown
  misc_feature (425)..(425): "n" may be a, t, c, g, other or unknown
  misc_feature (462)..(462): "n" may be a, t, c, g, other or unknown
  misc_feature (465)..(465): "n" may be a, t, c, g, other or unknown
  misc_feature (468)..(468): "n" may be a, t, c, g, other or unknown
  misc_feature (522)..(522): "n" may be a, t, c, g, other or unknown
  misc_feature (560)..(560): "n" may be a, t, c, g, other or unknown
  misc_feature (599)..(599): "n" may be a, t, c, g, other or unknown
  misc_feature (602)..(602): "n" may be a, t, c, g, other or unknown
  misc_feature (655)..(655): "n" may be a, t, c, g, other or unknown
  misc_feature (673)..(673): "n" may be a, t, c, g, other or unknown
  misc_feature (701)..(701): "n" may be a, t, c, g, other or unknown
  misc_feature (709)..(709): "n" may be a, t, c, g, other or unknown
  misc_feature (711)..(711): "n" may be a, t, c, g, other or unknown
gggantccgcgagcgtcgtcggcaagcggccgcctttccacggtactccgagcactatgtcgtccccggcgtcgaccccgagccgccgcggcagccggcgtggaagggccacccccgcccagacgcctcggagtgaggatgccaggtcatctccctctcagagacgtagaggcgaggattccacctccacgggggagttgcagccgatgccnacctcgcctggagtggacctgcagagccctgctgcgcaggacgtgctgttttccagccctccccaaatgcattcttcagctatccctcttgactttgatgttagttcaccactgacatacggcactcccagctctcgggtagagggaaccccaagaagtggtgttaggggcacacctgtgagacagaagcctgacctgggctctgcacagaanggcctgcaagtggatctgcagtctgacggggcagcancanaanatatagtggcaagtgagcagtctctaggccaaaaacttgtgatctggggaacanatgtaaatgtggcagcatgcaaagaaaactttccaganatttcttcaccgttttattgacccctctggctaaagaanaanaaaatgttggcatagatattactgaacctctatacctgcaacgacttgggganattaatgttattggtganccattttttaaatgttgaacttgttganccccttcnanttcattttgacaaaaa

SEQ ID NO: 2865 - DNA, 348 bp, Homo sapiens
  misc_feature (308)..(308): "n" may be a, t, c, g, other or unknown
  misc_feature (333)..(333): "n" may be a, t, c, g, other or unknown
  misc_feature (338)..(338): "n" may be a, t, c, g, other or unknown
attttattacagttggtatggaaatccacaatttgatggtaaatatatacattggaatcatccagtgttagagcattgggaccctagaatagccaagaattatccacaagggagacacaaccctccagatgacattggctccagcttttatcctgaattgggaagttacagttctcgggatccttctgtcatagaaactcacatgagacaaatgcgctcagcttcaattggtgtactagccctctcttggtacccacctgatgtaaatgaatgaaaatggaagaacctactgataacttgggtacccnctatttgggaataaagctcataaantatancctgaaaggt

SEQ ID NO: 2866 - DNA, 732 bp, Homo sapiens
  misc_feature (99)..(99): "n" may be a, t, c, g, other or unknown
  misc_feature (646)..(646): "n" may be a, t, c, g, other or unknown
  misc_feature (662)..(662): "n" may be a, t, c, g, other or unknown
  misc_feature (707)..(707): "n" may be a, t, c, g, other or unknown
  misc_feature (709)..(709): "n" may be a, t, c, g, other or unknown
  misc_feature (717)..(717): "n" may be a, t, c, g, other or unknown
tcgagtcggcaatatacagcttctgtatttatcaggcccagttctggtgatgatttcacttttgacagaagctgtccctcaaaagcaaacatgcaatanaagaaacagatctcaatggagtctcactctgtcacccaggatggagtacagtggcgtgatctcggctcactgcaagctccgcctcctgggttcatgccattctcctgccttagcctcccgagtagctgggactacaggcgcctgccaccacgcccggctaatttttgtatttttagtagagacagggtttcaccgcattagccaggatggtctcgatctcctgacctcgtgatccgcccgcctcagcctcccaaagtgctgggattacaggcgtgagtcactgtgcccagccaagtttagtattttttgtagagacagagtttcaccatgttggccaggctggtcttgcactcatggcctcaagtgatccacctgcctcggcctccgaaagtgccggggattacaggcgtaagccactgtgcctggccttaaatgggtaaatttcatatggtatatgaattatatttcactaaaactttaagaaaacattatacagtactgttcaaattttaagtggtccaatttaaatgcactattggtatacaantctatgttaatgtccntaccagggtatatgttaactataaatatctatgcccctacccttnantatccaancatatattatatgcc

SEQ ID NO: 2867 - DNA, 678 bp, Homo sapiens
  misc_feature (457)..(457): "n" may be a, t, c, g, other or unknown
  misc_feature (469)..(469): "n" may be a, t, c, g, other or unknown
  misc_feature (528)..(528): "n" may be a, t, c, g, other or unknown
  misc_feature (546)..(546): "n" may be a, t, c, g, other or unknown
  misc_feature (592)..(592): "n" may be a, t, c, g, other or unknown
  misc_feature (629)..(630): "n" may be a, t, c, g, other or unknown
  misc_feature (658)..(658): "n" may be a, t, c, g, other or unknown
  misc_feature (667)..(667): "n" may be a, t, c, g, other or unknown
tgacctgaggaagaagagcaagtaatacatgaagatgatgaaagaccttctgagaaaaatgaattttctagacgaaaacgttctaaatcagaagacatggacaatgtacagtctaaacgtcgtcgatatatggaagaagaatatgaggcagaatttcaagtaaagattacagccaaaggagacattaaccagaaacttcaaaaggttatacagtggttgctggaagaaaaattgtgtgcgctgcagtgtgctgtatttgataagactttggcagaattgaaaacacgagtggaaaagattgaatgtaacaagaggcataaaacagttctcactgaactacaggccaagatagccaggttaaccaaacgctttgaagcagccaaagaaggtcttaagaaaagacatgaacatccacccaacccaccagtatcaccaggaaaaactgtaaatgatgtcnacagcaataatnacatgtcttacagaaatgcaggcacagtgagacagatgctggagtccaaaagaaatgtnagcgagagtgcaccaccntcctttcaaactcctgtgaatacagtatcttcaaccaatcttgtcnctcctccagcagttgtcagtagtcaacctaaattgcnnactccagtgacttcgggttccctccacngcaacgtcngttcttcctgc

SEQ ID NO: 2868 - DNA, 703 bp, Homo sapiens
  misc_feature (510)..(510): "n" may be a, t, c, g, other or unknown
  misc_feature (616)..(616): "n" may be a, t, c, g, other or unknown
  misc_feature (665)..(665): "n" may be a, t, c, g, other or unknown
  misc_feature (667)..(667): "n" may be a, t, c, g, other or unknown
  misc_feature (691)..(691): "n" may be a, t, c, g, other or unknown
  misc_feature (703)..(703): "n" may be a, t, c, g, other or unknown
atgctgggcggcgtcaggtgagcggtggtcgctgggcctcaggtaaccatggagaaagagctgcggagcaccattcttttcaatgcctacaaaaaggagatatttaccaccaacaatggctacaaatccatgcagaaaaaacttcggagtaattggaagattcagagcttaaaagatgaaatcacatctgagaagttaaatggagtaaaactgtggattacagctgggccaagggaaaaatttactgcagctgagtttgaaatcctgaagaaatatcttgacactggtggagatgtctttgtgatgctaggagaaggtggagaatccagatttgacaccaatattaactttttactagaagaatatggaatcatggttaataatgatgctgtggttagaaatgtatatcacaaatatttccatcctaaagaagctctagtttccagtggagtcttgaacagggaaattagccgagctgcaggaaaggctgtgcctgggatcattgatgangaaagcagtggaaacaatgcccaggctctcacctttgtgtatccttttggtgccacattgagtgtcatgaaaccagcagtggcggttctgtctacaggttctgtcngcttccccacttaacagacccattttgggctttctatcactcaaaaaancnaggtggggaaactgggccgtgctnggttcatgtccn

SEQ ID NO: 2869 - DNA, 816 bp, Homo sapiens
  misc_feature (328)..(328): "n" may be a, t, c, g, other or unknown
  misc_feature (363)..(363): "n" may be a, t, c, g, other or unknown
  misc_feature (373)..(374): "n" may be a, t, c, g, other or unknown
  misc_feature (408)..(408): "n" may be a, t, c, g, other or unknown
  misc_feature (444)..(444): "n" may be a, t, c, g, other or unknown
  misc_feature (477)..(477): "n" may be a, t, c, g, other or unknown
  misc_feature (479)..(479): "n" may be a, t, c, g, other or unknown
  misc_feature (493)..(493): "n" may be a, t, c, g, other or unknown
  misc_feature (590)..(590): "n" may be a, t, c, g, other or unknown
  misc_feature (592)..(592): "n" may be a, t, c, g, other or unknown
  misc_feature (598)..(598): "n" may be a, t, c, g, other or unknown
  misc_feature (611)..(611): "n" may be a, t, c, g, other or unknown
  misc_feature (755)..(755): "n" may be a, t, c, g, other or unknown
  misc_feature (758)..(758): "n" may be a, t, c, g, other or unknown
  misc_feature (766)..(766): "n" may be a, t, c, g, other or unknown
  misc_feature (780)..(781): "n" may be a, t, c, g, other or unknown
gtggctgctgcggatgtcggtgtgagcgagcggcgcctgaacacacggcggctgccgagcgcctgacccgggcctgcgccagagcctgcaccgagctccggggccccacacccgctacggtggccctgcgcccgttgctactgaggcggcgtgctctgcattcttcgctgtccaggcctgccggctctggtgtctgctggctcctccttgctcgcctgctccctcctgcttgcctgagtcaccgccgccgccgccgccacagccatggccgagagtggtgaaagcggcggtcctccgggctcccaagatagcgccgccggagccgaangtgctggcgcccccgcggccgctgcctccgcggancccaaaatcnngaaagtcaccgtgaagaccccgaaggaaaaggangaattcgccgtgcccgaaaataactccgtccagcantttaaggaagaaatctctaaacgttttaaatcncntactgaccaacttntgttgatatttgctggacaaattttgaaagatcaagataccttgagtcagcatgggaattcatgatgagacttactgttcaccttgtcattaaaacncnaaacanggcctcaggatcnttcagctcagcaaacaaatacagctggaagccatgttactacatcatcaactcctaatagtaactctacatctggttctgctaactagcaaccctttttgggtttaagttggccttgggggggaatttgcaaggtctgaattanctnggggtttngaaatactaacccnncttcctctgaaatttccgaatcccgaatgccggcg

SEQ ID NO: 2870 - DNA, 717 bp, Homo sapiens
  misc_feature (34)..(34): "n" may be a, t, c, g, other or unknown
  misc_feature (443)..(443): "n" may be a, t, c, g, other or unknown
  misc_feature (604)..(604): "n" may be a, t, c, g, other or unknown
  misc_feature (637)..(637): "n" may be a, t, c, g, other or unknown
  misc_feature (644)..(644): "n" may be a, t, c, g, other or unknown
  misc_feature (651)..(651): "n" may be a, t, c, g, other or unknown
  misc_feature (669)..(669): "n" may be a, t, c, g, other or unknown
  misc_feature (710)..(710): "n" may be a, t, c, g, other or unknown
gaggaaataattaagcttattaaagacaaaaganaggatgttagttttcgaaacattggcataataactcattacaaggcccagaagacgatgattcagaaggatttggacaaagagttcgatagaaaaggaccagcagaagtagacactgtggatgcattccagggtcggcagaaggattgtgttattgttacgtgtgtcagagcaaatagcatccaaggttcaattggattcctggcaagtttgcagagattgaatgtcaccatcacacgagccaagtacagcctcttcatcctcggacatttgaggaccctgatggaaaaccagcattggaatcagctgattcaggatgctcagaagcgtggtgccattattaagacctgtgacaaaaactatagacatgatgcagtgaagattctgaaactcaagcctgtgctgcaganaagtctcactcaccctcctaccatagccccagaggggtccagaccccagggtggtttgcccagcagcaagctagacagtggatttgccaagacatctgttgctgcttctctataccacacaccctctgactccaagggaaattactcttactgttacttcnaagggaccctgaaagaactcctgttcatgaccnacttccnggaaccncgaatgctgaaaaagatngggctttgaagtccaaggaagaatttccttttggggatccncaacccc

SEQ ID NO: 2871 - DNA, 552 bp, Homo sapiens
  misc_feature (12)..(12): "n" may be a, t, c, g, other or unknown
  misc_feature (142)..(142): "n" may be a, t, c, g, other or unknown
  misc_feature (151)..(151): "n" may be a, t, c, g, other or unknown
  misc_feature (179)..(179): "n" may be a, t, c, g, other or unknown
  misc_feature (246)..(246): "n" may be a, t, c, g, other or unknown
  misc_feature (306)..(306): "n" may be a, t, c, g, other or unknown
  misc_feature (329)..(329): "n" may be a, t, c, g, other or unknown
  misc_feature (332)..(332): "n" may be a, t, c, g, other or unknown
  misc_feature (441)..(441): "n" may be a, t, c, g, other or unknown
  misc_feature (482)..(482): "n" may be a, t, c, g, other or unknown
  misc_feature (492)..(492): "n" may be a, t, c, g, other or unknown
  misc_feature (526)..(526): "n" may be a, t, c, g, other or unknown
  misc_feature (535)..(535): "n" may be a, t, c, g, other or unknown
  misc_feature (552)..(552): "n" may be a, t, c, g, other or unknown
tctaaaaatgcntcctgaaggttccctaatttctaaatctgggaaaccacttccgaaccagctacttttaaatttctcagactggctgggggaaaatagaaacttagccactctaacatggtagatggaggcgtgaactgtnataaccctnagatgggtatacagaatttttctccccnagtagcagtcacattgcaaaaagattatattgctattgaattttaaggtgtagattaaatgtctgtnatatgtgcataatcttccattcctgggatcttagtcttgacattttctttttaagcatanaacacccctcctttacaaagaangtnatctgtggaaggaaagacatgctaatatgatggttttaattataattccctcagaacggaatatatccattaagtacatggcatatatatggctatagaaactgctacntgtatttaatttattgccttaatttttttttatctctctcnggatagaccntttagaaactatccagcaactcctaactgcagtngtaaagaanatccattaatcactgcn

SEQ ID NO: 2872 - DNA, 760 bp, Homo sapiens
  misc_feature (291)..(291): "n" may be a, t, c, g, other or unknown
  misc_feature (554)..(554): "n" may be a, t, c, g, other or unknown
  misc_feature (627)..(627): "n" may be a, t, c, g, other or unknown
  misc_feature (683)..(683): "n" may be a, t, c, g, other or unknown
  misc_feature (693)..(693): "n" may be a, t, c, g, other or unknown
  misc_feature (715)..(715): "n" may be a, t, c, g, other or unknown
  misc_feature (743)..(743): "n" may be a, t, c, g, other or unknown
  misc_feature (753)..(753): "n" may be a, t, c, g, other or unknown
ctgttccaaaccacgtggacgcgtctgggctgctggaggcagcccgagccgccgccgtcggtgtcgccgccaccaccaccatcggagtcacgagtcccgcgtctgtccgaagtcgccgctctcgggctgctcacgtctcttcggagagcgcgcacatggcgactcaggcgtactccctcagctacgcagggtgcaacttcttgcgccaacgtctggtcctgtctaccctgagcgggcgccccgtcaaaatccgaaagattcgggccagagacgacaacccgggcctccganattttgaagccagcttcataaggctattggacaaaataacgaatggttctcgaattgaaataaaccaaacaggaacaaccttatattatcagcctggcctcctgtatggtggatctgtggaacatgactgtagcgtccttcgtggcattgggtattacctggagagtcttctttgcttggctccatttatgaagcacccgttaaaaatagttctacgaagagtgaccaatgatcaggttgacccttcagttgatgttcttaangcaacagcactccctttgttgaaacaatttgggattgatggtgaatcatttgaaactgaatattgtggcgaangggaatgcctcccggaaagaagaagcgaaatggttttctcatgtctgttaaggaangtcttgaaancccattccactcccagattcangaaaaaatccaacgttttaaaaagaaanggcgttcccngttacgt

SEQ ID NO: 2873 - DNA, 896 bp, Homo sapiens
  misc_feature (374)..(374): "n" may be a, t, c, g, other or unknown
  misc_feature (415)..(415): "n" may be a, t, c, g, other or unknown
  misc_feature (550)..(550): "n" may be a, t, c, g, other or unknown
  misc_feature (614)..(614): "n" may be a, t, c, g, other or unknown
  misc_feature (626)..(626): "n" may be a, t, c, g, other or unknown
  misc_feature (628)..(628): "n" may be a, t, c, g, other or unknown
  misc_feature (658)..(658): "n" may be a, t, c, g, other or unknown
  misc_feature (662)..(662): "n" may be a, t, c, g, other or unknown
  misc_feature (820)..(820): "n" may be a, t, c, g, other or unknown
  misc_feature (825)..(825): "n" may be a, t, c, g, other or unknown
  misc_feature (854)..(854): "n" may be a, t, c, g, other or unknown
  misc_feature (866)..(867): "n" may be a, t, c, g, other or unknown
attaatatgtgctcatatcttactcaacatcagagagtctgtacttaataaaaccattatagatgcaactagtgtcaaaagatctttcagaaaataaaagcctttaaagtgaagaagataattcattctgaagacaaacattacaaatattaagagggttgtagtaccattacttgcatcacagatcttattgtacacattttgtactaaagaaaaccctgaagcagttgctcaaatactgttcaacatcagaaaatttatattggaaaaaacccctggaaaatgtaataaatttgtaaaaacagttttgaaaaactacagcttataaaacatgagggtctataatgcttggttgatagtacaaagtttattcnacatcagggaatttatattggagaaaaaccctacaaatgtnatcagtttggaaaaacatttttaaaaaaaccacagcatagaaaacaccacagggttcatactaaaatatgtttttgcagatgcagtaaaaatgaaaaaaatttaatccgaaattaagtttatgtaaatatctganaattcacagtagaaatatctaaggcgcggacacttcagacattacactaaatcagtgctaagtncagaaaacaacncnaaataaaacttggtggataaattatttgtntatnacattaaaagaagtagaagattttcagttataattaccattaaaagtttacttttatcttgaaaaaaattactgaatttttaaattaagtggaataatgatgttatttaaactccccaaataacttttatgctccttttttccattcccggctaatanttccncatgttgaaaagcatgttgaaccaattgntggctggccccnnaagaatttgaaaaaaattcctttttattt

SEQ ID NO: 2874 - DNA, 560 bp, Homo sapiens
  misc_feature (340)..(340): "n" may be a, t, c, g, other or unknown
  misc_feature (484)..(484): "n" may be a, t, c, g, other or unknown
  misc_feature (516)..(516): "n" may be a, t, c, g, other or unknown
  misc_feature (547)..(547): "n" may be a, t, c, g, other or unknown
acacgccgcgctgaggcccgcgggcccgtcatggaggcgcccaccgtgggagacgcccccccgacccctcgcccccttcggccccggcccctgccctggttccgttgcgcgccccggatgtggcgcggctgcgcgaggagcaggaaaaggaagaaggtagataatgactataatgcccttcgagaaagactcagcaccttgcctgataaattgtcttataatataatggtaccatttggcccttttgccttcatgccaggaaaacttgtccatactaatgaagtctctgttttactgggggacaactggtttgcaaagtgctcaacaaagcaggctgtangtttagttgagcaccggaaagaacatgttagaaaaacaatagatgacttaaaaaaagtgatgaaaaattttgaatccagagttgaattcacagaagatttgcagaaaatgaacgatgctgcaggtgatattgttgacatacganaagaaattaaatgtgacttcgaatttaaagcnaaacaccgaattgctcataaaccgcattccnaaccaaaaacttc

SEQ ID NO: 2875 - DNA, 602 bp, Homo sapiens
  misc_feature (377)..(377): "n" may be a, t, c, g, other or unknown
  misc_feature (422)..(422): "n" may be a, t, c, g, other or unknown
  misc_feature (519)..(519): "n" may be a, t, c, g, other or unknown
  misc_feature (593)..(593): "n" may be a, t, c, g, other or unknown
  misc_feature (600)..(600): "n" may be a, t, c, g, other or unknown
tttttatgtcggaatatgaagcaacaaatttattgatccgagctctgtgtcacttttatgatcaagatgaggaggaaggtctccaatctgatggtgttattgatgatgcatttgccttgtggctacaggactcaacacagacattgcaatgtattacagaactgttcagccattttcagcgttgtacagccagtgaagaaacagaccattcagatctcttgggaaccctgcacaatctttatttgattacttttaatcctgtgggaagatcagctgttggccatgtttttagtctggagaaaaatctccaaagtcttattactctaatggagtactattccaaagaagccttgggtgattccaaatctaagaagtcngtagcttataattacgcatgcatacttattttggtggtggttcantcttccagtgatgttcaaatgctagaacaacatgcagcatctctcttgaagctttgtaaagcagatgaaaataatgctaaattgcaagaacttggcnagtggcttgaacctctgaaaaaccttagatttgaaattaactgcatcccaaacttaattgagtttgttaagcanaatatcnat

SEQ ID NO: 2876 - DNA, 489 bp, Homo sapiens
  misc_feature (179)..(179): "n" may be a, t, c, g, other or unknown
  misc_feature (200)..(200): "n" may be a, t, c, g, other or unknown
  misc_feature (210)..(210): "n" may be a, t, c, g, other or unknown
  misc_feature (391)..(391): "n" may be a, t, c, g, other or unknown
  misc_feature (442)..(442): "n" may be a, t, c, g, other or unknown
  misc_feature (484)..(484): "n" may be a, t, c, g, other or unknown
gggggctgctgggaaggccggcgggatggaggcggcgggaccggctcgcgggtgcgggtccgggtgaagcgggaggcagccagagtcggagccgggcccgagcaccaggcgcaggcccggcgcccgcctgcccgcaccctcgtcctcacagacgccacagccatggccatgatggtgtntccgcgggaggagaagctganccaagatganatcgtgctgggcaccaaggctgtcatccaggggactggagactctgcgtggggagcatcgtgccctgctggctcctctggttgcacctgaggccggcgaaacctagcctggctcgcaggatcgctgcatcctcctgcgtcgctccctggaatccattgagcttgggctgggggaggcccangtgatcttggcattgtcgaaccacctgggggctgtagaatccgagaaacanaagctgcgggcgcacgttcggcgtctggtgcaagaaaaccantggct

SEQ ID NO: 2877 - DNA, 826 bp, Homo sapiens
  misc_feature (418)..(418): "n" may be a, t, c, g, other or unknown
  misc_feature (548)..(548): "n" may be a, t, c, g, other or unknown
  misc_feature (585)..(585): "n" may be a, t, c, g, other or unknown
  misc_feature (614)..(614): "n" may be a, t, c, g, other or unknown
  misc_feature (626)..(626): "n" may be a, t, c, g, other or unknown
  misc_feature (645)..(645): "n" may be a, t, c, g, other or unknown
  misc_feature (669)..(669): "n" may be a, t, c, g, other or unknown
  misc_feature (734)..(734): "n" may be a, t, c, g, other or unknown
  misc_feature (742)..(742): "n" may be a, t, c, g, other or unknown
  misc_feature (770)..(770): "n" may be a, t, c, g, other or unknown
  misc_feature (803)..(803): "n" may be a, t, c, g, other or unknown
  misc_feature (811)..(811): "n" may be a, t, c, g, other or unknown
attaaatgattataaactaaggaaaaggaagacttttgaagataatataagaaaaaacaggactgtgattagtaactggataaaatacgcacaatgggaagaaagcctaaaggagattcaaagggctcgatccatatacgagcgtgctttagatgtagactaccgaaatattacactctggctgaaatacgcagaaatggaaatgaagaatcgccaagtcaaccatgctcgaaatatctgggaccgggccataacaacgctgcctcgagttaatcagttctggtacaagtacacgtacatggaggaaatgttgggaaacgttgccggtgcccggcaggtgtttgagcgctggatggagtggcagcctgaggagcaagcctggcactcctacatcaactttgagctgagatacaaagangtggatcgggcccgcaccatttatgagcgatttgtcctcgtgcaccctgatgttaagaactggatcaagtatgcccgctttgaaaaaaaacatgcttattttgcccatgcacggaaagtgtatgagaganctgtggaattctttggagatgaacatatggatgagcncctttatgttgcctttgccaagtttgaanaaaatcagaaanaatttgaaagggttacgantgatttacaagtttgccctggacngaatttccaaaccagatgccccagaaaccttttaaaattattcccctcctttgaaaaaaaatttnggtgaatnggcgggggtttttaaaaatttctttgtnaagccaaaccggaaaattccccgtttccaaaanaaaaaaantttaaagggcgaaat

SEQ ID NO: 2878 - DNA, 662 bp, Homo sapiens
  misc_feature (205)..(205): "n" may be a, t, c, g, other or unknown
  misc_feature (282)..(282): "n" may be a, t, c, g, other or unknown
  misc_feature (516)..(516): "n" may be a, t, c, g, other or unknown
  misc_feature (559)..(559): "n" may be a, t, c, g, other or unknown
  misc_feature (577)..(577): "n" may be a, t, c, g, other or unknown
  misc_feature (595)..(595): "n" may be a, t, c, g, other or unknown
  misc_feature (618)..(618): "n" may be a, t, c, g, other or unknown
  misc_feature (624)..(624): "n" may be a, t, c, g, other or unknown
  misc_feature (661)..(661): "n" may be a, t, c, g, other or unknown
gtgacttcgggctgtgggctcgctcgcggctcttcggccatggttttctcaaacaatgatgaaggccttattaacaaaaagttacccaaagaacttctgttaagaatattttccttcttggatatagtaactttgtgccgatgtgcacagatttccaaggcttggaacatcttagccctggatggaagcaactggcaaagaatanatctttttaactttcaaacagatgtagagggtcgagtggtggaaaatatctcgaagcgatgcggtggattcctgaanaagctcagcttgcgaggctgcattggtgttggggattcctccttgaagacctttgcacagaactgccgaaacattgaacatttgaacctcaatggatgcacaaaaatcactgacagcacgtgttatagccttagcagattctgttccaagctgaaacatctggatctgacctcctgtgtgtctattacaaacagctccttgaaagggatcagtgagggctgccgaaacctggantacctgaacctctcttggtgtgatcagatcacgaaggatggcntccaagcactggtgcgangttgtccaagcctgaaanccctgctcctgaagggctgcccncagttngaaaatgaagctctgaaacacattcaaattactgccnt

SEQ ID NO: 2879 - DNA, 557 bp, Homo sapiens
  misc_feature (62)..(62): "n" may be a, t, c, g, other or unknown
  misc_feature (98)..(98): "n" may be a, t, c, g, other or unknown
  misc_feature (257)..(257): "n" may be a, t, c, g, other or unknown
  misc_feature (279)..(279): "n" may be a, t, c, g, other or unknown
  misc_feature (282)..(282): "n" may be a, t, c, g, other or unknown
  misc_feature (399)..(399): "n" may be a, t, c, g, other or unknown
  misc_feature (413)..(413): "n" may be a, t, c, g, other or unknown
  misc_feature (514)..(514): "n" may be a, t, c, g, other or unknown
  misc_feature (519)..(519): "n" may be a, t, c, g, other or unknown
  misc_feature (523)..(523): "n" may be a, t, c, g, other or unknown
  misc_feature (539)..(539): "n" may be a, t, c, g, other or unknown
  misc_feature (544)..(544): "n" may be a, t, c, g, other or unknown
aatttagggttggggtacaatttgtttctattaagcaagtaccagtttaccaatacatggantaactgaagtgtaactgttaaatgcttgtatactantttttctttctgattgtcagtgatttataagctataaatgaccaaggtcctcagactgcttttagcatctgcaacttaaaaaaatgggagttagaaaaagaacaaatgctaaatagagtaacagttaaatgtatgtgtacactcttcccaaatgccaanagtgcagcggtggggtgagatncanatattcatttatttctaagtctgtagttaacatttatgttccctactccctacgtaagccagactttggcaacagtgatagttgattccaggcttatttgacttaaagtcactgaantggaaactaagaantggcagttagtgttttacccagcatttctgccttctctcttttcttcatgtgtttttgtctctagcctatgtgtatttgtgtaaaataatgtgggataccngaatnatanatttaaaaggaccaantggtnaaattgggcccaa

SEQ ID NO: 2880 - DNA, 700 bp, Homo sapiens
  misc_feature (40)..(40): "n" may be a, t, c, g, other or unknown
  misc_feature (605)..(605): "n" may be a, t, c, g, other or unknown
  misc_feature (623)..(623): "n" may be a, t, c, g, other or unknown
  misc_feature (673)..(673): "n" may be a, t, c, g, other or unknown
  misc_feature (677)..(677): "n" may be a, t, c, g, other or unknown
  misc_feature (685)..(685): "n" may be a, t, c, g, other or unknown
atgaatgaacacttatcaagcctaattaaaaaaaaacgtnaatgtatgcagcccaaagattttaattttaaaacaccagaaaatgataagagatttcagaagaaatttgagaaaatggctaaagagctacaaaggcaaaaaacaaatctagatgatgatgtacctattctcttatttgaatctaatggttcattaatatatactcccacaattgaaattaatagtagtcaccacagcgcaatggagaagagattacaagagatgaaggagaaaagggaaaatctttcccccacctcttcccaaatgattcagcagtctcatgataatccaagtaactctctgtgtgaagcacctttgaacatttcacgtgatactttgtgttcagatgaatactttgctggtggcttacactcatcttttgatgatctttgtggaaactcaggatgtggaaatcaggaaaggaagttggaaggatccattaatgacattaaaagtgatgtgtgtatttcttcacttgtattgaaagcaaataatattcattcatcaccatctttcactcacctcgataaatcaagtcctcagaaatttctgagtaatctttcaanggaagaaataaacttgcnaagaaatattgcgggttaagtaatccccctcaccaaaaaccagctggcanggtntgtctccnggaaacgttttgaaa

SEQ ID NO: 2881 - DNA, 640 bp, Homo sapiens
  misc_feature (109)..(109): "n" may be a, t, c, g, other or unknown
  misc_feature (460)..(460): "n" may be a, t, c, g, other or unknown
  misc_feature (470)..(470): "n" may be a, t, c, g, other or unknown
  misc_feature (604)..(604): "n" may be a, t, c, g, other or unknown
  misc_feature (626)..(626): "n" may be a, t, c, g, other or unknown
  misc_feature (632)..(632): "n" may be a, t, c, g, other or unknown
aagaagatgcctggagcaggcagcatcctcaaatggaaggtaattgccctcaaatcacttaactaggatgacctactttgctttcctgtatagccaggtctgttatcanacccttatcttgggaggcatcgtgccagagcctggggcaagaaagggctgctatccaggaatgcaggtgaaattatagctattagccctgtcttagagtgtgaggaaaatgtgcccccctacccctggctaagtttgggttcccatgtcataaactgcctccctctctgatagctctgcataaacatcccaggaactcaaagtaacatttgatttcccaaagagaacatttgcatttgtaactgtcagaaataggagagatcatcaaagctaaatgaattgggctataaacagtttgaaatatgtctttaaattttaaaaaacatattttttgtttgttttggggagagangatcatttanactcaacaacaaaacagaaaactgtgagtgccattttgagacaagacctacctggtccttccccctcatactttctgctaccccgtgacctccctctctccttccagtcacagattatccgcttggttttgganttttaaatgtgtggtcctgaanaggganaagaaaac

SEQ ID NO: 2882 - DNA, 696 bp, Homo sapiens
  misc_feature (534)..(534): "n" may be a, t, c, g, other or unknown
  misc_feature (649)..(649): "n" may be a, t, c, g, other or unknown
  misc_feature (666)..(666): "n" may be a, t, c, g, other or unknown
  misc_feature (684)..(684): "n" may be a, t, c, g, other or unknown
  misc_feature (690)..(690): "n" may be a, t, c, g, other or unknown
  misc_feature (692)..(692): "n" may be a, t, c, g, other or unknown
cagttatattctactctgaaagaaggcaacccaccctgggaggtgacagaagcggttctctttatcatggctgctatagcaaagagtgttgatccggaaaacaatccaacacttgtggaagtcctagaaggagttgtccgcctcccggagaccgtacatacggctgtgcgttacaccagcattgaattggttggagagatgagtgaagtcgttgatcgaaatcctcagttccttgaccctgtgttgggctatttgatgaaaggcctgtgtgaaaagcccctggcttctgctgcagccaaagccattcataacatttgctctgtctgccgagatcacatggctcagcactttaatggactcctggagattgcccgctccctcgattccttcctgttgtctccagaagctgctgtgggcttgctaaaagggacagcacttgtcctagcccgattacctttggataagattaccgaatgtcttagtgaactatgttctgttcaggttatggcattgaaaaagctgttgtctcaagancccagcaatggcatatcctcagatcccacagtgttcttagatcgccttgcagtgatatttaggcataccaatcccattgtggaaaatggacagactcatccgtgtcagaaagtcntacaggaaatatggccngttttatccgagactctnaattancnccga

SEQ ID NO: 2883 - DNA, 625 bp, Homo sapiens
  misc_feature (444)..(444): "n" may be a, t, c, g, other or unknown
  misc_feature (479)..(479): "n" may be a, t, c, g, other or unknown
  misc_feature (489)..(489): "n" may be a, t, c, g, other or unknown
  misc_feature (509)..(509): "n" may be a, t, c, g, other or unknown
  misc_feature (563)..(563): "n" may be a, t, c, g, other or unknown
  misc_feature (573)..(573): "n" may be a, t, c, g, other or unknown
  misc_feature (590)..(590): "n" may be a, t, c, g, other or unknown
  misc_feature (599)..(599): "n" may be a, t, c, g, other or unknown
  misc_feature (612)..(612): "n" may be a, t, c, g, other or unknown
tagacatgcccagagttatgattacaaatttaggaggtagacggctcaggaattccctgggattgttgtgctggtggaatggcagagggaacttcacaggaaccttagtgctcttttacctcaaagccacagacaggaaatagaaagtggaaaagtaatatctccttttcttttccataaggagtttcaacactgaactttaaaaagtctatcatattccagcaatattttttctttgtcctttatgttgtaagttgtgtggaaaaactacttcggtaagaaatgttactgagataacaacaactggctaatactgcatgtagattgcttaggttttaaagtgactgcctgacttcacatgttattgctacagcctccagtatgttcgcattatctcaaactcagggaccccacaggacaggagacaccctttctgaaactganttggaagtgaaagggtggtgatggttttggccaancctgcggganggaaagtattgtattgggancacccttgggaccaggaagaaggatgcccaggttcacactctgggacccctaanacattgtcantgggtaaggtggaaggncactgccanaagctgctgccantgcctctggggaa

SEQ ID NO: 2884 - DNA, 556 bp, Homo sapiens
  misc_feature (85)..(85): "n" may be a, t, c, g, other or unknown
  misc_feature (132)..(132): "n" may be a, t, c, g, other or unknown
  misc_feature (203)..(203): "n" may be a, t, c, g, other or unknown
  misc_feature (216)..(216): "n" may be a, t, c, g, other or unknown
  misc_feature (232)..(232): "n" may be a, t, c, g, other or unknown
  misc_feature (282)..(282): "n" may be a, t, c, g, other or unknown
  misc_feature (404)..(404): "n" may be a, t, c, g, other or unknown
  misc_feature (511)..(511): "n" may be a, t, c, g, other or unknown
  misc_feature (534)..(534): "n" may be a, t, c, g, other or unknown
  misc_feature (537)..(537): "n" may be a, t, c, g, other or unknown
  misc_feature (550)..(550): "n" may be a, t, c, g, other or unknown
  misc_feature (556)..(556): "n" may be a, t, c, g, other or unknown
tagatgctgctaactgttcctcggctgatcgttttgtgacccttctgctgcctacaatccttgatcaacttcagttcacagaacnaaatctagattaggctttaacaagaaaaaaatgtgaaaggattgccnaggccattgaagttttgttaactctctgtggagatgatacactaaaaatgcatattgcaaaaatcttgacnactgtcaagtgtnccactcttatagaacnacaatttacatatggcaagattgacctgggatttggaacaaaggttgcanattctgaattatgcaaacttgctgctgatgttttttgaaaactcttgatttgattaacaaacttaaaccattggttcctggtatggaagtaagcttctactaaatacttcacgacccacgtntgattactcctttggcttttgctttaacgtccgataatagagaacaagtacagtctggactgagaatattattggaggctgctccactgccagattttcctgctttngtacttgggagaaagtatagcancanacaatgcctattnacgacn

SEQ ID NO: 2885 - DNA, 565 bp, Homo sapiens
  misc_feature (365)..(365): "n" may be a, t, c, g, other or unknown
  misc_feature (432)..(432): "n" may be a, t, c, g, other or unknown
  misc_feature (482)..(482): "n" may be a, t, c, g, other or unknown
  misc_feature (487)..(487): "n" may be a, t, c, g, other or unknown
  misc_feature (549)..(549): "n" may be a, t, c, g, other or unknown
gtgctgggccgcgggccgaaagatcgccagggctgcgtatgcttgtggcgcgcccgcggagaggccggggctctgacgcccgctctgcggcttcggtgtttgaacaggccacagtccaggagcgcttacattcaggagctccgcgtagcacctgcccaaccaaactcagccctccgttaagatcctggttccatgccgcagtaagacagcaggcccaagtctgcacatcccagtgatgcaccatgccaatagtggataagttgaaggaggccctgaaacccggccgcaaggactcggctgatgatggagaactggggaagcttcttgcctcctctgccaagaaggtccttttacagaaaatcganttcgagccagccagcaagaacttctcctaccagctggaggccttaaagaacaaatatgtgttgctcnaccccaaaacagagggagctagtcgccacaagaatggagatgaccccccngccangagacgggcagtgagcacacgtttgagaactgtggtgaccgaatccccgccccgcagaaatncttttcccacgggagc

SEQ ID NO: 2886 - DNA, 539 bp, Homo sapiens
  misc_feature (50)..(50): "n" may be a, t, c, g, other or unknown
  misc_feature (54)..(54): "n" may be a, t, c, g, other or unknown
  misc_feature (202)..(202): "n" may be a, t, c, g, other or unknown
  misc_feature (358)..(358): "n" may be a, t, c, g, other or unknown
  misc_feature (466)..(466): "n" may be a, t, c, g, other or unknown
  misc_feature (481)..(481): "n" may be a, t, c, g, other or unknown
  misc_feature (505)..(505): "n" may be a, t, c, g, other or unknown
  misc_feature (513)..(513): "n" may be a, t, c, g, other or unknown
  misc_feature (538)..(538): "n" may be a, t, c, g, other or unknown
actgagtttgagggtgcagtcatagctctgttccatttgttggccaccangacngacaaagtccgagctttacgggaggctttttatcggcagaacttacccaatctcatgaacctcattgctacagtttttgtgtttgctgttgttatatatttccaaggatttcgcgttgatctgcccattaagtcggcccgttaccgangacagtacagcagctaccccatcaaactcttctacacctccaacatccccatcatcctccagtcggccctggtgtccaacctgtatgttatttcccagatgctgtctgttcgatttagtggcaactttttagtaaatttactaagacagtgggccnatttcagtgggggaagacccgcacgttcttacccagttggaggcctttgttactatctttctcctcctgagtccatgggcgccatctttgaagatcctgtccatgtcnttgtttatatcatcntcatgttggggtcatgttcattcntctctaanacatggattgaagtgtctggttccnc

SEQ ID NO: 2887 - DNA, 670 bp, Homo sapiens
  misc_feature (55)..(55): "n" may be a, t, c, g, other or unknown
  misc_feature (157)..(157): "n" may be a, t, c, g, other or unknown
  misc_feature (183)..(183): "n" may be a, t, c, g, other or unknown
  misc_feature (511)..(511): "n" may be a, t, c, g, other or unknown
  misc_feature (554)..(554): "n" may be a, t, c, g, other or unknown
  misc_feature (615)..(615): "n" may be a, t, c, g, other or unknown
  misc_feature (620)..(620): "n" may be a, t, c, g, other or unknown
  misc_feature (633)..(633): "n" may be a, t, c, g, other or unknown
  misc_feature (645)..(645): "n" may be a, t, c, g, other or unknown
  misc_feature (659)..(659): "n" may be a, t, c, g, other or unknown
aaaaaaaaatgaggcccctgcagcagcagcggcgtggtcagagcgagcttcgganaagcagtggtgggttccatgtgatggtggagtaggaggcaggtctccgcggttcatctgtgttgctctaaatgacactgcttcattattttgatggctgganaatatttcctagtgtatgtatatganagtttcttgatctctttatctgtggatgaacagctactttgaaacatatggtacatttgtgttaaggctagtcaccctgctgtggaatagaaggccagaattgatcagtctcatctgagagtaactttgtacccatcactgattccttctgagactgcctccacttccccagcagcctctggtttcttcatgtggctgcagatggcaggatttcccaaaggtttctggctgaaacatattccgtggtgtatctgtacagcagtttcctcatccctgcagctgtgtttgaacaggtcatttaccatgctgtcctccaggttcaacagtntggctccaaaggatgaaatttcattctgattttctggctgaanactattctctttgtgtatgtccaccacagttactttatcccttcctctgtggatggggcantctcnctgttttgcccangctggaatgcantggcatgatctcanctcacttgcaa

SEQ ID NO: 2888 - DNA, 589 bp, Homo sapiens
  misc_feature (76)..(76): "n" may be a, t, c, g, other or unknown
  misc_feature (127)..(127): "n" may be a, t, c, g, other or unknown
  misc_feature (137)..(137): "n" may be a, t, c, g, other or unknown
  misc_feature (164)..(164): "n" may be a, t, c, g, other or unknown
  misc_feature (303)..(303): "n" may be a, t, c, g, other or unknown
  misc_feature (397)..(397): "n" may be a, t, c, g, other or unknown
  misc_feature (409)..(409): "n" may be a, t, c, g, other or unknown
  misc_feature (454)..(454): "n" may be a, t, c, g, other or unknown
  misc_feature (492)..(492): "n" may be a, t, c, g, other or unknown
  misc_feature (517)..(517): "n" may be a, t, c, g, other or unknown
  misc_feature (525)..(525): "n" may be a, t, c, g, other or unknown
  misc_feature (581)..(581): "n" may be a, t, c, g, other or unknown
  misc_feature (589)..(589): "n" may be a, t, c, g, other or unknown
ggacgtcacggtcactgacagcgtgagcccgcggcggctgctgccatggtggctggcggccgggtaagggtctgantggatctcctgccaggccagaacgccttcgggggccgcggcggaaggccangagtttgcanccagggcgccgggtttgtggtctgcantgtcgtgaggctgaggtgcatcatgtctagactgggagccctgggtggtgcccgtgccgggctgggactgttgctgggtaccgccgccggccttggattcctgtgcctcctttacagccagcgatggaaacggacccancgtcatggccgcagccagagcctgcccaactccctggactatacgcagacttcagatcccggacgccacgtgatgctcctgcgggctgtcccangtggggctgganatgcctcagtgctgcccagccttccacggggaaggacaggacaangtgctggaccgcctggactttgtgctgaccaccttgtnggcgctgcggcgggaggtggagganctgaaaancagcctgcgaaggcttgcgggggaaattgtttggggaagtccgatgccacatgganaaaaaccn

SEQ ID NO: 2889 - DNA, 814 bp, Homo sapiens
  misc_feature (45)..(45): "n" may be a, t, c, g, other or unknown
  misc_feature (343)..(343): "n" may be a, t, c, g, other or unknown
  misc_feature (347)..(347): "n" may be a, t, c, g, other or unknown
  misc_feature (474)..(474): "n" may be a, t, c, g, other or unknown
  misc_feature (587)..(587): "n" may be a, t, c, g, other or unknown
  misc_feature (590)..(590): "n" may be a, t, c, g, other or unknown
  misc_feature (620)..(620): "n" may be a, t, c, g, other or unknown
  misc_feature (634)..(634): "n" may be a, t, c, g, other or unknown
  misc_feature (658)..(658): "n" may be a, t, c, g, other or unknown
  misc_feature (734)..(734): "n" may be a, t, c, g, other or unknown
  misc_feature (744)..(744): "n" may be a, t, c, g, other or unknown
  misc_feature (790)..(791): "n" may be a, t, c, g, other or unknown
  misc_feature (804)..(804): "n" may be a, t, c, g, other or unknown
ttttcagtagcgtctcctccttattcattcacttttactgtgaanactgaaatccaaaagccaggttccccaaaaaagtatttttaaaaaattttaggggaccaaaataaatagaggaagaccaatataaaaaaatatgttcaactattccattttaaatttaaagcagaaaaaaaaattgtgcccctcagacctaaaggcagctttaaatgtatatagtttggtgaaacatttgggaaatattaatttggaggtttagaagcatacgaaaaacaaattcaaagcacttgaaagtaaagacaatatcatgaggtcgaaaaaaacttcaaaaggatattaggtnaganaaaatgtgaatgaaagcagtgaatttctgcctctcctcgtatttagggtacttaaaattactaaaaaatactgtctttttaccatacagctagatggcctgtattattcttaatgtggccaaaggantgaagactgattagggttttagaatttggaactgtagtcacataaaggcatcttttgcatttcttaaaccagtaatctacattttctcctgggaaatgggagaaatatgaaantgntgctgtgcataagcttttgggaatagaaanacaaagttttaaanagaatgggatatgttttccttgcncaacttgttaaaattttaatttaaaaaatttacctccattttttccaatccataaagggtgcttttggcctccaanttttgttggngaatgttttggttcccatccccattaaaaaaccccctttcaccccnnaactggtattttngaaaatattg

SEQ ID NO: 2890 - DNA, 739 bp, Homo sapiens
  misc_feature (218)..(218): "n" may be a, t, c, g, other or unknown
  misc_feature (446)..(446): "n" may be a, t, c, g, other or unknown
  misc_feature (490)..(490): "n" may be a, t, c, g, other or unknown
  misc_feature (569)..(569): "n" may be a, t, c, g, other or unknown
  misc_feature (572)..(572): "n" may be a, t, c, g, other or unknown
  misc_feature (585)..(585): "n" may be a, t, c, g, other or unknown
  misc_feature (632)..(632): "n" may be a, t, c, g, other or unknown
  misc_feature (681)..(681): "n" may be a, t, c, g, other or unknown
  misc_feature (684)..(684): "n" may be a, t, c, g, other or unknown
  misc_feature (705)..(705): "n" may be a, t, c, g, other or unknown
  misc_feature (707)..(707): "n" may be a, t, c, g, other or unknown
  misc_feature (737)..(737): "n" may be a, t, c, g, other or unknown
ggattgggccgccgctgctcatccccatgtatttccagtaccagatcatcatgaccatgatcgtccataagaactgggtggacctggcctgggccgtcagctactacatccggttcttcatcacctacatccctttctacggcatcctgggagccctccttttcctcaacttcatcaggttcctggagagccactggtttgtgtgggtcacacagatnaatcacatcgtcatggagattgaccaggaggcctaccgtgactggttcagtagccagctgacagccacctgcaacgtggagcagtccttcttcaacgactggttcagtggacaccttaacttccagattgagcaccacctcttccccaccatgccccggcacaacttacacaagatcgccccgctggtgaagtctctatgtgccaagcatggcattgaataccaaganaaccgctactgagggccctgctggacatcatcaggtccctgaanaatctgggaagccgtggctggacgcctaccttcacaaatgaagccacagcccccgggacactgtggggaaagggtgcangtngggtgatggccanaagaatgatgggcttttgttctgaagggtgtccgaaaagctggtgtntgcactgctcacggacccatgttggatctttctccctttctcctctccnttntctcttcaatctcccccatancncctggccctcttgggaacttgcctcctcancc

SEQ ID NO: 2891 - DNA, 464 bp, Homo sapiens
  misc_feature (94)..(94): "n" may be a, t, c, g, other or unknown
  misc_feature (116)..(116): "n" may be a, t, c, g, other or unknown
  misc_feature (137)..(137): "n" may be a, t, c, g, other or unknown
  misc_feature (161)..(161): "n" may be a, t, c, g, other or unknown
  misc_feature (180)..(180): "n" may be a, t, c, g, other or unknown
  misc_feature (242)..(242): "n" may be a, t, c, g, other or unknown
  misc_feature (324)..(324): "n" may be a, t, c, g, other or unknown
  misc_feature (375)..(375): "n" may be a, t, c, g, other or unknown
  misc_feature (396)..(396): "n" may be a, t, c, g, other or unknown
  misc_feature (399)..(399): "n" may be a, t, c, g, other or unknown
  misc_feature (401)..(401): "n" may be a, t, c, g, other or unknown
  misc_feature (434)..(434): "n" may be a, t, c, g, other or unknown
tttattaactggaggcgacggcggctgcggcggcggcgggaccgcctcctccggggtatgaaaatcggcagtgggttcctgagtggcggcggangtaccggcagtagcggtggtancggctccggcggcggtggtantggcggcggcggcggcggcggcancagcggcaggagggcaganatggaacccacctttccccagggtatggttatgttcaaccaccgtcttcccccggtcaccancctcacccggccggcggggtcggccgcccctcccccgcaatgcgtgttatcctcctctacctccgcagccccggccgctgancccccccctccgccagccccggacatgactttcaaaaaggagccggcggcntcagccgcggccttcccctcncanangacctcctgggggttcttgcagtctttggttancatcaaacaggaaaaacccgcggatcctga

SEQ ID NO: 2892 - DNA, 575 bp, Homo sapiens
  misc_feature (27)..(27): "n" may be a, t, c, g, other or unknown
  misc_feature (414)..(414): "n" may be a, t, c, g, other or unknown
  misc_feature (507)..(507): "n" may be a, t, c, g, other or unknown
  misc_feature (535)..(535): "n" may be a, t, c, g, other or unknown
  misc_feature (542)..(542): "n" may be a, t, c, g, other or unknown
  misc_feature (562)..(562): "n" may be a, t, c, g, other or unknown
  misc_feature (570)..(570): "n" may be a, t, c, g, other or unknown
gtgccgtgcgtcgccttggaaacagangagcatccgcgacacccccggggagacccaccccagctgctgctgccacactcgcgggcgctgcccggtaatggcctgggggagtcccgagtccgacgcgccgctggcctcagcctggacgcggacccctccgcgagcgcgtctgtgacccacggaaccggcaggcgctctctgcttgtggcgcccagagggcggcgctgacacgggcgcgatccgggaggcgaggcagggcagggcactttcgtcccggggcgatcccaagagacgccggctctgggaccctcgccgggtcctcgtcccgcagcctcttctcggcctcccgcgatcctgcctgcgccctctgcccaagactcgtctctcacgtcggctccccgccagtctcgggancctctgcttccctcggctcccgctagcccctcccgggacctctccccctccaccccctcccccaccccggaggccgggctggacgctacccanaacctccgccacccgcttctgccactcnatggaangacggtcttgctggagatcntgaccaangacgg

SEQ ID NO: 2893 - DNA, 683 bp, Homo sapiens
  misc_feature (1)..(1): "n" may be a, t, c, g, other or unknown
  misc_feature (197)..(198): "n" may be a, t, c, g, other or unknown
  misc_feature (273)..(273): "n" may be a, t, c, g, other or unknown
  misc_feature (281)..(281): "n" may be a, t, c, g, other or unknown
  misc_feature (288)..(288): "n" may be a, t, c, g, other or unknown
  misc_feature (323)..(323): "n" may be a, t, c, g, other or unknown
  misc_feature (368)..(368): "n" may be a, t, c, g, other or unknown
  misc_feature (389)..(389): "n" may be a, t, c, g, other or unknown
  misc_feature (398)..(398): "n" may be a, t, c, g, other or unknown
  misc_feature (415)..(415): "n" may be a, t, c, g, other or unknown
  misc_feature (423)..(423): "n" may be a, t, c, g, other or unknown
  misc_feature (486)..(486): "n" may be a, t, c, g, other or unknown
  misc_feature (513)..(513): "n" may be a, t, c, g, other or unknown
  misc_feature (559)..(559): "n" may be a, t, c, g, other or unknown
  misc_feature (562)..(562): "n" may be a, t, c, g, other or unknown
  misc_feature (591)..(591): "n" may be a, t, c, g, other or unknown
  misc_feature (627)..(627): "n" may be a, t, c, g, other or unknown
  misc_feature (648)..(648): "n" may be a, t, c, g, other or unknown
  misc_feature (659)..(659): "n" may be a, t, c, g, other or unknown
  misc_feature (668)..(668): "n" may be a, t, c, g, other or unknown
naaaaatgtctgtgtcttcctggttgcgacatgcactgacggcctaccaactggaaagtgcagagtggttctgcaaatggttagaggaagcatccattgattttcgatttggcaaaacttacctgaagggtatgagatatgcggtatttggcctgggaaattctgcctatgctaaccacttcaacaaggttggcagnnatgttgacaagtggctctggatgcttggcgcgcatcgtgtgatgagtcgaggggagggcgactgcgacgtggttnaaagcaancacggcngcattgaggccgacttcagagcatggaagaccaanttcatctcccagctgcaggcacttcagaaaggggagagaaagaantcctgtggcggccactgcaanaaaggcaantgttaatctcaccaacntggctcanaggagagggaggaaggatctcatgaccaggatgaattgcatcttagacacccgaggaaggaanaacctttgagagctccaggtgaaaaanatttggtggtgaggaccatcagacctaaattccattgttgatgttnaanatttgggccaaattatggatcctgtgtanaaagaacagagagaatcgaaccgcccggaaaaaaantctggtttgttccaggaaccntggggaagaantgaaaattngtgaaaagaaaaact

SEQ ID NO: 2894 - DNA, 701 bp, Homo sapiens
  misc_feature (490)..(490): "n" may be a, t, c, g, other or unknown
  misc_feature (502)..(502): "n" may be a, t, c, g, other or unknown
  misc_feature (556)..(556): "n" may be a, t, c, g, other or unknown
  misc_feature (564)..(564): "n" may be a, t, c, g, other or unknown
  misc_feature (581)..(581): "n" may be a, t, c, g, other or unknown
  misc_feature (631)..(631): "n" may be a, t, c, g, other or unknown
  misc_feature (656)..(656): "n" may be a, t, c, g, other or unknown
  misc_feature (660)..(660): "n" may be a, t, c, g, other or unknown
  misc_feature (685)..(685): "n" may be a, t, c, g, other or unknown
  misc_feature (701)..(701): "n" may be a, t, c, g, other or unknown
ggctggtgtatttgtacatctctcgggacgtgaaattgacagtgaaaagtatggcagatgagcaagaaatcatgtgcaaattggaaagcattaaagagatcaggaacaagaccctgcagatggagaagatcaaggctcgtttgaaggctgagtttgaggcacttgagtcagaggaaaggcacctgaaggaatacaagcaggagatggaccttctgctacaggagaagatggcccatgtggaggaactccgactgatccgcgctgacatcaatgtgatggaaaacactatcaaacaatctgagaatgacctaaacaagctgctagagtctacaaggaggctgcatgataagtataagccactgaaagaacatgtggatgccctgcgcatgactctgggcctgcagaggctccctgacttgtgtgaagaagaagagaagctttccttggattactttgagaagcagaaagcagaatggcagacagaacctcngggagccccccntccctgagtccctggccgctgcagccgctgccgcccaacagctccaagtggctnggaaacangatactcggcagacggncccttcagggcagcagcccccacctatgaaggcctgcttgtctgtccccngcaaattccccgggaatgccccctntttnccctctttgcaagggccaagaatcngtccccggaacccccn

SEQ ID NO: 2895 - DNA, 500 bp, Homo sapiens
  misc_feature (110)..(110): "n" may be a, t, c, g, other or unknown
  misc_feature (139)..(139): "n" may be a, t, c, g, other or unknown
  misc_feature (234)..(234): "n" may be a, t, c, g, other or unknown
  misc_feature (254)..(254): "n" may be a, t, c, g, other or unknown
  misc_feature (261)..(261): "n" may be a, t, c, g, other or unknown
  misc_feature (368)..(368): "n" may be a, t, c, g, other or unknown
  misc_feature (372)..(372): "n" may be a, t, c, g, other or unknown
  misc_feature (450)..(450): "n" may be a, t, c, g, other or unknown
  misc_feature (456)..(456): "n" may be a, t, c, g, other or unknown
  misc_feature (465)..(465): "n" may be a, t, c, g, other or unknown
  misc_feature (488)..(488): "n" may be a, t, c, g, other or unknown
  misc_feature (497)..(497): "n" may be a, t, c, g, other or unknown
acctgaagtccaaggcactgcgggagcgctggctgctggaggggacgccgtcctcggcctcagagggggatgaggacctgaggaggcagatgcaggacgacgagcagaanacacggctgctggaggactcggtgtccangttggagaaggaaattgaggtgctggagcgtggagactccgccccagccgctgccaaggagaacgcggcggccccgagcccagtccgggccccanccccgagtccagccaaggangagcgcnagacagaggtggtgatgaattcacagcacacgccggtgggcacgcccaaagacaagcgagtctccaacacgcccctgaggacggttgacggctcccccatgatgaangcantggtccatgctgtggacggcaccgccgaaaactggatccaccccctgagctcctcctatgtggacgaactcatccacnaagcgnacgaagtcncgcttagcgaagcagggtccacngccggggcngca

SEQ ID NO: 2896 - DNA, 151 bp, Homo sapiens
  misc_feature (126)..(126): "n" may be a, t, c, g, other or unknown
  misc_feature (137)..(137): "n" may be a, t, c, g, other or unknown
  misc_feature (149)..(149): "n" may be a, t, c, g, other or unknown
gataatattgtttccctcgtccgtctgtctcgatgcctgattcggacgggcaatggtgcttcccccacccctccgacgtgtccgtccacccttccatcaacgggtctcctcccagcggcctccggngtcttgcccancagctcaagaanaa

SEQ ID NO: 2897 - DNA, 653 bp, Homo sapiens
  misc_feature (11)..(11): "n" may be a, t, c, g, other or unknown
  misc_feature (21)..(21): "n" may be a, t, c, g, other or unknown
  misc_feature (342)..(342): "n" may be a, t, c, g, other or unknown
  misc_feature (393)..(393): "n" may be a, t, c, g, other or unknown
  misc_feature (461)..(461): "n" may be a, t, c, g, other or unknown
  misc_feature (468)..(468): "n" may be a, t, c, g, other or unknown
  misc_feature (491)..(491): "n" may be a, t, c, g, other or unknown
  misc_feature (605)..(605): "n" may be a, t, c, g, other or unknown
  misc_feature (621)..(621): "n" may be a, t, c, g, other or unknown
  misc_feature (640)..(640): "n" may be a, t, c, g, other or unknown
  misc_feature (647)..(647): "n" may be a, t, c, g, other or unknown
  misc_feature (652)..(652): "n" may be a, t, c, g, other or unknown
gataaggaacngaagacggtnaaacaaatgaatcgcaaatttcaaataatataaacatgcagagttactcagtagaaatgcctaccgtgtcttccagtggaggcataattggcaccggaatagatgaactgcagaagagggtgccaaaattgatctttaagaaaggaagcagaaagaatacagataaaaactaccttaactttgtgtcaccattaccagacatagtaggacagaaatccttgtctggaaaaccaagtggctcacttggcatagtatcaaataatagtgtagagaccattggtcttctccaaagtacaagtggcaaacaaggtcagataagtngtaattatgatgatgccatgcagttttcaaagaaaagaagatatttaccanctgccagcagcaacagtgccttttctataaacgtaggacacatggtctcccaacagtctgtcattcantctgcangtgtcagtgttttggacaatgangcaccattgtcacttattgactcctcagctctaaatgctgaaattaaatcttgtcatgacaagtctggaattcctgatgaagttttacaaagtattttgggatccatactcccncaaatcagaaagccanaaagaagatcctttccatntttgcanaaccnc

SEQ ID NO: 2898 - DNA, 896 bp, Homo sapiens
  misc_feature (337)..(337): "n" may be a, t, c, g, other or unknown
  misc_feature (373)..(373): "n" may be a, t, c, g, other or unknown
  misc_feature (565)..(565): "n" may be a, t, c, g, other or unknown
  misc_feature (659)..(659): "n" may be a, t, c, g, other or unknown
  misc_feature (664)..(664): "n" may be a, t, c, g, other or unknown
  misc_feature (687)..(687): "n" may be a, t, c, g, other or unknown
  misc_feature (746)..(746): "n" may be a, t, c, g, other or unknown
  misc_feature (776)..(776): "n" may be a, t, c, g, other or unknown
  misc_feature (787)..(787): "n" may be a, t, c, g, other or unknown
  misc_feature (798)..(798): "n" may be a, t, c, g, other or unknown
  misc_feature (859)..(859): "n" may be a, t, c, g, other or unknown
  misc_feature (887)..(887): "n" may be a, t, c, g, other or unknown
  misc_feature (890)..(890): "n" may be a, t, c, g, other or unknown
  misc_feature (895)..(895): "n" may be a, t, c, g, other or unknown
ggctcgtcccttcccccacccccagccgccgccgccgcccgcgcttcgcaacaaagccggctgcggagccatggtccacgccgcccgcccgcgaccccgccgccccgcatggtagccggaacgtctctcccttaccagccttcgcttcctggtgcccagctcttaggaccgtgtgtgactctggccttctaccgagacaacagagaaacgcacagcaactcgcatggaggaatcggcgaaatggctccgaccgcggcgctggggggcggggccagcgagcggtgttgaaagcagcaggggcctagaagacattaaaccgataccacagaaatacaanggatcattagagactattatgaacaactatatgccnacaaattggaaaccaaatggaaatggataaattcctgaacagataccacttaccagaattggaccaagaaagaaatagaaaacctgaaaagaccaactatgagtaatgagattaaatcagtaatatagagtctcccatcaaagaaaagtccaggccctgatggcttcactgctgaattctactgaacagttnaagaagaactcataccagttctcaaactcatcctgtgagggcagcattaccctgataccaaaactagatttggacacaagaaaaaaaatctatnggccngtatcccctgatgaacatagatnccagaaatcctccaacaagaaccaggtttttggttggtttcatgccttgttaatcccanccacttttggggaaggcccaaggccaggtnggatcaccctnaaggtccgggnaattttgaaaaaccgccctggcccacattggcaaaacccctgttttgttcttaaaaattcnaaaatttttcccgggccaaggttgggcnttnttccnt

SEQ ID NO: 2899 - DNA, 645 bp, Homo sapiens
  misc_feature (134)..(134): "n" may be a, t, c, g, other or unknown
  misc_feature (234)..(234): "n" may be a, t, c, g, other or unknown
  misc_feature (357)..(357): "n" may be a, t, c, g, other or unknown
  misc_feature (413)..(413): "n" may be a, t, c, g, other or unknown
  misc_feature (424)..(424): "n" may be a, t, c, g, other or unknown
  misc_feature (470)..(470): "n" may be a, t, c, g, other or unknown
  misc_feature (511)..(511): "n" may be a, t, c, g, other or unknown
  misc_feature (540)..(540): "n" may be a, t, c, g, other or unknown
  misc_feature (598)..(598): "n" may be a, t, c, g, other or unknown
  misc_feature (613)..(613): "n" may be a, t, c, g, other or unknown
  misc_feature (626)..(626): "n" may be a, t, c, g, other or unknown
  misc_feature (634)..(634): "n" may be a, t, c, g, other or unknown
  misc_feature (640)..(640): "n" may be a, t, c, g, other or unknown
gtgacgcagcccgggtctcaggggaacatggcggcgctggtgagacccgcgaggtttgtcgtgcgaccgttgctgcaggtggtccaggcttgggaccttgacgcgaggcgctgggtccgggcgctgcggcggancccagtgaaagtggtgtttccttccggagaggtggtggaacagaagcgcgctcctgggaagcagccccgcaaggcaccatctgaggccagtgcccaggancaacgagagaaacaaccgctcgaggagtccgcatcccgcgctcccagcacctgggaagagtctgggcttcgctacgataaagcttatcccggggacaggaggctgagcagtgtaatgacaatngtaaagtccaggccatttcgggaaaaacaagggaagatcctgctggaaggtcgcangctcatttcanacgctctcaaggctggagctgtgccaaaaatgttcttctttagccntctagaatacctaaaggagttgccagtcgataagctgaaangtgtcagcctcattaaggtgaaatttgangatatcaaggattggtccgacctcgtaacgccccaaggaataatggggatttttgccnagcctgaccatgttnaaatgactatccnaagactcngcttcncattc

SEQ ID NO: 2900 - DNA, 485 bp, Homo sapiens
  misc_feature (24)..(24): "n" may be a, t, c, g, other or unknown
  misc_feature (185)..(185): "n" may be a, t, c, g, other or unknown
  misc_feature (357)..(357): "n" may be a, t, c, g, other or unknown
  misc_feature (430)..(430): "n" may be a, t, c, g, other or unknown
  misc_feature (450)..(450): "n" may be a, t, c, g, other or unknown
  misc_feature (452)..(452): "n" may be a, t, c, g, other or unknown
  misc_feature (470)..(470): "n" may be a, t, c, g, other or unknown
  misc_feature (482)..(482): "n" may be a, t, c, g, other or unknown
gactctgggatcggcggcgctatnagttctttcgaggggcagatggccgagtatccaactatctccatagaccgcttcgatagggagaacctgagggcccgcgcctacttcctgtcccactgccacaaagatcacatgaaaggattaagagcccctaccttgaaaagaaggttggagtgcagatnaggaaactgaggaaccagagaggttaaattagttgcccagtgtcacacagccagtaagtggcaggaccaggattccagccagcttgaaggtttatctatactgttcacctgtgactaaggagttgttgttaacgagcccgaaatacagattttggaagaaacgaattagcantcacaacagcagggttgttcctgttgtctctggcattcagcttgaagttactacaggtcagcccggccagcantcaggaaggaaagctggaananaagtggaggggaacaganacaaactggaangca

SEQ ID NO: 2901 - DNA, 692 bp, Homo sapiens
  misc_feature (301)..(301): "n" may be a, t, c, g, other or unknown
  misc_feature (580)..(580): "n" may be a, t, c, g, other or unknown
  misc_feature (587)..(587): "n" may be a, t, c, g, other or unknown
  misc_feature (598)..(598): "n" may be a, t, c, g, other or unknown
  misc_feature (681)..(681): "n" may be a, t, c, g, other or unknown
  misc_feature (687)..(688): "n" may be a, t, c, g, other or unknown
  misc_feature (691)..(691): "n" may be a, t, c, g, other or unknown
aaacagagtattgtatgggagtttgaaaaataccagcgattactagagaaaaagcagccaccacatcggcagctgggggcagaggtagcagcagctctggccagcctacagcgggaggcagcggagaccatgcagaaactggagttgaaccatagcgagctcatccagcagagccaggtcctgtggaggatgattgcagagttgaaagagaggtcgcagaggcctgtccgctggatgttgcaggatattcaggaagtgttaaacaggagcaaatcttggagcttgcagcagccagaaccantctccctggagttgaagacagattgccgtgtgctggggctaagagagatcctgaagacttatgcagctgatgtgcgcttggatccagatactgcttacccccgtctcatcgtgtctgaggacagaaaacgtgtgcactatggagacaccaaccagaaactgccagacaatcctgagagattttaccgctataatatcgtcctgggaagccagtgcatctcctcaggccggcactactgggaggtggaggtgggagacaggtctgagtggggcctgggantatgttngccaaatgtanaccgggaaggaggtggtctacttatccccccactatggattctgggtgataaggctgaagaaagggaaatgaattccgagccnggcccnnatna

SEQ ID NO: 2902 - DNA, 541 bp, Homo sapiens
  misc_feature (369)..(369): "n" may be a, t, c, g, other or unknown
  misc_feature (463)..(463): "n" may be a, t, c, g, other or unknown
  misc_feature (469)..(469): "n" may be a, t, c, g, other or unknown
  misc_feature (483)..(483): "n" may be a, t, c, g, other or unknown
  misc_feature (510)..(510): "n" may be a, t, c, g, other or unknown
  misc_feature (528)..(528): "n" may be a, t, c, g, other or unknown
aaattgttcagttactgcgtgaaggtgaaagtcaaccggcagcaactggtcaaactggaaatgaacaccttgaacgtcatgctggggaccctaaacctggcccttgtagctgaacaagaaagcaaggacagtgggggtgcagctgtggctgagcaggtgcttagcatcatggagatcattctagatgagtccaatgctgagcccctgagtgaggacaagggcaacctcctcctgacaggtgacaaggatcaactggtgatgctcttggaccagatcaacagcacctttgttcgctccaaccccagtgtgctccagggcctgcttcgcatcatcccgtacctttcctttggagaggtggagaaaatgcanatcttggtggagcgattcaaaccatactgcaactttgataaatatgatgaagatcacagtggtgatgataaagtcttcctggactgcttctgtnaaatanctgctggcatcaanaacaacagcaatgggcaccagctgaangatctgattctcccgaangggatcacccaga

SEQ ID NO: 2903 - DNA, 480 bp, Homo sapiens
  misc_feature (69)..(69): "n" may be a, t, c, g, other or unknown
  misc_feature (117)..(117): "n" may be a, t, c, g, other or unknown
  misc_feature (193)..(193): "n" may be a, t, c, g, other or unknown
  misc_feature (225)..(225): "n" may be a, t, c, g, other or unknown
  misc_feature (286)..(286): "n" may be a, t, c, g, other or unknown
  misc_feature (300)..(300): "n" may be a, t, c, g, other or unknown
  misc_feature (335)..(335): "n" may be a, t, c, g, other or unknown
  misc_feature (375)..(375): "n" may be a, t, c, g, other or unknown
  misc_feature (400)..(400): "n" may be a, t, c, g, other or unknown
  misc_feature (417)..(417): "n" may be a, t, c, g, other or unknown
  misc_feature (462)..(462): "n" may be a, t, c, g, other or unknown
  misc_feature (467)..(467): "n" may be a, t, c, g, other or unknown
  misc_feature (478)..(478): "n" may be a, t, c, g, other or unknown
tgaatagaaggctggtccagcggcggcggaagctggcgctgtcctgagagggagggctctgtgcggaanaaatgaatcggacaaagggtgatgaggaggagtattggaacagctccnagttcaaggcttttacctttgacgataaaaacgatgagctttcacagttaaaggagtccaagcgggcggtgaacancctccgagacttcgtggatgatgatgacgatnatgacctggagcgagtcagctggagtggggaacctgtgggaagtatctcatggtccatcanagagactgctggtnatagcggctcaacccacgaggggcgtgaacagctnaagagccgaaacagcttctcctcctatgcacaactacccnagcctacttctacctactccctgancagcttttttagaggtngaactagacctggaagtttccagtccctttctgatgctctgtcanacacncctgccaaaanct

SEQ ID NO: 2904 - DNA, 652 bp, Homo sapiens
  misc_feature (558)..(558): "n" may be a, t, c, g, other or unknown
  misc_feature (566)..(566): "n" may be a, t, c, g, other or unknown
  misc_feature (576)..(576): "n" may be a, t, c, g, other or unknown
  misc_feature (619)..(619): "n" may be a, t, c, g, other or unknown
  misc_feature (643)..(643): "n" may be a, t, c, g, other or unknown
ggccatctctgggcggcggcggcgggcggtgtctgcgcggtcggtgagacccgcgcgggtgagacgctggccctccttacagcctagaaaaaatgacagatctcgtagctgtttgggatgttgctttaagtgacggagtccacaagatcgaatttgaacatgggactacatcaggcaaacgagtagtatatgtagatggaaaggaagagataagaaaagagtggatgttcaaattagtgggcaaagaaacattctatgttggagctgcaaagacaaaagcgaccataaatatagacgctatcagtggttttgcttatgaatatactctggaaattaatgggaaaagtctcaagaagtatatggaggacagatcaaaaaccaccaatacttgggtattacacatggatggtgagaactttagaattgttttggaaaaagatgctatggacgtatggtgcaatggtaaaaaattggagacagcgggtgagtttgtagatgatgggactgaaactcacttcagtatcgggaaccatgactgttacataaaggctgtcagtngtgggaancggaaagaanggattattcatactctcattgtgggataatagagaaatcccanagattgcaagttaatgaattttcntcttaagaa

SEQ ID NO: 2905 - DNA, 600 bp, Homo sapiens
  misc_feature (100)..(100): "n" may be a, t, c, g, other or unknown
  misc_feature (150)..(150): "n" may be a, t, c, g, other or unknown
  misc_feature (171)..(171): "n" may be a, t, c, g, other or unknown
  misc_feature (174)..(174): "n" may be a, t, c, g, other or unknown
  misc_feature (271)..(271): "n" may be a, t, c, g, other or unknown
  misc_feature (313)..(313): "n" may be a, t, c, g, other or unknown
  misc_feature (541)..(541): "n" may be a, t, c, g, other or unknown
  misc_feature (543)..(544): "n" may be a, t, c, g, other or unknown
  misc_feature (547)..(547): "n" may be a, t, c, g, other or unknown
  misc_feature (575)..(575): "n" may be a, t, c, g, other or unknown
gactggcggcaggctcgccgcggcgcggagtcccggctgcgggatagaccgagggccatggccgcctctcccggacccgccggcgttggcggcgccggancagtctacggctccggctcttcgggcttcgccctcgactcgggactgganatcaaaactcgctcggtggancanacgctactcccgctggtttctcagatcaccacgcttattaatcataaagataataccaaaaagtctgataaaactctgcaagcaattcagcgtgtangacaagctgtcaacttggcagttggaagatttgttaaagtangagaagctatagccaatgaaaactgggatttgaaagaagaaataaatattgcttgtattgaagctaaacaagcaggagaaacaattgcagcacttacagacataaccaacttgaaccatctggaatctgatgggcagatcacaatttttacagacaaaacaggagtgataaaggctgcaagattacttctttcttcagtgacaaaagtgttgttgctggcagaccgantnntcnttaaacagataataacatcaagaaatanggttctcgcaactatggaaagacta

SEQ ID NO: 2906 - DNA, 788 bp, Homo sapiens
  misc_feature (633)..(633): "n" may be a, t, c, g, other or unknown
  misc_feature (642)..(642): "n" may be a, t, c, g, other or unknown
  misc_feature (724)..(724): "n" may be a, t, c, g, other or unknown
  misc_feature (738)..(738): "n" may be a, t, c, g, other or unknown
  misc_feature (749)..(749): "n" may be a, t, c, g, other or unknown
  misc_feature (756)..(756): "n" may be a, t, c, g, other or unknown
  misc_feature (783)..(783): "n" may be a, t, c, g, other or unknown
tttgtgttccctcaaatggcggtgtgaagagagttcgcctgagccagatcccaggtttcactgaagaaacttcttagaggttcattgcacttctgagatttaatgtttacaacttggagttgtcgaccttcttataagatacattttggaagtcaaaatgaaagttttctgtgaagttttagaagagttatacaagaaggtacttcttggagccacacttgaaaatgacagccatgattacatcttttatctcaacccagcagtttcagatcaagattgttctacagccacctccttagaatgggcaaacacctgtggtatccagggcaggcatcagcccatctctgttggtgtggctcccattgctgtagcacctgtgtgtttgaagaccaactctcagatgagcggttccagagaagtaatgctccttcagttaacagtgatcaaagtgatgacaacccggatattgtctgtcaaaaccgagttccatgcaaaggagcagtacagagatgtaattaaaattctcttagaatcagccaaagtcgattctaaattaatctgcatgttccaaaattcagataaattgttatctcacatggctgcacagtgccttgcattgcttctatatttccnattgaaganaaaaagataaccttaagtaattcctgggattgctttttggcccagaaaaatctttctgaatactctgaaaatttataaagcnatattctggctctnggaaccctacnggcaatnataaaaaaaaatcttttaaagaatccnggttc

SEQ ID NO: 2907 - DNA, 622 bp, Homo sapiens
  misc_feature (152)..(152): "n" may be a, t, c, g, other or unknown
  misc_feature (163)..(163): "n" may be a, t, c, g, other or unknown
  misc_feature (220)..(220): "n" may be a, t, c, g, other or unknown
  misc_feature (223)..(223): "n" may be a, t, c, g, other or unknown
  misc_feature (422)..(422): "n" may be a, t, c, g, other or unknown
  misc_feature (459)..(459): "n" may be a, t, c, g, other or unknown
  misc_feature (534)..(534): "n" may be a, t, c, g, other or unknown
  misc_feature (567)..(567): "n" may be a, t, c, g, other or unknown
  misc_feature (570)..(570): "n" may be a, t, c, g, other or unknown
  misc_feature (597)..(597): "n" may be a, t, c, g, other or unknown
  misc_feature (615)..(615): "n" may be a, t, c, g, other or unknown
cccggatgtggagaagctggggagaaggcgtgggaggaagatggactcggtggagaagggggccgccacctccgtctccaacccgcgggggcgaccgtcccggggccggccgccgaagctgcagcgcaactctcgcggcggccagggccgangtgtggaaaancccccgcacctggcagccctaattctggcccggggaggcagcaaaggcatccccctnaanaacattaagcacctggcgggggtcccgctcattggctgggtcctgcgtgcggccctggattcaggggccttccagagtgtatgggtttcgacagaccatgatgaaattgagaatgtggccaaacaatttggtgcacaagttcatcgaagaagttctgaagtttcaaaagacagctctacctcactagatgccatcatanaatttcttaattatcataatgaggttgacattgttangaaatattcaagctacttctccatgtttacatcctactgatcttcaaaaagttgcagaaatgattcgagaagaangatatgattctgttttctctgttgtgagacccntcngtttcgatgggagtgaaattcagaaangaattcgtgaagtgaccnaacctct

SEQ ID NO: 2908 - DNA, 475 bp, Homo sapiens
  misc_feature (389)..(389): "n" may be a, t, c, g, other or unknown
  misc_feature (405)..(405): "n" may be a, t, c, g, other or unknown
  misc_feature (441)..(441): "n" may be a, t, c, g, other or unknown
ggatgtttaatggggatgtggagattcattgtactgtttctatatttttgtggatgttgaaaaatattttcttcttttttttttttgagatggagtctccctctattgcccaggctggagtgcagttgtgcaatctctgttcactgcaacctccgcctcccgggttcaagtggttctcctgcctcagcctcccaagtagctgggactacaggcatgtgccaccatgcctggctaacttttgcatctttagtagagatggggttttaccatgttggccaggctggtatcgaactcctgaccttgtgacccgcccaccttggcttcccaaagtactggaattacaggcataagccaccacacccggccgaaaaatatatttaaaaaagtangaaacacacaagacangcagcttggacttatcttctccatgatacctacccnggtatccctgtgagcagctgacattcctttctcc

SEQ ID NO: 2909 - DNA, 746 bp, Homo sapiens
  misc_feature (284)..(284): "n" may be a, t, c, g, other or unknown
  misc_feature (293)..(293): "n" may be a, t, c, g, other or unknown
  misc_feature (314)..(314): "n" may be a, t, c, g, other or unknown
  misc_feature (507)..(507): "n" may be a, t, c, g, other or unknown
  misc_feature (541)..(541): "n" may be a, t, c, g, other or unknown
  misc_feature (543)..(543): "n" may be a, t, c, g, other or unknown
  misc_feature (553)..(553): "n" may be a, t, c, g, other or unknown
  misc_feature (626)..(626): "n" may be a, t, c, g, other or unknown
  misc_feature (630)..(630): "n" may be a, t, c, g, other or unknown
  misc_feature (678)..(678): "n" may be a, t, c, g, other or unknown
  misc_feature (690)..(690): "n" may be a, t, c, g, other or unknown
  misc_feature (718)..(718): "n" may be a, t, c, g, other or unknown
  misc_feature (739)..(739): "n" may be a, t, c, g, other or unknown
  misc_feature (743)..(743): "n" may be a, t, c, g, other or unknown
gtattcctactgtgctctctgaggatgtggatgctgttgatctgcggaccacactttgagaaatacacaggtgacagctgtggtggaaagaactcccatccaggaatcaaaacatgtcttcacattttggccatggaacttgggggtcttgctttgttgctcaggatggagtacagtggtgcaatcttgtctcactgcagcatcgacctctggggcttaagccatccttgcacttcagcctcccaagtagctggtactacaggggatgcaacaacaaggcgccntcttggaantagacaccaggccctcaccanacaccaaacctgctggtgcctcgatcttcaatttccagcctccagagtgtcatggtttctggaaaaaaagactcaagatgttctcagtagctgctgttttcagacatcatgaaagtcttctcctaccctctataaaaacaaacaataaaactctacaaaggaaaagcccacaaaaacatgctgactttagaanaatccatgatttagaatatttttataaatatctnanaaaacaggantcctttccatatatatggtccttgggaaatactttccatatatatggtccttggaaaatccagtttttatganaaangtgatttcccaaatctcttacactttacaatttcaattttggcctgancatatctctccnattgatctacctactacatactgatctntcttgggataaacactggacnaaanggt

SEQ ID NO: 2910 - DNA, 801 bp, Homo sapiens
  misc_feature (155)..(155): "n" may be a, t, c, g, other or unknown
  misc_feature (421)..(421): "n" may be a, t, c, g, other or unknown
  misc_feature (519)..(519): "n" may be a, t, c, g, other or unknown
  misc_feature (533)..(533): "n" may be a, t, c, g, other or unknown
  misc_feature (558)..(558): "n" may be a, t, c, g, other or unknown
  misc_feature (770)..(770): "n" may be a, t, c, g, other or unknown
  misc_feature (780)..(780): "n" may be a, t, c, g, other or unknown
  misc_feature (791)..(791): "n" may be a, t, c, g, other or unknown
  misc_feature (798)..(799): "n" may be a, t, c, g, other or unknown
atttcttaaggtggagtctcgcactgtcacctgggctggagtgcagtggcatgatctcggctcactacaacctttgcctcttgggttcaagtgagtctcctgtctcagcctcccaagtagctgggattacaagtgcccaccaccacgcccagctnattttttgtatttttagtagagacagggtttcaccatgttggccaggctggtctcaaactcctgaccttgtgatttgcctgacttggcctcccaaagtgctgggattacaggcttgagccaccatgcccggccaagactattttttagaaccataaccacaatacagttaccacacttttgaaagtcgatgggaattccttaatatttaaatttctcaataggctaatttttatttttagggatgggggcttgctgtattgacganactggagtgcagtggctattcctgagtattgtcatagtgactacacctcaaacacctgggctcacatgatcctcctgcctcagtgtcccgagtaatantgcagggactgtangcacttaccgctgtgatctgcttanctcatacattttaaaaaaataattggttcaaatcaggatccaaaaaagttacataaattgtgtttgattaatgcgtacttgggtccttttaaatctaaaaatgtctctcatcttttttaaaaaacattatttgttgaaaaaaaatgaatttattccggtttaattcccccattccaaaactttactgaatgtttccccatgaattcctctgncccctttgtnttttcctgttnactaatnngt

SEQ ID NO: 2911 - DNA, 730 bp, Homo sapiens
  misc_feature (41)..(41): "n" may be a, t, c, g, other or unknown
  misc_feature (134)..(134): "n" may be a, t, c, g, other or unknown
  misc_feature (175)..(175): "n" may be a, t, c, g, other or unknown
  misc_feature (507)..(507): "n" may be a, t, c, g, other or unknown
  misc_feature (519)..(519): "n" may be a, t, c, g, other or unknown
  misc_feature (552)..(552): "n" may be a, t, c, g, other or unknown
  misc_feature (613)..(613): "n" may be a, t, c, g, other or unknown
  misc_feature (637)..(637): "n" may be a, t, c, g, other or unknown
  misc_feature (641)..(641): "n" may be a, t, c, g, other or unknown
  misc_feature (681)..(681): "n" may be a, t, c, g, other or unknown
  misc_feature (701)..(701): "n" may be a, t, c, g, other or unknown
  misc_feature (721)..(721): "n" may be a, t, c, g, other or unknown
gtactctgattggtgacgggtgaggcggcccgaaatcgtangacttccgaaagcagcggtggcgtttgcttcactgcttggaagtgtgagtgcgcgaaaatgcgaaaggtggttttgatcaccggggctagcantggcattggcctggccctctgcaagcggctgctggcggaanatgatgagcttcatctgtgtttggcgtgcaggaacatgagcaaggcagaagctgtctgtgctgctctgctggcctctcaccccactgctgaggtcaccattgtccaggtggatgtcagcaacctgcagtcggtcttccgggcctccaaggaacttaagcaaaggtttcagagattagactgtatatatctaaatgctgggatcatgcctaatccacaactaaatatcaaagcacttttctttggcctcttttcaagaaaagtgattcatatgttctccacagctgaaggcctgctgacccagggtgataagatcactgctgatggacttcangaagtgtttganaccaatgtctttggccattttatcctggtaaanaagctgtgggcttaataagctaatatttcgtgtgataatttctgtaaagctctgggcacanggcatttattatagttgaacaccngttnactgaatttaatctcatgtttgaattttccttgattgcantttgcccttggtttattgtnaaacatggaatacttctggnaaaccttcc

SEQ ID NO: 2912 - DNA, 528 bp, Homo sapiens
  misc_feature (298)..(298): "n" may be a, t, c, g, other or unknown
  misc_feature (322)..(322): "n" may be a, t, c, g, other or unknown
  misc_feature (450)..(450): "n" may be a, t, c, g, other or unknown
  misc_feature (456)..(456): "n" may be a, t, c, g, other or unknown
  misc_feature (497)..(497): "n" may be a, t, c, g, other or unknown
  misc_feature (517)..(518): "n" may be a, t, c, g, other or unknown
ggagggggcgtcgggaaagcccccgacttcgcagccttacactcttcgtgggcggcgaccgcggccccactgacatcattcctcatgagggaggaggcacaaacagttctgggccgaccagaaaaaggacgactgggacttgactctgaatcgcaggatttgaagagatttctcctggcttcccaacgaggctggtgggaagcggtcctcctcccatacacgacctcccaccctcgcgaggcgtaaaaaccagttctgactgtacagtaaagcgagggccagggctgaggtctggaanctaatgaaagcacagaaagtgtcnaaactggatgagcaggaagcgagtggcctcccctgtcatctgacgttttcccagggatgtaatttgcctgactggaaacagatcaggaccaacaggggagagttttcgatttagtgtgaggaaaagancactanattgtagcaaaagaccttattgctcaaggcccagtcagaanatttcataagggaagctgtnnaaagtcttaa

SEQ ID NO: 2913 - DNA, 565 bp, Homo sapiens
  misc_feature (15)..(15): "n" may be a, t, c, g, other or unknown
  misc_feature (525)..(525): "n" may be a, t, c, g, other or unknown
  misc_feature (528)..(528): "n" may be a, t, c, g, other or unknown
  misc_feature (543)..(543): "n" may be a, t, c, g, other or unknown
  misc_feature (554)..(554): "n" may be a, t, c, g, other or unknown
  misc_feature (556)..(556): "n" may be a, t, c, g, other or unknown
tcatcccagttcatnatgatctcttgatccatgcaaaccttaccacgctgaccttctggggaaccacgaaagtagaaatcacagccagtcagcccaccagcaccatcatcctgcatagtcaccacctgcagatatctagggccaccctcaggaagggagctggggagaggctatcggaagaacccctgcaggtcctggaacacccccctcaggagcaaattgcactgctggctcccgagcccctccttgtcgggctcccgtacacagttgtcattcactatgctggcaatctttcggagactttccacggattttacaaaagcacctacagaaccaaggaaggggaactgaggatactagcatcaacacaatttgaacccactgcagctagaatggcctttccctgctttgatgaacctgccttcaaagcaagtttctcaatcaaaattagaagagagccaaggcacctagccatctccaatatgccattggtgaaatctgtgactgttgctgaaggactcatanaanaccattttgatgtcnctgtgaagatnancacctatct

SEQ ID NO: 2914 - DNA, 773 bp, Homo sapiens
  misc_feature (401)..(401): "n" may be a, t, c, g, other or unknown
  misc_feature (514)..(514): "n" may be a, t, c, g, other or unknown
  misc_feature (554)..(554): "n" may be a, t, c, g, other or unknown
  misc_feature (560)..(560): "n" may be a, t, c, g, other or unknown
  misc_feature (610)..(610): "n" may be a, t, c, g, other or unknown
  misc_feature (634)..(634): "n" may be a, t, c, g, other or unknown
  misc_feature (648)..(648): "n" may be a, t, c, g, other or unknown
  misc_feature (678)..(678): "n" may be a, t, c, g, other or unknown
  misc_feature (723)..(723): "n" may be a, t, c, g, other or unknown
  misc_feature (749)..(749): "n" may be a, t, c, g, other or unknown
  misc_feature (753)..(753): "n" may be a, t, c, g, other or unknown
  misc_feature (766)..(766): "n" may be a, t, c, g, other or unknown
aagatgcacaagtacctttaaccaaccataagaaatcagaaaagcaagataaagttcagcacacagtatgtatggattgcagtagctacagtacatactgttatcgctgtgatgattttgtggttaatgacaccaagctgggactggtacagaaagtcagagaacacttacagaacttggaaaactcagctttcacagctgacaggcataagaaaagaaaacttttggaaaactcaacactaaacagcaagttattaaaagtaaatggaagcaccactgccatttgtgccacaggccttcggaatttggggaacacatgtttcatgaatgccatccttcagtcactcagtaacattgagcagttttgctgttatttcaaagaactgcccgccgtggagttnaggaatgggaaaacagcaggaaggcggacataccacaccaggagccaaggggataacaatgtgtctttggtagaagagtttagaaagacactctgtgctttatggcaaggcanccagactgcatttagcccagagtccttattttatgttgtntggaanattatgccaaactttaggggctatcaacagcagggacgcccatgaattcntgcgctaccttttgggaccacctncacttggaacttcnggggcgggtttcacggtgtttcccgctcancaattctgcaggaaaattctactctgtctgccaattaccaagttnttgcataaattgaacatctactgttngtcncggctattttccngaaaggc

SEQ ID NO: 2915 - DNA, 715 bp, Homo sapiens
  misc_feature (356)..(356): "n" may be a, t, c, g, other or unknown
  misc_feature (502)..(502): "n" may be a, t, c, g, other or unknown
  misc_feature (546)..(546): "n" may be a, t, c, g, other or unknown
  misc_feature (622)..(622): "n" may be a, t, c, g, other or unknown
  misc_feature (631)..(631): "n" may be a, t, c, g, other or unknown
  misc_feature (679)..(679): "n" may be a, t, c, g, other or unknown
  misc_feature (692)..(692): "n" may be a, t, c, g, other or unknown
  misc_feature (708)..(708): "n" may be a, t, c, g, other or unknown
agcttctttgtctctggctgccgctggaactccgggtctcgtcttcactgctctgtgtcctctgctcctagaggcccagcctctggtcctgtgacctgcaggtattgggaatccacagctaagacgccgggacaccctggaagcctagaaatggacaacctgaggtatggagtgtatcctgtcaagggggcaagtggataccctggggctgagaggaatcttctggagtactcttattttgaaaaggggccgttgacatttagggatgtggtcatagaattctctcaggaggagtggcaatgcctggacactgctcagcaagatttgtataggaaagtgatgttagagaacttcanaaacctggtgttcttgggtattgatgtctctaagccagatctgatcacctgtctggagcaaggaaaagatccctgggaatatgaagagacacagtatggtagccacacccccagatggagtttcactgttgttccccaggccggantgaaatggcgcgatttcacctcgctgtgtcccaggttcaagcanttctcctacctcagcctcccgagtatctgggattacgggcatatgccaccacacccagcttaatttgtatttttantagaaacanggtttctccatgttggtcaggctagtctcgatctcctgaactcaggtnattcaccacctcngcttcccaaagtgccnggattac

SEQ ID NO: 2916 - DNA, 654 bp, Homo sapiens
  misc_feature (13)..(13): "n" may be a, t, c, g, other or unknown
  misc_feature (59)..(59): "n" may be a, t, c, g, other or unknown
  misc_feature (420)..(420): "n" may be a, t, c, g, other or unknown
  misc_feature (431)..(431): "n" may be a, t, c, g, other or unknown
  misc_feature (546)..(546): "n" may be a, t, c, g, other or unknown
  misc_feature (568)..(568): "n" may be a, t, c, g, other or unknown
  misc_feature (609)..(609): "n" may be a, t, c, g, other or unknown
  misc_feature (623)..(623): "n" may be a, t, c, g, other or unknown
  misc_feature (634)..(634): "n" may be a, t, c, g, other or unknown
  misc_feature (647)..(647): "n" may be a, t, c, g, other or unknown
accagaagcattnaatgttatcgtaaggctaattgaacaagccccaattcaaatggganaagaggcagtgaggtgggcaaaactggtcatacctttagtggttcattcagcacaaaaggtacatttgcggggagcaactgctctggagatgggaatgccattattgcttcagaaacagcaagaaatagcatctattacggagcagcttatgactactaaattaatctcagaacttcagaagctatttatgagtaaaaatgagacttacgtgttaaaattatggcctttgtttgtcaaactacttggaaggaccttgcatcgaagtgggagtttcatcaattctctcttgcaactagaagaacttggatttcgtagtggagcacccatgattaaaaagatagcttttattgcttggaagantttaatagatnattttgctttaaatccagatatactatgtagtgcaaaaagactcaagttgttaatgcagcctttgagttccatccatgttgagaacagaaactctagcattaacaaaactagaantctggtggtatttactgatganacttggacctcatcttcctgctaattttgaacaggtttgtngtgcctctgattcnaaagtacaatnagcattgattctnatgcctc

SEQ ID NO: 2917 - DNA, 675 bp, Homo sapiens
  misc_feature (22)..(22): "n" may be a, t, c, g, other or unknown
  misc_feature (84)..(84): "n" may be a, t, c, g, other or unknown
  misc_feature (106)..(106): "n" may be a, t, c, g, other or unknown
  misc_feature (155)..(155): "n" may be a, t, c, g, other or unknown
  misc_feature (227)..(227): "n" may be a, t, c, g, other or unknown
  misc_feature (467)..(467): "n" may be a, t, c, g, other or unknown
  misc_feature (503)..(503): "n" may be a, t, c, g, other or unknown
  misc_feature (569)..(569): "n" may be a, t, c, g, other or unknown
  misc_feature (623)..(623): "n" may be a, t, c, g, other or unknown
  misc_feature (649)..(649): "n" may be a, t, c, g, other or unknown
  misc_feature (652)..(652): "n" may be a, t, c, g, other or unknown
  misc_feature (669)..(669): "n" may be a, t, c, g, other or unknown
  misc_feature (672)..(672): "n" may be a, t, c, g, other or unknown
gtgcagcttggtggcggctganccggcagcgggccgcctcaggcagccccggccgggccgcccgggtccccggcagcggggtangatggcgctaaagcggatccanaaggaattaaccgacttgcagagggatcctcctgcccagtgttctgcangacctgtcggtgatgacttgttccactggcaggccaccatcatgggcccgaatgacagtccttaccaaggangtgttttcttcctgaccatccactttcctacagattacccgttcaagcccccaaaggttgctttcacaaccaaaatttatcaccctaatatcaacagcaatggcagcatctgccttgatatcctgcggtctcagtggtctccagcgttgactgtgtcaaaagttctcttgtccatctgctcgctgctctgcgaccccaaccccgatgaccccctggtgccagaaatagcacacacctacnaggccgacagagagaagtacaacagactagcaaganaatggacacaaaaatatgctatgtaagtgccttggaagttttacatgaaacactgtccaagaaaanctggcagaaaagtcttcccttaaaactttgggctgttggctgaaccattcaaanaacatcatctgttcttcaaacaaatnttngtcaccactctctccanctngca

SEQ ID NO: 2918 - DNA, 708 bp, Homo sapiens
  misc_feature (132)..(132): "n" may be a, t, c, g, other or unknown
  misc_feature (160)..(160): "n" may be a, t, c, g, other or unknown
  misc_feature (236)..(236): "n" may be a, t, c, g, other or unknown
  misc_feature (524)..(524): "n" may be a, t, c, g, other or unknown
  misc_feature (531)..(531): "n" may be a, t, c, g, other or unknown
  misc_feature (589)..(589): "n" may be a, t, c, g, other or unknown
  misc_feature (624)..(624): "n" may be a, t, c, g, other or unknown
  misc_feature (654)..(654): "n" may be a, t, c, g, other or unknown
  misc_feature (673)..(673): "n" may be a, t, c, g, other or unknown
  misc_feature (688)..(688): "n" may be a, t, c, g, other or unknown
  misc_feature (701)..(701): "n" may be a, t, c, g, other or unknown
ggagcccctcagcggcggcggggtctgtgagttggtcgcggggtcttggcggggaatggaggtagaataaacgtgggacccggagtgcaccaaggtgagaaaaaaaaaattactaaaaatgacaagtagaanacttgaggagtccatgggggctgttcanatgggattggtcaatatgttcaaaggatttcaaagcaaggttttgccacccctgagtccaaaggtggttacagaanaagaagtaaaccgaatgcttacaccctcagagttcctgaaggaaatgtccctgaccaccgagcagagactggcaaaaacacgtttgatgtgccgaccacagatcatcgaactcttagatatgggggaaacaacacatcagaagttttcaggaattgacctggatcaggcattattccagccctttccatcagaaattatatttcagaactacactccctgtgaagtctatgaagttccactgattttgaggaacaatgaccaaattccaaggttggtgaaagttgtgnaaaaaanttcgccttactttaaagtaatcagccccaaagatattggccacaaagtggctcctggnagtgccttccatattccgaatcctctttactccanaagaaaaacaaggattacgcccataccttnaaccttgtgttactgaaanaaaaaatttattgtncccatccaagctngaagggc

SEQ ID NO: 2919 - DNA, 707 bp, Homo sapiens
  misc_feature (389)..(389): "n" may be a, t, c, g, other or unknown
  misc_feature (491)..(491): "n" may be a, t, c, g, other or unknown
  misc_feature (693)..(693): "n" may be a, t, c, g, other or unknown
  misc_feature (697)..(697): "n" may be a, t, c, g, other or unknown
  misc_feature (704)..(704): "n" may be a, t, c, g, other or unknown
acaagaaggacgaggagtctggtagtggctccaatcctttccagcatctggagaagagtgctgttttacaggaggctcgtatattcaatgaaactccaatcaatccaagaagatgtttgcatattcttacaaagattctttacttactgaaccagggtgaacactttggaacaacggaagctacagaagccttctttgcaatgacgcgattgtttcaatctaatgatcaaacattgaggagaatgtgctaccttaccatcaaagaaatggctaccatctctgaggatgtgataattgtcacaagcagtctgactaaagacatgactggaaaagaagatgtataccgaggcccggccatcagagctctctgcaggatcaccgatggaacnatgttgcaagccattgaaagatacatgaagcaggccattgtggataaagtttccagtgtatccagttcagcactggtatcttccctgcacatgatgaagatnagctatgatgtggttaagcgctggatcaatgaagcccaagaagctgcatcaagtgataatattatggtccagtaccatgcattggggagtcctgtttcccttagaaagaatgatcgacttgctgtttccacatgttgaataagtttactaaggtctggtcccaagtcacagtttgcttactgcatgctgatccgaattgccngtcncttactnaaa

SEQ ID NO: 2920 - DNA, 634 bp, Homo sapiens
  misc_feature (138)..(138): "n" may be a, t, c, g, other or unknown
  misc_feature (156)..(156): "n" may be a, t, c, g, other or unknown
  misc_feature (378)..(378): "n" may be a, t, c, g, other or unknown
  misc_feature (384)..(384): "n" may be a, t, c, g, other or unknown
  misc_feature (520)..(520): "n" may be a, t, c, g, other or unknown
  misc_feature (549)..(549): "n" may be a, t, c, g, other or unknown
  misc_feature (557)..(557): "n" may be a, t, c, g, other or unknown
  misc_feature (577)..(577): "n" may be a, t, c, g, other or unknown
  misc_feature (599)..(599): "n" may be a, t, c, g, other or unknown
  misc_feature (625)..(625): "n" may be a, t, c, g, other or unknown
gctgcgatggcggaggccgtggagcgcactgacgagctggtccgggagtacctgctcttccgcgggttcacgcacacactgcggcagctggacgccgagatcaaggcggacaaggagaaggggttccgggtggataanattgtggaccagctgcancagttaatgcaggtgtatgacttggctgcccttcgggattattggagctacttggagcgtcggctcttcagccgcttggaggatatatacagacccacaatccacaagctgaaaaccagcctgtttcgattttatcttgtctacacaatccagacaaacagaaatgacaaggctcaggagttctttgcaaagcaggccacggaactccagaaccaggctgantggaangattggtttgtcctgcccttcctgccatccccggacaccaaccccacctttgctacctacttttctcgacagtgggctgacaccttcattgtgtccctgcacaacttcctgagcgtcctgtttcagtgcatgccantccctgtgatcctgaactttgatgcggantgtcagangactaaccaggttcaagaanaaaatgaattctgcgtcagaanctttttgcattgcaagctgaaatccnccgactgaa

SEQ ID NO: 2921 - DNA, 551 bp, Homo sapiens
  misc_feature (372)..(372): "n" may be a, t, c, g, other or unknown
  misc_feature (449)..(449): "n" may be a, t, c, g, other or unknown
  misc_feature (466)..(466): "n" may be a, t, c, g, other or unknown
  misc_feature (493)..(493): "n" may be a, t, c, g, other or unknown
  misc_feature (534)..(534): "n" may be a, t, c, g, other or unknown
  misc_feature (548)..(548): "n" may be a, t, c, g, other or unknown
  misc_feature (551)..(551): "n" may be a, t, c, g, other or unknown
ttcacatgatcaaggaagtttatggatgcgtttgtggaaatcttactctatgaacttgttggattagatgctgttttattctctactaagtgaaaagtgctttatttcagtgctttcccatggttgggagagagtagctgttaactattctgggtaatgggggtgagtatgttgaggaagagatttagaaccagaagagtgaagagactcaaactgttccataacaaggaaagctttaaagaccttgtatttcacagtctggagaactagagggatctgactcttggtcagttcatgtaacaaattatttattgagtacttgctgggctctcaagattcatgctttgagcacaggcagtcattcagtttccngtccacctgattacatcagcatgcacttagttttctttcttgttcacaaggacttttgatcatgcaagacctggccnagtcttctataatccanatgggtttcctggggctgttacttganttttcctgtcaaaatattttcgtgaaccctgcctctcttancaaacactacttcntan

SEQ ID NO: 2922 - DNA, 494 bp, Homo sapiens
  misc_feature (53)..(53): "n" may be a, t, c, g, other or unknown
  misc_feature (282)..(282): "n" may be a, t, c, g, other or unknown
  misc_feature (293)..(293): "n" may be a, t, c, g, other or unknown
  misc_feature (341)..(341): "n" may be a, t, c, g, other or unknown
  misc_feature (411)..(411): "n" may be a, t, c, g, other or unknown
  misc_feature (423)..(423): "n" may be a, t, c, g, other or unknown
  misc_feature (458)..(458): "n" may be a, t, c, g, other or unknown
  misc_feature (472)..(472): "n" may be a, t, c, g, other or unknown
  misc_feature (493)..(493): "n" may be a, t, c, g, other or unknown
aactttttcccatccgtagccttaaattcccgagctgcccgggcggatcgtantgttgattggagggatgagaatacccgccgggtccgattggccactgtctccgcctgcgttctcggagtagcttccctgcgggtgggctggagttcggcggccggcgtagggcgcggccctgcagggcggtgggagcctccccggggctgctcgtgttgcagcttgggatgatactggcggaacgcaggaccccaactcccaaacctgcggaccttgaccacggacganccctgtcccanctccccacgtgccccagggggaccagagcaggcaggacgccttccaantattcaagggccgctggttgcctacgcttcgtccccttgtttcttgaacaaccgttagggaccaggggtncccctcagggangccacagtccggggctggggcgctcattgatgcantgatcacacaacangccgcccgcctgaagaaactnc

SEQ ID NO: 2923 - DNA, 484 bp, Homo sapiens
  misc_feature (29)..(29): "n" may be a, t, c, g, other or unknown
  misc_feature (73)..(73): "n" may be a, t, c, g, other or unknown
  misc_feature (76)..(76): "n" may be a, t, c, g, other or unknown
  misc_feature (82)..(82): "n" may be a, t, c, g, other or unknown
  misc_feature (149)..(149): "n" may be a, t, c, g, other or unknown
  misc_feature (288)..(288): "n" may be a, t, c, g, other or unknown
  misc_feature (291)..(291): "n" may be a, t, c, g, other or unknown
  misc_feature (301)..(301): "n" may be a, t, c, g, other or unknown
  misc_feature (321)..(321): "n" may be a, t, c, g, other or unknown
  misc_feature (348)..(348): "n" may be a, t, c, g, other or unknown
  misc_feature (389)..(389): "n" may be a, t, c, g, other or unknown
  misc_feature (407)..(407): "n" may be a, t, c, g, other or unknown
  misc_feature (433)..(433): "n" may be a, t, c, g, other or unknown
  misc_feature (450)..(450): "n" may be a, t, c, g, other or unknown
  misc_feature (456)..(456): "n" may be a, t, c, g, other or unknown
aaaaaaatcgctgggcgactgatttcgantttccggtcaggttaagccgggggggtgcggtcctggtcggaangangtgganagtcgggggtcaccaggcctatccttggcgccacagtcggccaccggggctcgccgccgtcatgganagcggagggcggccctcgctgtgccagttcatcctcctgggcaccacctctgtggtcaccgccgccctgtactccgtgtaccggcagaaggcccgggtctcccaagagctcaagggagctaaaaaagttcatttgggtnaanatttaaagantattctttcagaagctccangaaaatgcgtgccttatgctgttatanaaagaactgtgcggtctgttaaaaaaacgcttaacagccantttgtggaaaactgcaanggggttattcacggctgacacttcangaacacaagattgtgtngaatcnaaccacccacctttgggaatgattgctc

SEQ ID NO: 2924 - DNA, 741 bp, Homo sapiens
  misc_feature (342)..(342): "n" may be a, t, c, g, other or unknown
  misc_feature (437)..(437): "n" may be a, t, c, g, other or unknown
  misc_feature (484)..(484): "n" may be a, t, c, g, other or unknown
  misc_feature (545)..(545): "n" may be a, t, c, g, other or unknown
  misc_feature (560)..(560): "n" may be a, t, c, g, other or unknown
  misc_feature (562)..(562): "n" may be a, t, c, g, other or unknown
  misc_feature (653)..(653): "n" may be a, t, c, g, other or unknown
  misc_feature (676)..(676): "n" may be a, t, c, g, other or unknown
  misc_feature (695)..(695): "n" may be a, t, c, g, other or unknown
  misc_feature (725)..(725): "n" may be a, t, c, g, other or unknown
  misc_feature (729)..(729): "n" may be a, t, c, g, other or unknown
aaaaatctatgattcagcttttcatcctgacactggtgagaagatgattttgataggaagaatgtcagcccaggttcccatgaacatgaccatccacaggttgtatgatgacgttttacaggactacgccggctgtgctgttctggcagtggattaaccagtccttcaatgccgtcgtcaattacaccaacagaagtggagacgcacccctcactgtcaatgagttgggaacagcttacgtttctgcaacaactggtgccgtagcaacagctctaggactcaatgcattgaccaagcatgtctcaccactgataggacgttttgttccctttgctgccgtanctgctgctaattgcattaatattccattaatgaggcaaagggaactcaaagttggcattcccgtcacggatgagaatgggaaccgcttgggggantcggcgaacgctgcgaaacaagccatcacgcaagttgtcgtgtccangattctcatggcagcccctggcatggccatccctccattcattatgaacactttggaaaanaaagcctttttgaanangttcccatgggatgaatgccccattcaagttgggttagttggcttctgtttggtgtttgctacacccctgtgttgtgccctgtttcctcanaaaattccattgtctgttacaancttggaagccgaattgcancttagatccaagaaaaccctcctgaattgngacnctgttcttccat

SEQ ID NO: 2925 - DNA, 774 bp, Homo sapiens
  misc_feature (25)..(25): "n" may be a, t, c, g, other or unknown
  misc_feature (131)..(131): "n" may be a, t, c, g, other or unknown
  misc_feature (269)..(269): "n" may be a, t, c, g, other or unknown
  misc_feature (483)..(483): "n" may be a, t, c, g, other or unknown
  misc_feature (563)..(563): "n" may be a, t, c, g, other or unknown
  misc_feature (577)..(577): "n" may be a, t, c, g, other or unknown
  misc_feature (580)..(580): "n" may be a, t, c, g, other or unknown
  misc_feature (641)..(641): "n" may be a, t, c, g, other or unknown
  misc_feature (703)..(703): "n" may be a, t, c, g, other or unknown
  misc_feature (706)..(706): "n" may be a, t, c, g, other or unknown
  misc_feature (732)..(732): "n" may be a, t, c, g, other or unknown
  misc_feature (749)..(749): "n" may be a, t, c, g, other or unknown
  misc_feature (763)..(763): "n" may be a, t, c, g, other or unknown
gttgcctgagcagtgggctgcttangaagagaaggtcagagttcgcgggggcagaggcattcttgccgctggcccagtcactatgtagtggaggggcagacaccctcccgcaaattctggaaggttcttantctcgactagggcagtagccccaggactcctagtcgccggcttcaggtcactgccggctgaacggagctgccgtcgccatgtttggctgcttggtggcggggaggctggtgcaaacagctgcacagcaagtggcagangataaatttgtttttgacttacctgattatgaaagtatcaaccatgttgtggtttttatgctgggaacaatcccatttcctgagggaatgggaggatctgtctacttttcttatcctgattcaaatggaatgccagtatggcaactcctaggatttgtcacgaatgggaagccaagtgccatcttcaaaatttcaggtcttaaatctggagaangaaccaacatccttttggagccatgaatattgtccgaactccatctgttgctcagattggaatttcagtggaattattanacagtatggctcancanactcctgtaggttatgctgctgtatcctcagttgactcattcactcagttcacacaaaaanatgttggacaatttctacaattttgctttcatcatttgctgtctctcaggcccaaaataacnccnagcccatcttaaaatgttccattccnggcaaattttggttctnaaaattgggttttnaaaaaaaaaaa

SEQ ID NO: 2926 - DNA, 655 bp, Homo sapiens
  misc_feature (346)..(346): "n" may be a, t, c, g, other or unknown
  misc_feature (351)..(351): "n" may be a, t, c, g, other or unknown
  misc_feature (542)..(542): "n" may be a, t, c, g, other or unknown
  misc_feature (593)..(593): "n" may be a, t, c, g, other or unknown
  misc_feature (598)..(598): "n" may be a, t, c, g, other or unknown
  misc_feature (624)..(624): "n" may be a, t, c, g, other or unknown
  misc_feature (649)..(649): "n" may be a, t, c, g, other or unknown
  misc_feature (653)..(653): "n" may be a, t, c, g, other or unknown
actcttggcgccttcgcggaaggtgcgtccgagccatggccgctgccaacccgtgggacccggcgtccgcgcctaacggcgctgggctagtgctaggccacttcatagcttcggggatggtcaatcagaaaaacctggaaattgaactcctgaaactagaaaaagatacagcagatgttgttcatcctttctttttggagatgaagtcttgctatgttgcccaggctggtctcgaactcatggcctcaattctcccgtttcagtctcccaaaacactgcgattacagctcagaagtgtcatactctgcaaagcatgaataatcatttggaagcagtgctgaaaganaaganatcccttaggcaaagactgttgaaacccatgtgccaggaaaacttacctattgaagctgtttatcacagatatatggtacatttgctggagttggctgtgactttcattgagagattagaaacccaccttgaaacaattagaaatattcctcatttagctgcaaatctaaagaaaatgaaccaggctttancaaagatggatatattggtgactgagacagaagaactggcagaaaaatatnctccnagtggcgttaacaacaaaaacgaaantttccgtcttgtttcccccaaaatnttanct

SEQ ID NO: 2927 - DNA, 665 bp, Homo sapiens
  misc_feature (640)..(640): "n" may be a, t, c, g, other or unknown
  misc_feature (644)..(644): "n" may be a, t, c, g, other or unknown
  misc_feature (653)..(653): "n" may be a, t, c, g, other or unknown
gagttgaaagaggccatcaagatcctggagagcctcaagaacatgactgtggagcagctgctgacgggctcgcccacctctccgactgtggagcctgagaagccaactcgggagaagaagtttctggatgacatcaagaagctacaggaaaacctcaagaagaccctggacaatgtggccattgtagaggaggagaagatggaagcagtgcccgacgtagagcgcaaggaggacaagcccgaggggcagtcacctgtgaaggctgagtggcccagcgaaaccccggtgctgtgccagcagtgtggcggcaagcctggcgtcaccttcaccagcgccaagggcgaggtcttctccgtactggagtttgcaccctcaaatcattcttttaagaaaattgagttccagcctccagaagccaagaagttcttcagcacagtgcggaaggagatggcgctgctggctacctcactgcctgagggcatcatggtccagacttttgaagatagaatggacctcttctcagctctcatcaggggccccactcgaaccccctacgaagatggcctctacttgtttgacatccagctccccaacatctacccagccgtgcccccccacttctgctactctcccaatgcantggncgcctgaanccccacctgttt

SEQ ID NO: 2928 - DNA, 513 bp, Homo sapiens
  misc_feature (424)..(424): "n" may be a, t, c, g, other or unknown
  misc_feature (481)..(481): "n" may be a, t, c, g, other or unknown
  misc_feature (496)..(496): "n" may be a, t, c, g, other or unknown
  misc_feature (501)..(501): "n" may be a, t, c, g, other or unknown
  misc_feature (512)..(512): "n" may be a, t, c, g, other or unknown
gctgcgggcccgggccatggccgccgccgatgccgagagacacctatggctgccgatgaaggctcagcagagaaacaggcaggagaggcccacatggctgcggacggtgagaccaatgggtcttgtgaaaacagcgatgccagcagtcatgcaaatgctgcaaagcacactcaggacagcgcaagggtcaacccccaggatggcaccaacacactaactcggatagcggaaaatggggtttcagaaagagactcagaagcggcgaagcaaaaccacgtcactgccgacgactttgtgcagacttctgtcatcggcagcaacggatacatcttaaataagccggccctacaggcacagcccttgaggactaccagcactctggcctcttcgctgcctggccatgctgcaaaaacccttcctggangggctggcaaaggcaggactccaagcgcttttccccagacgccagccgccccaccanccacccttggggganggganttctgacacana

SEQ ID NO: 2929 - DNA, 668 bp, Homo sapiens
  misc_feature (78)..(78): "n" may be a, t, c, g, other or unknown
  misc_feature (81)..(81): "n" may be a, t, c, g, other or unknown
  misc_feature (144)..(144): "n" may be a, t, c, g, other or unknown
  misc_feature (198)..(198): "n" may be a, t, c, g, other or unknown
  misc_feature (280)..(280): "n" may be a, t, c, g, other or unknown
  misc_feature (404)..(404): "n" may be a, t, c, g, other or unknown
  misc_feature (407)..(407): "n" may be a, t, c, g, other or unknown
  misc_feature (467)..(467): "n" may be a, t, c, g, other or unknown
  misc_feature (489)..(489): "n" may be a, t, c, g, other or unknown
  misc_feature (491)..(491): "n" may be a, t, c, g, other or unknown
  misc_feature (509)..(509): "n" may be a, t, c, g, other or unknown
  misc_feature (523)..(523): "n" may be a, t, c, g, other or unknown
  misc_feature (585)..(585): "n" may be a, t, c, g, other or unknown
  misc_feature (605)..(606): "n" may be a, t, c, g, other or unknown
  misc_feature (657)..(657): "n" may be a, t, c, g, other or unknown
  misc_feature (661)..(661): "n" may be a, t, c, g, other or unknown
gctgggtcccttctcccttgacagctccctttctgtgttttttctggcacaagaaactctgtcatcttgtataaatanganaaatttatggcagttttccctcttcttctccctggtgggctactaggaagggtctagggggangagggagcctgaaattccaaaaatataaatgtggaaagactggagggggtcgangagtctctttgcctgccttagctctggccccagctctcctttccctttgcatgtttgaccatctgggtgatgaggagggtanagaactggtgcagcccgtcctctctgcaagcccaaaagagatgggtcccaaagcagatatccgacaggaggggcacaagggaaatcaaggaaataggcttggctgtcccatgaaataattgganganacacagaccactgccctccttcctggatttggctatttttgtacttccctgtttgttgangcagcctgatacagcggggaananaactcgtcctcgatttanaaagattgacaganaaactaagtgtgtgaccttaagcaagtcatatcttgtctccgggcctcacctgtaaaaaganggaagggactgaatttatcnngggttttcaaatgattttaactctggggtccttccttcaaataaaaccgtntgcnctgaccc

SEQ ID NO: 2930 - DNA, 837 bp, Homo sapiens
  misc_feature (206)..(206): "n" may be a, t, c, g, other or unknown
  misc_feature (527)..(527): "n" may be a, t, c, g, other or unknown
  misc_feature (548)..(548): "n" may be a, t, c, g, other or unknown
  misc_feature (598)..(598): "n" may be a, t, c, g, other or unknown
  misc_feature (647)..(647): "n" may be a, t, c, g, other or unknown
  misc_feature (650)..(650): "n" may be a, t, c, g, other or unknown
  misc_feature (741)..(741): "n" may be a, t, c, g, other or unknown
  misc_feature (793)..(793): "n" may be a, t, c, g, other or unknown
  misc_feature (808)..(808): "n" may be a, t, c, g, other or unknown
  misc_feature (831)..(831): "n" may be a, t, c, g, other or unknown
  misc_feature (837)..(837): "n" may be a, t, c, g, other or unknown
ctaatacatctaatgacagtaggcatcaaaagctaaaagagatttcacaatactacataccatggagacagggctgataaattatggcccatgctgtctggttttgtacgtaaagttttattggaacacacctgtgtccattctttcatgtattgtctatggctgctgtcatgttacaactacagagttgagtagttgcaacaganactatatggcccttgaccaaaaaaagcctgccaacccctgccatgggacatattcttcagggtccctttcttaaaaatatgtataacaactcttaataatttattggctcagtgattcccaaattatgttttatagaatattaatattctctaagttaataaatgttttgagaaaatgattgatgctaatattggtttttctttatggttgattttaatatgtttatttaaatatgagattaagactgctaaactcatttctatagcttttatttttatgtgataatctacctttaagaaaaggtgtaccatacctgagancaccaggaagtcgcatgaganatcacctgatacatgaacgtatgatgttccatctgcgcattgatgaatangcagcatttacaaattaactgatgtgttgctgtatatcatctctttgangantgccctcctcttgtatcccgtcttaataatttcacacatttgcgatactcaatgtctatcctaaattaaccatgttttgtacccaaactcnttggcccatgggatctgttgctgaaacaaaggaaatcttaaacaaaaaaatngaaacttccggttancaaaattggtgtctgaatccaantgatcn

SEQ ID NO: 2931 - DNA, 520 bp, Homo sapiens
  misc_feature (85)..(85): "n" may be a, t, c, g, other or unknown
  misc_feature (201)..(201): "n" may be a, t, c, g, other or unknown
  misc_feature (251)..(251): "n" may be a, t, c, g, other or unknown
  misc_feature (267)..(267): "n" may be a, t, c, g, other or unknown
  misc_feature (283)..(283): "n" may be a, t, c, g, other or unknown
  misc_feature (396)..(396): "n" may be a, t, c, g, other or unknown
  misc_feature (438)..(438): "n" may be a, t, c, g, other or unknown
  misc_feature (465)..(465): "n" may be a, t, c, g, other or unknown
  misc_feature (468)..(468): "n" may be a, t, c, g, other or unknown
  misc_feature (478)..(478): "n" may be a, t, c, g, other or unknown
  misc_feature (496)..(496): "n" may be a, t, c, g, other or unknown
ggacatatactgagtgctactttatgccagaccctgggctggcagctgtttggaggcaaagatgtatgaggccatctcaggaganactacttgttaggattcttgagttttgaccaacagaaatgaacttggaccaacttaagcaaggaaaaagcgttcatgggaaggatgctgggatagctcacaaaaccaaaagaatanctgaacaattaattggccttgggaagggtgggagctggggcaactacgangcttgcctcccagganctgctgcggttggcanatcaacaccaacttgccattggttctagtgggtccccttccactcaagattcaaattccaagtgaaagaacctggcctggagctcagggcttcatagagtgggaggggggcantcttccaaaagatgcggactcttgccacatggaatggtggantacggaagggtggaaagggtttggtangtnaaccctgaanatgcttctaacacacgtnctgttctcccatctcacgtatgac

SEQ ID NO: 2932 - DNA, 876 bp, Homo sapiens
  misc_feature (618)..(618): "n" may be a, t, c, g, other or unknown
  misc_feature (629)..(629): "n" may be a, t, c, g, other or unknown
  misc_feature (708)..(708): "n" may be a, t, c, g, other or unknown
  misc_feature (724)..(724): "n" may be a, t, c, g, other or unknown
  misc_feature (747)..(747): "n" may be a, t, c, g, other or unknown
  misc_feature (754)..(754): "n" may be a, t, c, g, other or unknown
  misc_feature (794)..(794): "n" may be a, t, c, g, other or unknown
  misc_feature (821)..(821): "n" may be a, t, c, g, other or unknown
  misc_feature (836)..(836): "n" may be a, t, c, g, other or unknown
  misc_feature (851)..(851): "n" may be a, t, c, g, other or unknown
  misc_feature (870)..(870): "n" may be a, t, c, g, other or unknown
agcgaataaatgctcagaaaggcgttttgtttcaagaggatcagattttggactggtttgtacagatatgtttggccctgaaacatgtacatgatagaaaaattcttcatcgagacattaaatctcagaacatatttttaactaaagatggaacagtacaacttggagattttggaattgctagagttcttaatagtactgtagagctggctcgaacttgcatagggaccccatactacttgtcacctgaaatctgtgaaaacaaaccttacaataataaaagtgacatttgggctctggggtgtgtcctttatgagctgtgtacacttaaacatgcttttgaagctggcagtatgaaaaacctggtactgaagataatatctggatcttttccacctgtgtctttgcattattcctatgatctccgcagtttggtgtctcagttatttaaaagaaatcctagggatagaccatcagtcaactccatattggagaaaggttttatagccaaacgcattgaaaagtttctctctcctcagcttattgcagaagaattttgtctaaaaacattttcgaagtttggatcacagcctataccagctaaaaaaccagcttcangacaaaactcnatttctgttatgcctgctcaaaaaattacaagcctgccgctaaatatggaatacctttagcatattaagaaatatgganattaaaaaattacccnaaaaagaaaccactgccaaaacntaaaccnggccctccaactcccaaaaaaaaaaattgaattctggganaaaaaaagggaggaaaatttctgaagnaaccccccagaaaanaaaaaaggggggaantttttgaaaaagggaaaanaaaccc

SEQ ID NO: 2933 - DNA, 585 bp, Homo sapiens
  misc_feature (496)..(496): "n" may be a, t, c, g, other or unknown
  misc_feature (510)..(510): "n" may be a, t, c, g, other or unknown
  misc_feature (516)..(516): "n" may be a, t, c, g, other or unknown
  misc_feature (519)..(519): "n" may be a, t, c, g, other or unknown
  misc_feature (552)..(552): "n" may be a, t, c, g, other or unknown
gttgtttctgaggagttcaggaatcagattgtacgtgaacttgtgactttgcctgcaaatcgttggagggagcagttagactattacgctcgctgcagccaggctcctggctgtggggaactcctctttgacactgacacttggagcttgcagataaggaagacaggggctcagacagctactgactttcctcatgctatcaggatatggtacaaaactaaacctgaagggcgatcggttacatggacctcagaccagagtggcaggccatgtgtttatactgtgggatctcccataaacaacagggccctttttccatgccaggagccacccgttgccatgtcaacatggcaggctacagttcgagcagctgcatcttttgttgttttaatgagtggggaaaattctgccaaaccaacgcagctttgggaagaatgctcaagctggtattactatgtaactatgccaatgccagcctccaccttcacaattgcantgggatgctggacngaaatnaanatggagacatggtcctcaaatgatttggcaacngagaaaccttctcaccttctgaagccaacttca

SEQ ID NO: 2934 - DNA, 538 bp, Homo sapiens
  misc_feature (100)..(100): "n" may be a, t, c, g, other or unknown
  misc_feature (285)..(285): "n" may be a, t, c, g, other or unknown
  misc_feature (405)..(405): "n" may be a, t, c, g, other or unknown
  misc_feature (468)..(468): "n" may be a, t, c, g, other or unknown
  misc_feature (500)..(500): "n" may be a, t, c, g, other or unknown
  misc_feature (517)..(517): "n" may be a, t, c, g, other or unknown
  misc_feature (520)..(520): "n" may be a, t, c, g, other or unknown
  misc_feature (531)..(531): "n" may be a, t, c, g, other or unknown
aatcgcagcgctggcgcgggcggaggctaaaacacgggggtcctgagactgaggaaaacgcgccaagttcccctcggtggcggagtgctaaagaccctancggttcatgcgttcggcgagcggggccgctgcttgttgcgctcctggctctcccggggcgggcgcagatgggcgccgctcccgggatgtatttggtgttggtgcaaggcgggagcgagcggcggtcggggttcccgctcttgggagcggatggtcactcccccgcggggagggcgagccgaccanattttcctggggccggggacccggcgggctcggggcagggactcacctgtcgcacccacactcattcgggttggacttgccggcgtcaccgccgcggacttcgctttgggccatgaccanatataattggtgattacaactttcctctataaattaactcttgacactccttgggatttgaanaaaaaaatgcctggtgtcatacctagtgaaantaatggactttcaagangtngcccttcaaanaaaaaca

SEQ ID NO: 2935 - DNA, 610 bp, Homo sapiens
  misc_feature (406)..(406): "n" may be a, t, c, g, other or unknown
  misc_feature (472)..(472): "n" may be a, t, c, g, other or unknown
  misc_feature (481)..(481): "n" may be a, t, c, g, other or unknown
  misc_feature (562)..(562): "n" may be a, t, c, g, other or unknown
  misc_feature (572)..(572): "n" may be a, t, c, g, other or unknown
  misc_feature (576)..(576): "n" may be a, t, c, g, other or unknown
  misc_feature (606)..(606): "n" may be a, t, c, g, other or unknown
  misc_feature (609)..(609): "n" may be a, t, c, g, other or unknown
tcactggggaaatacaaaaatagcccctcctgaagataaaatcattcagaaacagagcaataattctgactcattaacttctacctactcaaaaaagtctgccatgatgatggaccgaagtgaggctttttaacccacaagtaacctttttatttttttgagacagtcttgctctgtctgtcacccaggctggagtacagtggcatgatcttggctcactgcagcctcgacttcctgggctcaaatgatcctcccacctcagcctcccatgtggctggaaccacaggcacgtgccaccatgcctggctatttttttgttgagctgggctctcgctttgttgcccaggctggtcttgaactcctcggctcaagcaatccttcccactcagcctcctgtagtgtcganaatataggcgtgggctactacacctgcttcagccgcttctataaaaccgctgacctgtgtgtggangacagccangtgtgtgctcactgcgctgcgaaaatgttttgtcacgtgactttccccggatttccatttctttttttctgcttccctccnaaactaatanaaanactgggtgcgggggctcacgcctctaatcncanc

SEQ ID NO: 2936 - DNA, 783 bp, Homo sapiens
  misc_feature (478)..(478): "n" may be a, t, c, g, other or unknown
  misc_feature (540)..(540): "n" may be a, t, c, g, other or unknown
  misc_feature (554)..(554): "n" may be a, t, c, g, other or unknown
  misc_feature (650)..(650): "n" may be a, t, c, g, other or unknown
  misc_feature (678)..(678): "n" may be a, t, c, g, other or unknown
  misc_feature (700)..(700): "n" may be a, t, c, g, other or unknown
  misc_feature (743)..(743): "n" may be a, t, c, g, other or unknown
  misc_feature (759)..(759): "n" may be a, t, c, g, other or unknown
  misc_feature (765)..(765): "n" may be a, t, c, g, other or unknown
  misc_feature (778)..(778): "n" may be a, t, c, g, other or unknown
gaattcagtggccaaaggagtatttttggagtgccttgagccatatattttaagtgataaattggtgggaatcacaccccaagtaatgaaagacttgattgttcatttccaagataaaaaattaatggaaaatgtggaagcgctcattgtacatatggatatcaccagcctagatattcagcaggtagttctcatgtgttgggaaaatcgtttatatgatgctatgatctatgtctacaacagaggcatgaatgaatttattagtccaatggagaaacttttcagagtcattgctcctcctctgaatgcaggaaaaacactaacagatgaacaagttgttatgggcaataagctccttgtatatattagctgttgtctagcaggtcgtgcctatccccttggtgacatccctgaagatctggttcccttggttaaaaaccaggtttttgaatttctaattcgcctgcattcatcagangcttctcctgaaggaaaaaatctatccttacattcggactttgctacattttgacacaaganaatttctcaatgtnttggcactgacttttgaagattttaaaaatgacaagcaagctgtgggaatatccacagccgaattgtggatattttgttgaaagttatgggtgganaattcagactttaccccctcacaagttngatgtctctttaccttccttgntccgcagcttgcaaaacctgacaacaccttgtttgttaaacanaaacctttttgatccnggtccntgaaatcccttgntgtcc

SEQ ID NO: 2937 - DNA, 720 bp, Homo sapiens
  misc_feature (632)..(632): "n" may be a, t, c, g, other or unknown
  misc_feature (635)..(635): "n" may be a, t, c, g, other or unknown
  misc_feature (674)..(674): "n" may be a, t, c, g, other or unknown
  misc_feature (692)..(692): "n" may be a, t, c, g, other or unknown
  misc_feature (708)..(708): "n" may be a, t, c, g, other or unknown
aggaagaggataaaagccagatctcctttgataacctcactccaagtgggacgctggggaaagactaccataagtcagtggaggtttttcccttaaaggcaagaaaatctatggaaagagaaggctacgagtcctcgggcaatgatgactacaggggtagttacaacaccgtgctctcacagcctttatttgaaaagcaggacagagaaggtccagcctccacgggaagcaaactcaccattcaggaacatctgtaccccgcgccttcatcacctgagaaagaacagctgctggaccgcagacccactgaatgtatgatgtcgcgatcagtagatcacctcgagagacctacgtccttcccacggcccggccagttaatctgctgcagttctgtcgaccaggtcaatgacagcgtttacaggaaagtactgcctgccttggtcatcccggctcattatatgaaactccccggggaccactcctatgtcagccagcccctcgtcgtcccggctgatcagcagcttgagataaaaagactacaggctgagctgtccaatccccatgccgggatcttcccacacccgtcctcacagatccagccccagcccctgtcttcccaggccatctctcancancacctgcaggatgcgggcacccgggaatggaaccctcanaacgcatccatgtcggantctctctccatcccancttccctgaaac

SEQ ID NO: 2938 - DNA, 544 bp, Homo sapiens
  misc_feature (356)..(356): "n" may be a, t, c, g, other or unknown
  misc_feature (367)..(367): "n" may be a, t, c, g, other or unknown
  misc_feature (426)..(426): "n" may be a, t, c, g, other or unknown
  misc_feature (483)..(483): "n" may be a, t, c, g, other or unknown
  misc_feature (490)..(490): "n" may be a, t, c, g, other or unknown
  misc_feature (501)..(501): "n" may be a, t, c, g, other or unknown
  misc_feature (532)..(532): "n" may be a, t, c, g, other or unknown
  misc_feature (538)..(538): "n" may be a, t, c, g, other or unknown
aaaaatggagattctccagggacccttccgtatctgcctaggcattttgctgtctcctcctaatacgctgttgctgtactggacacttgctcccatctactctcttctctggaatccacgggggattcctaaggatgtcaccacagtgttggccagatgcacaggtcacaggggactgaacctcatcaccccacaaacataccattcaggttttgccaagaatgacactgtaaatgtaacaaagcttctgtgcttgttagtgaacaccaactcagctcctctcctgtattcagaaatcaggatgagatgaaaacaacaagcaggccaggcacggtggctcatgcctgtaatcccancactttgggangccgaggcgggcggatcacctgaggtcgggagctcgagaccaccctgatcaaaacaganaaaccccatctctactgaaaatacaaaattagccaggcgtggtggcaaatgcctgtnataccanctactcagganctgaggcaggaaaattgcttgaacccgggangtggangctgca

SEQ ID NO: 2939 - DNA, 821 bp, Homo sapiens
  misc_feature (36)..(36): "n" may be a, t, c, g, other or unknown
  misc_feature (284)..(284): "n" may be a, t, c, g, other or unknown
  misc_feature (435)..(435): "n" may be a, t, c, g, other or unknown
  misc_feature (441)..(441): "n" may be a, t, c, g, other or unknown
  misc_feature (463)..(463): "n" may be a, t, c, g, other or unknown
  misc_feature (466)..(466): "n" may be a, t, c, g, other or unknown
  misc_feature (533)..(533): "n" may be a, t, c, g, other or unknown
  misc_feature (542)..(542): "n" may be a, t, c, g, other or unknown
  misc_feature (545)..(545): "n" may be a, t, c, g, other or unknown
  misc_feature (599)..(599): "n" may be a, t, c, g, other or unknown
  misc_feature (610)..(610): "n" may be a, t, c, g, other or unknown
  misc_feature (676)..(676): "n" may be a, t, c, g, other or unknown
  misc_feature (695)..(695): "n" may be a, t, c, g, other or unknown
  misc_feature (753)..(753): "n" may be a, t, c, g, other or unknown
  misc_feature (780)..(780): "n" may be a, t, c, g, other or unknown
  misc_feature (790)..(790): "n" may be a, t, c, g, other or unknown
  misc_feature (793)..(793): "n" may be a, t, c, g, other or unknown
  misc_feature (798)..(798): "n" may be a, t, c, g, other or unknown
tctattttttggctattataaacaatgctgccgtgnaacatttgtgtccaactttttgtgtggacacgttttcatttctcttggatacacactagcagtggaattgctgggtcatacagtaactctatgttactttttgaagaaatgccagacagttttccaaagtggctgcaccattttacattcccaccagcatatatgagggttctagtttctccacatcatctctaatacttgttgttgtttatctttttgattatagccatcctagtaagtttgaagangtatctcactgtggttttgatttgcaatttcctaaccatttgatgacaaatgatgttaagcatcttttcatgcacatattttctttggaggtttgcctattcaggtcttttgcccattttaaaattgggtttatctttttttttttttganatggantctcgctctgtcacccaagcangantgcaatggtgcaatctcggctcactgcaacctccgcctcccaggttcaagtgattctcctgccccancctcctgantanctggattacaggtgcccaccactacactggctaatttttgtatttttagtaaanacgggtcttancatgttggccaagctggtcttgaactcctgaactcaggtgatccacccaccttggcctttccaaantgttgggattacaggcatnaaccactgccccgggtggggttatgtttttatattgaattgtaggaatactttaatcnttttaactaaaaattctttatcctttnagcttaccanctncattnatttggcaaaaatttcctcccca

SEQ ID NO: 2940 - DNA, 768 bp, Homo sapiens
  misc_feature (26)..(26): "n" may be a, t, c, g, other or unknown
  misc_feature (461)..(461): "n" may be a, t, c, g, other or unknown
  misc_feature (531)..(531): "n" may be a, t, c, g, other or unknown
  misc_feature (558)..(558): "n" may be a, t, c, g, other or unknown
  misc_feature (641)..(641): "n" may be a, t, c, g, other or unknown
  misc_feature (684)..(684): "n" may be a, t, c, g, other or unknown
  misc_feature (707)..(707): "n" may be a, t, c, g, other or unknown
  misc_feature (759)..(760): "n" may be a, t, c, g, other or unknown
  misc_feature (768)..(768): "n" may be a, t, c, g, other or unknown
gtctttctctgtctcggctgaggcanccatctttctcttgccgcgtgctggtgttggaggaccctccctgcttcagggtacagctcgcagaaagaagaaggtggtacatagaacagccacagctgatgacaaaaagcttcagagttctctaaaaaaactggctgtgaataatatagctggtattgaagaggtgaacatgattaaagatgatgggacagttattcatttcaacaatcccaaagtccaagcttccctttctgctaatacctttgcaattactggtcatgcagaagccaaaccaatcacagaaatgcttcctggaatattaagtcagcttggtgctgacagtttaacaagccttaggaagttagctgaacagttcccacggcaagtcttggacagtaaagcaccaaaaccagaagacattgatgaggaagatgatgatgttccagatcttgtanaaaattttgatgaggcatcaaagaatgaagctaactaaaagtttggtttttggaagctggcatggactanatttaacaaatcagctatgtggttccnaagttttacagacatggagaacatcacctgttactaattcagtaatataaatattttgtatattaataatgctgtttgttcancatttttcggtcatttgattttgcattttgcacttcctcccangatatttttttggtccaaatatnaaatattggtgcattttgaagggtgttttgggttttgaattcccgggttttnntggttttn

SEQ ID NO: 2941 - DNA, 678 bp, Homo sapiens
  misc_feature (600)..(600): "n" may be a, t, c, g, other or unknown
  misc_feature (632)..(632): "n" may be a, t, c, g, other or unknown
  misc_feature (658)..(658): "n" may be a, t, c, g, other or unknown
aagccttcagggatttgcctgtggttgctactcaagttaaaaagactgggagcctgcattgtttggtcctggagctcaaggttttcagtgaaggcttgtcctggcacctctgggcattccttttcattactggttgagcatccttccttctgctctgtcaattggcaaaatatgctggagcacattctggactagcagttgccttggggtagtcaggctgggtatttgtttggtatctcttggtgtagcagaccccagaatctcatggcaattaggatttggtggctaaacgaaagagttagtgcaaggaaaagcctagttggaatttctgagtctgggccatccttaagctgctgtctactgcctgaatgggaagtaatgtcgaattggaaaattagctcaccatttttgttctagctttgcagacatttattcctctgatgataggctgagaaatgcctaggccggcttaaaaggcacacagcatgacagaagtactccttcaaagcagctgtgtctagaaagaagaactggaaaagtggatttgctggggaattaaatgcatttagttttccacttacgcacaactgccttctccantatatcataccaaggttttttaagcctttgtngcttaccctgcaagaacatactgttntcctgttgttctggactgtt

SEQ ID NO: 2942 - DNA, 609 bp, Homo sapiens
  misc_feature (381)..(381): "n" may be a, t, c, g, other or unknown
  misc_feature (402)..(402): "n" may be a, t, c, g, other or unknown
  misc_feature (429)..(429): "n" may be a, t, c, g, other or unknown
  misc_feature (480)..(480): "n" may be a, t, c, g, other or unknown
  misc_feature (531)..(531): "n" may be a, t, c, g, other or unknown
  misc_feature (534)..(534): "n" may be a, t, c, g, other or unknown
  misc_feature (551)..(551): "n" may be a, t, c, g, other or unknown
  misc_feature (564)..(564): "n" may be a, t, c, g, other or unknown
  misc_feature (609)..(609): "n" may be a, t, c, g, other or unknown
attcagttctcgagctccagccctcagcgcatgcgcaagacgagtcgcctgagggaactgatctcagctcgggcccgcgttacatcctcctcctcttcttccttcggcccagctttccttaggggctgcaacccggacgccgaggccggtttcggagtggggagtgcccattttctctccttcccacgttcctggcccccagacgccatttgcaggcgggtggcttgggtcagcctccccgcccccacccgactcccgtcacgggagagcgcacaccgcgccccgagaaccaatcagcagccgcgttaggtaaccatgtctgagtctggacacagtcagcctggactctatgggatagagcggcggcgacggtggaaggancctggctctggtggcccccanaatctctctgggcctggtggtcggganagggactacattgcaccatgggaaagagagagaagggatgccagcgaaganacaagcacttccgtcatgcagaaaaccccatcatcctctcaaaacctccancanaacggtcaaaacagccnccacctccaacancccctgctgccccgcctgctccacccctctgggaaaaacccatcn

SEQ ID NO: 2943 - DNA, 648 bp, Homo sapiens
  misc_feature (584)..(584): "n" may be a, t, c, g, other or unknown
  misc_feature (607)..(607): "n" may be a, t, c, g, other or unknown
  misc_feature (609)..(609): "n" may be a, t, c, g, other or unknown
  misc_feature (621)..(621): "n" may be a, t, c, g, other or unknown
  misc_feature (640)..(640): "n" may be a, t, c, g, other or unknown
actcaatggagccctcaaggtagaactcctcggaaccaagacccagctcatccagacaagcccaagaaacattctcccaaaaggaggctgcagcatgccctggaggaccagatctatagaatcttccggaagagtcgtgtcttgactaatcagagcatcaactgcctctttactgtgcctgccaaccaagctttcgtgtacatagtaccgggaagccaggaggaggacccagtaggtatgttgctggaccaacttaggagtcattgtactgtgaaggacccggaatctttgctggtgcctgcacccctttctgggcctaggcgataccaggtgatgaggcagcacagccgacaacaactttcctttcacattgacagcagcagttccagttcttcaggccagctagtggatttcactcttcgggaattcctatggcagcatgtggagctagttctaagcaagaaaggtttcgatgacagtgtgggcaggaacccacagccttcccattttgaacttcctacttatcagaagtggatctcagcagcttcaaaactgtatgaggtggctattgatggggaaagaanaagacttggggtccccactggananctaacatctaanattttaagcagtattaaantcttggaa

SEQ ID NO: 2944 - DNA, 528 bp, Homo sapiens
  misc_feature (296)..(296): "n" may be a, t, c, g, other or unknown
  misc_feature (442)..(442): "n" may be a, t, c, g, other or unknown
  misc_feature (500)..(500): "n" may be a, t, c, g, other or unknown
  misc_feature (526)..(526): "n" may be a, t, c, g, other or unknown
taaagaacgaacttttgatccggagagagtggagagagagagacgcttaatacggaaggaaaaagtggaaaaggacaaaactgacaagcagaaacgcaaaggaaaggttcactcccctagttctcagtcttcagaaacggaccaagaaaatgagcgagagcaaagccctgaaaagcccaggagttgtaataaactgagcagagagaaagctgacaaagagggaatagcgaaaaaccgcctggaactcatgccttgcgtggttttgactcgagtgaaagagaaagagggaaaggtcnttgaccacactcctgtggaaaagttgaaagccaagcttgataatgacactgtcaaatcttctgccctggaccagaaacttcaggtctctcagacggagcctgcaaaatctgacttgtctaaactggaatcagttagaatgaaagtnccaaaggaaaaggggctttcaagccatgttgaagtggtggagaaggaagacaggcttnaagccaggaagctcctcaagcctganca

SEQ ID NO: 2945 - DNA, 679 bp, Homo sapiens
  misc_feature (220)..(220): "n" may be a, t, c, g, other or unknown
  misc_feature (228)..(228): "n" may be a, t, c, g, other or unknown
  misc_feature (303)..(303): "n" may be a, t, c, g, other or unknown
  misc_feature (346)..(346): "n" may be a, t, c, g, other or unknown
  misc_feature (360)..(360): "n" may be a, t, c, g, other or unknown
  misc_feature (378)..(378): "n" may be a, t, c, g, other or unknown
  misc_feature (436)..(436): "n" may be a, t, c, g, other or unknown
  misc_feature (463)..(463): "n" may be a, t, c, g, other or unknown
  misc_feature (549)..(549): "n" may be a, t, c, g, other or unknown
  misc_feature (596)..(596): "n" may be a, t, c, g, other or unknown
  misc_feature (645)..(645): "n" may be a, t, c, g, other or unknown
  misc_feature (649)..(649): "n" may be a, t, c, g, other or unknown
  misc_feature (669)..(669): "n" may be a, t, c, g, other or unknown
  misc_feature (672)..(672): "n" may be a, t, c, g, other or unknown
aaaaaggaatgggatcgcgccgcggcggttcctgtccttacagttgcgctgcccaggggaccgatgttgcgcgaggaaaatgcgggacgcccaggtcggtgctcggcccagacttatgcccgtgttttcacagcccacactcgtgcccgaagccccttaccccgccccgggctgtggtctgtgggctgtgggacgagctgcggcgcgggccatttctgancagtggangtttcaagtaatccactaacaaccagttccaaattctgtcatcaaatcctgtgctgctgttcctcgtggtaatanatgcatattatttcttttatttaaaagaaatgaatgtgactantattgcattaaganctggaacttggcttttanctgcatggcatgttaaagtacctccgatgtggctggaagcttgttttaactggattcnagaagaaaataataatgttaacttgantccggcccaaatgaataaacaagtgtttgaacagtggctccttactgatctgaaggatttggaacatcctcttttacccgatggcnttttaaaaattccaaaaggaaaaattaaatggattttatgctctgcnaattaattccttggttgatgttagtcacctgcatactccccaaaattcngaanttgaaaaggaaagaattccnccnatgatct

SEQ ID NO: 2946 - DNA, 528 bp, Homo sapiens
  misc_feature (8)..(8): "n" may be a, t, c, g, other or unknown
  misc_feature (166)..(166): "n" may be a, t, c, g, other or unknown
  misc_feature (212)..(212): "n" may be a, t, c, g, other or unknown
  misc_feature (300)..(300): "n" may be a, t, c, g, other or unknown
  misc_feature (318)..(318): "n" may be a, t, c, g, other or unknown
  misc_feature (320)..(320): "n" may be a, t, c, g, other or unknown
  misc_feature (435)..(435): "n" may be a, t, c, g, other or unknown
  misc_feature (459)..(459): "n" may be a, t, c, g, other or unknown
  misc_feature (497)..(497): "n" may be a, t, c, g, other or unknown
  misc_feature (505)..(505): "n" may be a, t, c, g, other or unknown
  misc_feature (515)..(515): "n" may be a, t, c, g, other or unknown
gacctttnagcgtcacgggtggggctgcagcttctggacctaggactttgaacatgtcgcgcctgaagcggatagcggggcaggatctccgcgctggtttcaaagcaggtggaagagactgcggtacctcggtaccccaagggctgttgaaggcagcgaggaagancggccagttaaacctgtcgggtagaaacctcagtgaagtgccgcantgtgtctggagaataaatgtggatatccctgaggaagctaatcaaaatctttcgtttggtgctactgaaagatggtgggagcagacanatttgaccaaactaatgntntcaaacaataaacttcagtcacttacagatgacctgcgactcttgcctgcactgactgttcttgatatacatgataatcagttgacatcccttccttctgctataagagagctanaaaatcttcagaaacttaatgtcngccataataaactgaaaatactccctgaagaaattacnaacctganaaacctgaantgcctgtatctcc

SEQ ID NO: 2947 - DNA, 745 bp, Homo sapiens
  misc_feature (70)..(70): "n" may be a, t, c, g, other or unknown
  misc_feature (156)..(156): "n" may be a, t, c, g, other or unknown
  misc_feature (162)..(162): "n" may be a, t, c, g, other or unknown
  misc_feature (164)..(164): "n" may be a, t, c, g, other or unknown
  misc_feature (439)..(439): "n" may be a, t, c, g, other or unknown
  misc_feature (489)..(489): "n" may be a, t, c, g, other or unknown
  misc_feature (525)..(525): "n" may be a, t, c, g, other or unknown
  misc_feature (543)..(543): "n" may be a, t, c, g, other or unknown
  misc_feature (607)..(607): "n" may be a, t, c, g, other or unknown
  misc_feature (639)..(639): "n" may be a, t, c, g, other or unknown
  misc_feature (650)..(650): "n" may be a, t, c, g, other or unknown
  misc_feature (675)..(675): "n" may be a, t, c, g, other or unknown
  misc_feature (713)..(713): "n" may be a, t, c, g, other or unknown
  misc_feature (737)..(737): "n" may be a, t, c, g, other or unknown
  misc_feature (739)..(739): "n" may be a, t, c, g, other or unknown
gtgaggcggaagctgtgtatggcgggaggctgtggcggtcccttggtggggaagctgttgctgttgctanacgacgggaactagctctcgtcacttcctcagcccgccgtctgcccactcctctagccggaacctgggggcccggagccggggtangcacananttgtcctcggaggtccaggacagcggccagcccggcggcgggagtcagggccacgccacctgcagggaagaacccgagtcgaagcgggaagatggctgcagacaagcctgcagatcagggagcagagaaacatgaaggcacaggtcagtcctctgggatcactgatcaagagaaggagttatccaccaatgctttccaagctttcacatctggaaattatgatgcctgtctacaacaccttgcctgtctacaagatataaacaaagatgattatnaaataattttgaatacagcagtagctgagttttttaaaagtaaccaaacnacaacagattatttgagacaaacacttaaccagctnaagaatcaggtccactcngctgttgaaagaaatggatggattagatgatgttgaaaacagcatgttgttctataatcaagcnagtcattctttatcatctgcggcagtatacanaagccatatcngttggtgaaaaactttatcagttcntagaaccttttgaaaaaaaatttgccccaaccattgtnttttttgctttgttaaacctgttntnttttta

SEQ ID NO: 2948 - DNA, 565 bp, Homo sapiens
  misc_feature (548)..(548): "n" may be a, t, c, g, other or unknown
  misc_feature (551)..(551): "n" may be a, t, c, g, other or unknown
  misc_feature (560)..(560): "n" may be a, t, c, g, other or unknown
attttgggggtggttggaggcggtggcggcggcggcgagagggaatttccttgtgcctccattcccgggaggggggagcggcgttggaggccaccgtttccagcatcaacaacagcaacttgtgattggcggtgaccggatattcagttgcacatccccacatcaatgcactgccaatgggttatatcctgtgttgtgacctcatggtttaagtgggaataaagatgagtataagcagtgatgaagtcaacttcttggtatatagatacttgcaagagtcaggattttctcattcagcatttacctttggtatagaaagccatatcagtcagtccaatataaatggtgccctcgtcccacccgctgcattgatttctatcatccagaaaggtctacagcatgtagaagcagaagttagtattaatgaggatggtaccttgtttgatggtcgaccaatagaatctctgtccctgataaatgccgtaatgcctgatttagttcaaacaagacaacaagcttataaagataacttgcacagcaacaggcancanctgctgcanctgcc

SEQ ID NO: 2949 - DNA, 559 bp, Homo sapiens
  misc_feature (334)..(334): "n" may be a, t, c, g, other or unknown
  misc_feature (412)..(412): "n" may be a, t, c, g, other or unknown
  misc_feature (446)..(446): "n" may be a, t, c, g, other or unknown
  misc_feature (515)..(515): "n" may be a, t, c, g, other or unknown
  misc_feature (518)..(518): "n" may be a, t, c, g, other or unknown
  misc_feature (520)..(520): "n" may be a, t, c, g, other or unknown
  misc_feature (554)..(554): "n" may be a, t, c, g, other or unknown
  misc_feature (557)..(557): "n" may be a, t, c, g, other or unknown
taaacagcaatatgatattgagataacaagaataaaaattgaattggaggaagccctagtcaatgtgaaaagctcccagtttaagttagaaactgctgaaaaggaaaaccagatattggggataacattacgtcagcgtgatgctgaggtgactcgactaagagaattaaccagaactttacagactagcatggcaaagcttctctccgatcttagtgtggacagtgctcgctgcaagcctgggaataaccttaccaaatcactcttgaacattcatgataaacaacttcaacatgacccagctcctgctcacacttccataatgagctatctnaataagttagaaacaaattacagttttacacattcagagccactttctacaattaaaaatgaggaaaccatagagccngacaaaacctatgaaaatgttctgtcctccagangccctcaaaatattaacactaggggcatggaggaaagcatctgcccctggaattatttctgccctttcnaancnggattctgatgaagggagtgaactatggctttantanaa

SEQ ID NO: 2950 - DNA, 557 bp, Homo sapiens
  misc_feature (537)..(537): "n" may be a, t, c, g, other or unknown
  misc_feature (541)..(541): "n" may be a, t, c, g, other or unknown
  misc_feature (552)..(552): "n" may be a, t, c, g, other or unknown
gctcgggcgcggggcgttcttggtgcgccgggccgtggtgagtccgggctcccgtggccgcgtgctgggaggagactggagcccggttaggaagaatggagttggcgactcgctaccagatccctaaagaagtggctgacatctttaacgcccccagtgatgataaagagtttgttggcttccgagatgatgttcccatggaaaccctctcgtcagaggagagctgcgatagttttgactcactagagtcagggaaacagcaggatgtgcgctttcattccaaatacttcacagaagagctaagaagaatttttatagaggacactgactcagagactgaggattttgcaggatttacgcagagtgatctgaatggaaagactaacccagaagtaatggtcgtggagtcagatttgagtgatgatggcaaagcatctttggtgagcgaggaagaggaagatgaagaagaagatgggctgcccctagaagaagcggtctagaagaagtagtatggtcttcgagtaccttccttccccnccanaactggccacnaacca

SEQ ID NO: 2951 - DNA, 557 bp, Homo sapiens
  misc_feature (539)..(539): "n" may be a, t, c, g, other or unknown
  misc_feature (550)..(550): "n" may be a, t, c, g, other or unknown
  misc_feature (555)..(555): "n" may be a, t, c, g, other or unknown
actgagggtggtggagcaggtagatggaaagaatctcttcccaaagacaagccgcagaacgcatcccttccccagcccctgtgttaggccgtgaggcatcttcctgccagcctgcaccagggctttcaggttttgttgcttagcacatccagggtcatgcacttcaggacaagccacctgatgcccctcggccccccagtcctgcagcctcgctggagctctccctgcagcaggaagggctgaggccaaccacaaaggggcttggggccacatcaagggatggcagaacgagagggaagtgcagggagcctggcccaaaaaaccaaccctgccgccgcctcctggaaggggcacacctcctgagctaagcccaggataccgcccaagcctcggggcctcccaaggtgtcccccatgccagaatgtgtggcctctgccagacccaggtggctccaggtggtttgactcccatttcctctccccttcccaggtctttcccaagcccagaccccctgtttttaattttcccctgttgggganaaaagaaaatntgccnca

SEQ ID NO: 2952 - DNA, 710 bp, Homo sapiens
  misc_feature (13)..(13): "n" may be a, t, c, g, other or unknown
  misc_feature (361)..(361): "n" may be a, t, c, g, other or unknown
  misc_feature (504)..(504): "n" may be a, t, c, g, other or unknown
  misc_feature (567)..(567): "n" may be a, t, c, g, other or unknown
  misc_feature (570)..(570): "n" may be a, t, c, g, other or unknown
  misc_feature (629)..(629): "n" may be a, t, c, g, other or unknown
  misc_feature (647)..(647): "n" may be a, t, c, g, other or unknown
  misc_feature (664)..(664): "n" may be a, t, c, g, other or unknown
  misc_feature (668)..(668): "n" may be a, t, c, g, other or unknown
  misc_feature (708)..(708): "n" may be a, t, c, g, other or unknown
ggaaagagtgganattggagaattggaagaggctagatgtcaatcaggctgatattgcaccattgatgacttcccttattggagttccctttcctcttaactcagtgggaatccttcctgtggattatcttaacaacactgatctcttcaaagcagagagcatgtttacaaatgcagtacagattcttgaacagttcaaggtgaaaatgactcagaagaaagaagttactttaccatttttgtttacaccatttaaactgctttctgattccaaacagttcaacattttaagaaaagcaagatcttatataaaacacagaaagtttgatgaagtggtctccctttgcaaggagctaattcntcttgcattgaaaggattgtcctattatcacacatatgacagattctttttgggcgtcaatgttgttattggttttgtgggatggatatcttatgcctctttattgatcatcaagtctcattccaaccttataaaaggtgttngtaaagaagtgaagaaaccaagccatctcctgccttgtagttttgtacctattggcattttantancattttttctgctgattccagcctgtccctggacatattatgtatatggtttgttgccnctgcccatatggtttgcngttctaaaaaaattcangttnttccggaacttgttgtttcagtgttgaactatcctctgancc

SEQ ID NO: 2953 - DNA, 519 bp, Homo sapiens
  misc_feature (209)..(209): "n" may be a, t, c, g, other or unknown
  misc_feature (232)..(232): "n" may be a, t, c, g, other or unknown
  misc_feature (279)..(279): "n" may be a, t, c, g, other or unknown
  misc_feature (299)..(299): "n" may be a, t, c, g, other or unknown
  misc_feature (332)..(332): "n" may be a, t, c, g, other or unknown
  misc_feature (406)..(406): "n" may be a, t, c, g, other or unknown
  misc_feature (449)..(449): "n" may be a, t, c, g, other or unknown
  misc_feature (455)..(455): "n" may be a, t, c, g, other or unknown
  misc_feature (458)..(458): "n" may be a, t, c, g, other or unknown
  misc_feature (482)..(482): "n" may be a, t, c, g, other or unknown
  misc_feature (506)..(506): "n" may be a, t, c, g, other or unknown
aggcgcagtttgccggccgccatcgcgcactggggctccgggcggctgggacggcctggggtagctgcgcagcaggtctgtgggttctggcaccacctgagcccactgggcatctggtcatccctggcacctctcctttggagccaccttgtccctggctagacagtcacattttccagtgccgttttggaaagatgttgcctttgganaaggcgtttgcctcccccaaganctccccagccccgccggatctgcccacgccggggtcagcagccggantccagcaggaagaacccganaccatccctgaaaagacccctgctgacctgganttctcccgcctgcgtttccgggaatttgtctaccaagaagctgccgggccccaccaaaccctggcccggctgcntgaactgtgccgccagtggctgatgcctgaagcgcgctccaangaacanatnctggaactgctggtgctggaacanttcctgggcatcctgcctgataangtccggcctgggt

SEQ ID NO: 2954 - DNA, 684 bp, Homo sapiens
  misc_feature (12)..(12): "n" may be a, t, c, g, other or unknown
  misc_feature (430)..(430): "n" may be a, t, c, g, other or unknown
  misc_feature (457)..(457): "n" may be a, t, c, g, other or unknown
  misc_feature (497)..(497): "n" may be a, t, c, g, other or unknown
  misc_feature (566)..(566): "n" may be a, t, c, g, other or unknown
  misc_feature (575)..(575): "n" may be a, t, c, g, other or unknown
  misc_feature (593)..(593): "n" may be a, t, c, g, other or unknown
  misc_feature (595)..(595): "n" may be a, t, c, g, other or unknown
  misc_feature (651)..(651): "n" may be a, t, c, g, other or unknown
  misc_feature (673)..(673): "n" may be a, t, c, g, other or unknown
  misc_feature (677)..(677): "n" may be a, t, c, g, other or unknown
gactgcgccacntctgaggcggctgtggccacgtctgaagcggctgtggccgcgtcggtgtccgcgtcgaggagccggggcagggcacgatggcggactgggctcgggctcagagcccgggcgctgtggaagagattctagaccgggagaacaagcgaatggctgacagcctggcctccaaagtcaccaggctcaaatcgctcgccctggacatcgatagggatgcagaggatcagaaccggtacctggatggcatggactcggatttcacaagcatgaccagcctgcttacagggagcgtgaagcgcttttccacaatggcaaggtccggacaagacaaccggaagcttctatgtggcatggccgtgggtctaattgtggccttcttcatcctctcctacttcttgtccagggcaaggacgtgagccantgggagctggtgtctgtgggtgccaanggcagccagggtcttccctgcctggtgttttgggctccanaagacttacctacaaaatactcctttgcaattataattgtgggtcaggaatcttcttcctgtgtggcangaagctgcngctgcctgtgacctgatnanctcatgttggctggtcccatgtgtgaaagggacctctcggggaaaccaaggcccancccctcccccctcccccaagtnctanaaaacca

SEQ ID NO: 2955 - DNA, 780 bp, Homo sapiens
  misc_feature (230)..(230): "n" may be a, t, c, g, other or unknown
  misc_feature (397)..(397): "n" may be a, t, c, g, other or unknown
  misc_feature (472)..(472): "n" may be a, t, c, g, other or unknown
  misc_feature (511)..(511): "n" may be a, t, c, g, other or unknown
  misc_feature (543)..(543): "n" may be a, t, c, g, other or unknown
  misc_feature (562)..(562): "n" may be a, t, c, g, other or unknown
  misc_feature (632)..(632): "n" may be a, t, c, g, other or unknown
  misc_feature (652)..(652): "n" may be a, t, c, g, other or unknown
  misc_feature (655)..(655): "n" may be a, t, c, g, other or unknown
  misc_feature (659)..(659): "n" may be a, t, c, g, other or unknown
  misc_feature (736)..(736): "n" may be a, t, c, g, other or unknown
  misc_feature (749)..(749): "n" may be a, t, c, g, other or unknown
  misc_feature (757)..(757): "n" may be a, t, c, g, other or unknown
  misc_feature (764)..(764): "n" may be a, t, c, g, other or unknown
  misc_feature (771)..(771): "n" may be a, t, c, g, other or unknown
tttagcccagcccatgaagcaagcttgggcaacagatgatgtagctcagatttatgataagtgtattacagaactggagcaacatctacatgccatcccaccaactttggccatgaaccctcaagctcaggctcttcgaagtctcttggaggttgtagttttatctcgaaactctcgggatgccatagctgctcttggattgctccaaaaggctgtagagggcttactanatgccacaagtggtgctgatgctgaccttctgctgcgctacagggaatgccacctcttggtcctaaaagctctgcaggatgggcgggcatatgggtctccatggtgcaacaaacagatcacaaggtgcctaattgaatgtcgagatgaatataaatataatgtggangctgtggagctgctaattcgcaatcatttggttaatatgcagcagtatgatcttcacctagcgcagtcaatgganaatggcttaaactacatggctgtggcatttgctatgcanttagtaaaaatcctgctggtggatgaaaagantgttgctcatgttactgangcagatctgttccacaccattgaaaccctcatgaagattaatgctcattccaaaagcaatgctccaaaangattgccccactgatggaantantgcnatccaactatgaagcaatgattgatcgtgctcatggaagcccaaactttatgaatgcattcctggggatctctccancccccaaaatttnattaaccncccaagncctgaanggaaaaaag

SEQ ID NO: 2956 - DNA, 659 bp, Homo sapiens
  misc_feature (639)..(639): "n" may be a, t, c, g, other or unknown
  misc_feature (643)..(643): "n" may be a, t, c, g, other or unknown
  misc_feature (657)..(657): "n" may be a, t, c, g, other or unknown
cttccccgcttgagttcaacaagaactccctcaccttctccattccaccaaagaacaaggcccggctcaagaagatcaaggatgacactggaccagtggccaaaaagccctcttctggcaaaaagggggctacgacacagaactctgagatttgctcaggccaggcccccactcccgaccagccagacacctccaagcgttcaaagtgaaggccgtgcagagctggtcactgaaatgagcctgataggataggctggagcataaaactctgcaagggctcctctatcctgtggtcctgagctgtgtgcccttctcagtctgaggggcctaacctagagcaggtttcatagtgagaaaattcaatgtagcagactactgaaaaactactgtgttgctcaggctttgtttgaggtcctgtatatacagcactgaaaagagagataaagtccctgcctgcatgcattctggcggaagagacaagcaagcaatgaacaaattagcagaaaacctaattttagtgaaaaatgctgtaaagaaaatagaaatgcgatagagttgctggcaggctaatgtaaataagtggtctgaaaaggtgtctctgaaccgaaggcatgtgagcttggggcctaaacaacttanaaanggaaaaaaaccccntt

SEQ ID NO: 2957 - DNA, 659 bp, Homo sapiens
  misc_feature (7)..(7): "n" may be a, t, c, g, other or unknown
  misc_feature (15)..(15): "n" may be a, t, c, g, other or unknown
  misc_feature (258)..(258): "n" may be a, t, c, g, other or unknown
  misc_feature (342)..(342): "n" may be a, t, c, g, other or unknown
  misc_feature (377)..(377): "n" may be a, t, c, g, other or unknown
  misc_feature (380)..(380): "n" may be a, t, c, g, other or unknown
  misc_feature (573)..(573): "n" may be a, t, c, g, other or unknown
  misc_feature (576)..(576): "n" may be a, t, c, g, other or unknown
  misc_feature (602)..(602): "n" may be a, t, c, g, other or unknown
  misc_feature (621)..(621): "n" may be a, t, c, g, other or unknown
  misc_feature (637)..(637): "n" may be a, t, c, g, other or unknown
ttttgtnttctgaanattcaacaaagctctttgtagcatcaaatcaaggagctctgcatattgttcagctgtcaggaggaagcttcaagcacctgcatgctttccagcctcagtcaggaacagtggaggccatgtgtcttttggcagtcagtccagatgggaattggctagctgcatcaggtaccagtgctggagtccatgtctacaacgtaaaacagctaaagcttcactgcacggtgcctgcttacaatttcccantgactgctatggctattgcccccaataccaacaaccttgtcatcgctcattcggaccagcaggtatttgagtacagcatcccanacaaacagtatacagattggagccggactgtccanaancagggctttcaccacctttggctccaaagggatactcctatcacacacatcagttttcatcccaagagaccgatgcacatccttctccatgatgcctacatgttctgcatcattgacaagtcattggtgagttcttcactgctacctcccaaatcttcttctgaatcttaaagttctaaaagcaacaagtacnatnaggttagaagacagagactcagaatnaaggttgctagtaaatcanaatacaggttggctantactttcttggaagaaaagggc

SEQ ID NO: 2958 - DNA, 593 bp, Homo sapiens
  misc_feature (415)..(415): "n" may be a, t, c, g, other or unknown
  misc_feature (507)..(507): "n" may be a, t, c, g, other or unknown
  misc_feature (526)..(526): "n" may be a, t, c, g, other or unknown
  misc_feature (564)..(564): "n" may be a, t, c, g, other or unknown
  misc_feature (586)..(587): "n" may be a, t, c, g, other or unknown
tcaaatgtatctttaccaggacccggcctctcagttccaagacccctacagcctgaatatgtagcccttcccagtgaagagtcacatgtccaccaggaaccaagtaagagaattccttcttggagtggtcgcccaatctggatggaaaagatggtaatgtgcagagtgaaagttccacacacatttgctgttcactcttacacccgtcccacgatatgtcagtactgcaagcggttactgaaaggcctctttcgccaaggaatgcagtgtaaagattgcaaattcaactgccataaacgctgtgcatcaaaagtaccaagagactgccttggagaggttactttcaatggagaaccttccagtctgggaacagatacagatataccaatggatattgacaataatgacataaatngtgatagtagtcggggtttggatgacacagaagagccatcacccccagaagataagatgttcttcttggatccatctgatctcgatgtgganagagatgaagaagccgttnaaacaatcagtccatcaacaagcaataatattccgctnatgagggttgttcaatccatcnngcacac

SEQ ID NO: 2959 - DNA, 510 bp, Homo sapiens
  misc_feature (443)..(443): "n" may be a, t, c, g, other or unknown
  misc_feature (447)..(447): "n" may be a, t, c, g, other or unknown
  misc_feature (509)..(509): "n" may be a, t, c, g, other or unknown
tgagccctgcagccagccctctggggacagatccctccaaaccaccagtcccccagtcgtggcccctggaaatgagaacggcctggcagtgcctgtgcccctgcggaagtcccgacccgtgtcaatggatgccagaattcaggtagcccaggagaagcaagttgctgagcagggtggggacctcagcccagcagccaacagatctcaaaaggccagccagagccggcccaacagcagcgccctggagaccttgggtggggagaagctggccaatggcagcctggagccacctgcccaggcagctccagggccttccaagagggactcggactgcagcagcctctgcacctctgagagcatggactatggtaccaatctctccactgacctgtcgctgaacaaagagatgggctctctgtccatcaaggacccgaaactgttcnaaanaaccctcaagcggacacgcaaatttgtggtggatggtgtggaggtgaacatcaccacctccna

SEQ ID NO: 2960 - DNA, 626 bp, Homo sapiens
  misc_feature (406)..(406): "n" may be a, t, c, g, other or unknown
  misc_feature (442)..(442): "n" may be a, t, c, g, other or unknown
  misc_feature (556)..(556): "n" may be a, t, c, g, other or unknown
  misc_feature (602)..(602): "n" may be a, t, c, g, other or unknown
  misc_feature (614)..(614): "n" may be a, t, c, g, other or unknown
  misc_feature (616)..(616): "n" may be a, t, c, g, other or unknown
  misc_feature (620)..(620): "n" may be a, t, c, g, other or unknown
gaaagaaccaaagcaaacattaaaagaagttcagactgttacctctattcaaaaagcaagaaaagtatattggtttgagaaatttctgtggctcattagctcagagaactatctaattataggtggacgagatcagcaacagaatgaaataattgtgaaaagatacttgacaccaggagacatttatgtacatgctgatcttcatggagctactagctgtgtaattaagaatccaacaggagaacccatccccccacggaccttgactgaagctggcacaatggcactttgctacagtgctgcttgggatgcacgagttatcactagtgcttggtgggtgtaccatcatcaggtatctaaaacagcaccaactggagaatatttgacaacaggaagcttcatgatnagaggaaaaaagaattttcttcctccctcatatctnatgatggggtttagcttcctttttaaggtagatgagtcttgtgtttggagacatcagggtgaacgaaaagtcagagtacaggatgaagacatggagacactggcaagttgtacnagtgaactcatatcagaagaaatggaacaattagatggaggtgacncgagcagtgatnangatnaagaaa

SEQ ID NO: 2961 - DNA, 516 bp, Homo sapiens
  misc_feature (6)..(6): "n" may be a, t, c, g, other or unknown
  misc_feature (438)..(438): "n" may be a, t, c, g, other or unknown
  misc_feature (463)..(463): "n" may be a, t, c, g, other or unknown
  misc_feature (478)..(478): "n" may be a, t, c, g, other or unknown
  misc_feature (481)..(481): "n" may be a, t, c, g, other or unknown
  misc_feature (490)..(490): "n" may be a, t, c, g, other or unknown
tagacnaaggaaaatgcaaaaagcgaggcgacggcttaaagatggagaacgacccccagggaggcggagtctgaaatggccctggatgctgagttcctggacgtgtacaagaactgcaacggggtggtcatgatgttcgacattaccaagcagtggaccttcaattacattctccgggagcttccaaaagtgcccacccacgtgccagtgtgcgtgctgggaaactaccgggacatgggcgagcaccgagtcatcctgccggacgacgtgcgtgacttcatcgacaacctggacagacctccaggttcctcctacttccgctatgctgagtcttccatgaagaacagcttcggcctaaagtaccttcataagttcttcaatatcccatttttgcagcttcagagggagacgctgttgcggcagctggagacgaaccanctggacatggacgccacgctgggangagctgtcggtgcancangagacggangaccagaactacggcatcttcctgga

SEQ ID NO: 2962 - DNA, 581 bp, Homo sapiens
  misc_feature (269)..(269): "n" may be a, t, c, g, other or unknown
  misc_feature (483)..(483): "n" may be a, t, c, g, other or unknown
  misc_feature (534)..(534): "n" may be a, t, c, g, other or unknown
  misc_feature (546)..(546): "n" may be a, t, c, g, other or unknown
  misc_feature (564)..(564): "n" may be a, t, c, g, other or unknown
  misc_feature (573)..(573): "n" may be a, t, c, g, other or unknown
agtgcggcggcgccgcctctgctctcagtgccccggatcggaggccgtccatcgcccctcgggccgacgccatgaagatcaaagatgccaagaaaccctctttcccatggtttggcatggacattgggggaactctagtaaagctctcgtactttgaacctattgatatcacagcagaggaagagcaagaagaagttgagagtttaaaaagtattcggaaatatttgacttctaacgtggcatatggatccaccggcattcgggatgtncaccttgaactgaaagatttaacactttttggccgaagagggaacttgcactttatcaggtttccaacccaggacctgcctacttttatccaaatgggaagagataaaaacttctcaacattgcagacggtgctatgtgctacaggaggtggtgcttacaagtttgaaaaagattttcgcacaattggaaacctccacctgcacaaactggatnaacttgactgccttgtaaagggcttgctgtatatagactctgtcagtttcnatggacaagccnagtgctattattttgctnatgcctcanaacctgaa

SEQ ID NO: 2963 - DNA, 740 bp, Homo sapiens
  misc_feature (150)..(150): "n" may be a, t, c, g, other or unknown
  misc_feature (152)..(152): "n" may be a, t, c, g, other or unknown
  misc_feature (191)..(191): "n" may be a, t, c, g, other or unknown
  misc_feature (354)..(354): "n" may be a, t, c, g, other or unknown
  misc_feature (489)..(489): "n" may be a, t, c, g, other or unknown
  misc_feature (505)..(505): "n" may be a, t, c, g, other or unknown
  misc_feature (507)..(507): "n" may be a, t, c, g, other or unknown
  misc_feature (542)..(542): "n" may be a, t, c, g, other or unknown
  misc_feature (613)..(613): "n" may be a, t, c, g, other or unknown
  misc_feature (651)..(651): "n" may be a, t, c, g, other or unknown
  misc_feature (673)..(673): "n" may be a, t, c, g, other or unknown
  misc_feature (699)..(699): "n" may be a, t, c, g, other or unknown
  misc_feature (715)..(715): "n" may be a, t, c, g, other or unknown
  misc_feature (722)..(722): "n" may be a, t, c, g, other or unknown
agccctcccttgcacgttccggctcctcctctatcttcacgcccacgctaggccctgagcccacctctacgtctcgccgccaactccacatcctggctcctatctctgccttccaggcatctcccagctgcacgctcgggcccggctcananccctaagccctgcctcccggtcctggccgggtttcccanaactgcacggcgcctctccgcccaggcccaagcgcgagcccctcctccacacccgagtcccagccccgcgtcccggattcggacccgcctgcctggggcggtgctgcaccaggtgcgggtgtggcaggcgtctcggaacgccaggtgcagcttcctgatcaanatggtcgccgcctgccgctcggtagccgggctcctgccacgccgccgccgctgctttcccgcccgggccccgctgctgcgcgtcgccctctgcctcctgtgctggaccccggcggctgtgcgcgcggtccctganctcgggctctggttananacagtcaacgacaaatcaggacctttgatatttangaaaactatgtttaactctacagatatcaagttatctgttaagtcattccattgttctgggcctgttaaantttacatagtgtggcatttgaaatatcatacctgttanaatgaacattcttatctggaanaaatgttccaaaaaacataaacttanttgtttgaagaaaaantttgttnattatttgaaaaaatgaa

SEQ ID NO: 2964 - DNA, 464 bp, Homo sapiens
  misc_feature (433)..(433): "n" may be a, t, c, g, other or unknown
  misc_feature (459)..(459): "n" may be a, t, c, g, other or unknown
  misc_feature (462)..(462): "n" may be a, t, c, g, other or unknown
ggcttcaggtttaaaggcgcgagcgccacccacgcaggcacaagggctcctagtcgttttatttttagcgtaaggtcttcctctttaacaaggaagtaaaaaaaaaagttgtgcaataaatattaatcgtccttatatgtactcgggaacgttcgtcctttaggttttttcctggcgcatgggcgccgccaatcatttcggggcttattttggttctaaagcccggggcagccaggcctccctgcctggcctcggcggggacgcgggacctggggccccggaccgggcctaaccgccctggccggtccccactgatggtggcggtcggtcctgatcgtcctgatggcagcgaccaagctggactcgggctgtgcacgggcgaagggacaaggcggggtgaccccggaaaacgcctggaaaacgcgtgcttcanaaagcgtgggcaccctgtcccctttncanat

SEQ ID NO: 2965 - DNA, 735 bp, Homo sapiens
  misc_feature (369)..(369): "n" may be a, t, c, g, other or unknown
  misc_feature (386)..(386): "n" may be a, t, c, g, other or unknown
  misc_feature (562)..(562): "n" may be a, t, c, g, other or unknown
  misc_feature (631)..(631): "n" may be a, t, c, g, other or unknown
  misc_feature (640)..(640): "n" may be a, t, c, g, other or unknown
  misc_feature (642)..(642): "n" may be a, t, c, g, other or unknown
  misc_feature (655)..(655): "n" may be a, t, c, g, other or unknown
  misc_feature (729)..(729): "n" may be a, t, c, g, other or unknown
  misc_feature (734)..(734): "n" may be a, t, c, g, other or unknown
ttttttaagcaacatcatgaattttatctactccagaagtctctacaatagaaaaaaaagtgcagtgcttctaggatataaaattcacattacttttgaaagccaagaagttggtcttatccagttaggtcttcttatgaagagttttcatccaggggatataactccttggtcagtgattttattgtttacatcctgagactgttctacagtttctttgactcctggcatttgccttaaggacctatagcaagctgtttctaggatcagaaactcaagagaggcatttctctgctttttcactaaaggtcagttgttttaatttgaaacctgaaatgcctctttagcaaaagcctgtggtatggggtnaagccatgtaagaaganaatagtctcagtcacatatgaagaggaaaatttgcagctgccagtgctttccttgtggccctgccaaccagctcttccaggacgaactcagtccagcatggttttgatgtaaccatccatgcttttatttttgttaagtcttttgtgactgggacagttaattttagtagctgaanaacgtctagttgtttgcttgatatttgtgaacatttactgcatggatcacaaaacaatataccctggtntttcttacncnccacttatatgcncaagggagtaaatgtgttactaaaattcgggtagtgcattttgtccctgaatctgaacctggaaaaatgttacnttaant

SEQ ID NO: 2966 - DNA, 682 bp, Homo sapiens
  misc_feature (404)..(404): "n" may be a, t, c, g, other or unknown
  misc_feature (585)..(585): "n" may be a, t, c, g, other or unknown
  misc_feature (627)..(627): "n" may be a, t, c, g, other or unknown
  misc_feature (656)..(656): "n" may be a, t, c, g, other or unknown
  misc_feature (665)..(665): "n" may be a, t, c, g, other or unknown
  misc_feature (670)..(670): "n" may be a, t, c, g, other or unknown
gggaattaccgactctaagtgaaggtcactgacacagagaagcagtatgtgtctggggcttccaggacctgcaggcccactagcgtgcacttaccggaatggcatacacaggacctgatcatgaggaagaccaggtttccagtgtaaactactcttgttcccaccacctctggagcactcagggagccccatacagtacttacaatgtctttaatggacttgattctgtttaattttttgttttatattaggcacactgtattaattttccaaaatgttataccacactatgttcttggtcctgacctattgctctggaggaaagagttgtataagaacgtggctcatgtgaacttttgctagcttcatttgaggacctgagaatcatggggaaagggaaggtnatgttttcattgaaatcatcacagtgatttttattccctgggaacacagcgtgtactaaaaatacatgagaaaatagcatgtatatgaaagctattctcaaaagtcacctgagctcaccatcttcatagccaaccctaccagttataaagatggcagctctatcacttgattaagtgggangtggtcaaatattctgggtgcctcattttcttcatctgtganatgggaactgttatgcctggcttactaanaatcttgtngaganactgaaaaattt

SEQ ID NO: 2967 - DNA, 640 bp, Homo sapiens
  misc_feature (457)..(457): "n" may be a, t, c, g, other or unknown
  misc_feature (466)..(466): "n" may be a, t, c, g, other or unknown
  misc_feature (530)..(531): "n" may be a, t, c, g, other or unknown
  misc_feature (544)..(544): "n" may be a, t, c, g, other or unknown
  misc_feature (583)..(583): "n" may be a, t, c, g, other or unknown
  misc_feature (627)..(627): "n" may be a, t, c, g, other or unknown
  misc_feature (636)..(637): "n" may be a, t, c, g, other or unknown
gatgtcatcttaaaaatctaaaatataacatggcacataaagccaaaaaaaaattttttttttttgagacggaatcttgctttgtcgcccaggctatagtgcagtggcacgatctgagctcactgcaaccttaacctcctgggttcgggcgattctcctgtctcagcctcccgagtagctggtacgacaggtgcatgccaccatgcctggctaatttttgtgtttttactagagacggcatttcactatgttggtcaggctggtctcaaactcctgacctcaggtgatccacctacctcagcctcctaaagtgctgggattacaggcatgagccactgtgcccggccaaagcaaaaaattttaagaaacacccgattcagtaacaatagctcttaatttagtttatatcattaaatgttttgatcttcatccttgttttaggaaacacaaaaaagcntgcacaaanaggcttataatttttatataatttaaaatatttcttcatttaaacagaaatgttctactctccnncttttcatgtgtncatacttaccatttctgtgggtgtgtgcataaaatgttngcatcatttgatcaattttctgttgttgccttgttttatatcantcttcctcnntta

SEQ ID NO: 2968 - DNA, 604 bp, Homo sapiens
  misc_feature (127)..(127): "n" may be a, t, c, g, other or unknown
  misc_feature (210)..(210): "n" may be a, t, c, g, other or unknown
  misc_feature (398)..(398): "n" may be a, t, c, g, other or unknown
  misc_feature (477)..(477): "n" may be a, t, c, g, other or unknown
  misc_feature (501)..(501): "n" may be a, t, c, g, other or unknown
  misc_feature (533)..(534): "n" may be a, t, c, g, other or unknown
  misc_feature (578)..(578): "n" may be a, t, c, g, other or unknown
  misc_feature (599)..(599): "n" may be a, t, c, g, other or unknown
  misc_feature (602)..(602): "n" may be a, t, c, g, other or unknown
gcaagatttgttgcaatgaaatatattaaatccaattctaaaaattcttctcatcattttgtagagacatttaacataaaaccacaggacttgcacaaatgcattgccagatgccatttcgcacgtngcagatttttacaaattttgcaaagacaagattgtgttacccaaaaatatcaggaaaatgcacaattatcagttaagcaggtncgaaacttgagatctgaatgtataggattggaaaaccaaataaagaaaatggaaccctatgatgaccacagtaatatggaagaaaaaattcaaaaggttcggtctttgtgggcttcagtgaatgaaacgctcatgtttttggaaaaagagagagaagttgttagttcggtccttagtcttgttaaccnatatgctttagatggaactaatgttgctattaatattccaaggctcttacttgacaaaattgagaaacaaatgtttcanttgcacataggaaatgtttatgangctggaaaactgaacctcttaacagttattcnnttattaaatgaaatcttgaaagtgatgaaatatgaacgttgtcngctgatctagccagattgacngtnga

SEQ ID NO: 2969 - DNA, 618 bp, Homo sapiens
  misc_feature (310)..(310): "n" may be a, t, c, g, other or unknown
  misc_feature (494)..(494): "n" may be a, t, c, g, other or unknown
  misc_feature (507)..(507): "n" may be a, t, c, g, other or unknown
  misc_feature (562)..(562): "n" may be a, t, c, g, other or unknown
  misc_feature (599)..(599): "n" may be a, t, c, g, other or unknown
  misc_feature (604)..(604): "n" may be a, t, c, g, other or unknown
  misc_feature (609)..(609): "n" may be a, t, c, g, other or unknown
  misc_feature (616)..(616): "n" may be a, t, c, g, other or unknown
cagacgctctgtactagaaaagaatcttataaaagtaactgttgcaccatttaatccaacagtttgtgatgctctgcttgataaggacgagactgattcgtccaaagatactgaaaaactctcttcccttggagaagagatgagagaagatggtcttagcccaaatgaaagcaaactttgtactgaatctgaagggatcagccccaataactctgcctggaatgggccccagctctcttcttcaaacaataactttcaacagactgtctctgataaaaatatgcctgacagtgagaaccctacgtctgtnttctctcggatctcagaccattcagagactcctaatatggagttatcctgcagaaatggtggttcacacaagtcaagttgtgaaatgagatctctggttgtttccacctcatcaaacaaacaggatgttcttaacaaggattctgggaagatgaaaggccatgagagaagactaggccaagtcnttcctgttctacnaactaagaccaggactaatgttccgacgttttcacagtccaatctagaacagcanaagcagctttatctcagggagtctcattgctcatatngaaanacccngaagacnct

SEQ ID NO: 2970 - DNA, 489 bp, Homo sapiens
  misc_feature (206)..(206): "n" may be a, t, c, g, other or unknown
  misc_feature (321)..(321): "n" may be a, t, c, g, other or unknown
  misc_feature (324)..(324): "n" may be a, t, c, g, other or unknown
  misc_feature (334)..(334): "n" may be a, t, c, g, other or unknown
  misc_feature (433)..(433): "n" may be a, t, c, g, other or unknown
  misc_feature (447)..(447): "n" may be a, t, c, g, other or unknown
  misc_feature (484)..(484): "n" may be a, t, c, g, other or unknown
tatgaactctctggagattctgatctagacctgcttggtgattgtagaaatcccagactggatttggaggattcttatactttaagaggtagttacaccaggaaaaaagatgttcccacagatggctatgagtcgtcgttgaacttccacaacaacaaccaagaggactggggctgctctagctgggttccaggcatggagacgancctccctcccgggcactggactgctgcggtaaagaaagaagagaagtgtgtgccgccttacgtccaaatccgagatctccacgggatcctcaggacttacgccaacttctctatnacnaaagaactcnaagataccatgagaacttcacacggcctgaggaggcacccgagtttcagtgcaaactgtggcctgcccagctcctggacaagcacttggcaggtggcanacgacctctcccanaacactttagacctggagtatctgcgttttgcacatnaacta

SEQ ID NO: 2971 - DNA, 571 bp, Homo sapiens
  misc_feature (367)..(367): "n" may be a, t, c, g, other or unknown
  misc_feature (410)..(410): "n" may be a, t, c, g, other or unknown
  misc_feature (492)..(492): "n" may be a, t, c, g, other or unknown
  misc_feature (500)..(500): "n" may be a, t, c, g, other or unknown
  misc_feature (509)..(509): "n" may be a, t, c, g, other or unknown
  misc_feature (519)..(519): "n" may be a, t, c, g, other or unknown
  misc_feature (569)..(569): "n" may be a, t, c, g, other or unknown
ggatattgctgtccatatgacttacaatactggtcagacagttgtggcatttcatagtccttattggatggtcaataaaactggccgcatgttacagtacaaagcagacggaattcatcgaaagcatccacctaattataaaaagccagttctcttttcttttcagccaaatcacttttttaataacaataaggttcaacttatggtaactgatagtgagttgtccaatcagttttcaattgatactgttggtagtcatgaagctgttaaatgtaaaggcctgaaaatggactatcaagttggtgtcactatagacctgagcagttttaacattactagaattgtgacatttacccctttttatatnattaaaaacaaaagcaaataccatatatcagtggctgaagaangaaatgataaatggctctctcttgatttggagcagtgtatccccttttggcctgagtatgcttctagtaaacttcttattcnagtcgaanggagtgaanatcctccccnaaggatatattttaacaagcaggaaaattgtattctattgcgtctaaatnac

SEQ ID NO: 2972 - DNA, 493 bp, Homo sapiens
  misc_feature (434)..(434): "n" may be a, t, c, g, other or unknown
  misc_feature (437)..(437): "n" may be a, t, c, g, other or unknown
  misc_feature (450)..(450): "n" may be a, t, c, g, other or unknown
ttcaagacttcccagctgtgaagttttgggggcaggaatgaagatggaccagcaagctgtctgtgagctgttgaaagtggagatgcctacaagactgccagaccggtcagtggcctggccttgccctgacagacatctccgggagaaaccttccttagaaaaggtcactttccagattggaagctttgcatctccagagtctgactttgaaagccgcatgaaaaaaatggaggaacgggtgaaggcctgtggcccctccttggaggccagtgaggctgctgatgtggctcaggacccgcaggtttctaggagcccttttaaacctggctttcaggagaatgtttgctgtcctcagaatcggctttcagagggggatgaaggcgagtctgacaagggttttgcagaagacagaagcagcagaaacgacatggcancanatattgctgggcngctcagccacgctgctgacttgggcacagcctcccacggtgca

SEQ ID NO: 2973 - DNA, 754 bp, Homo sapiens
  misc_feature (364)..(364): "n" may be a, t, c, g, other or unknown
  misc_feature (434)..(434): "n" may be a, t, c, g, other or unknown
  misc_feature (532)..(532): "n" may be a, t, c, g, other or unknown
  misc_feature (595)..(595): "n" may be a, t, c, g, other or unknown
  misc_feature (601)..(601): "n" may be a, t, c, g, other or unknown
  misc_feature (616)..(616): "n" may be a, t, c, g, other or unknown
  misc_feature (621)..(621): "n" may be a, t, c, g, other or unknown
  misc_feature (694)..(694): "n" may be a, t, c, g, other or unknown
  misc_feature (726)..(726): "n" may be a, t, c, g, other or unknown
  misc_feature (728)..(728): "n" may be a, t, c, g, other or unknown
  misc_feature (744)..(744): "n" may be a, t, c, g, other or unknown
  misc_feature (754)..(754): "n" may be a, t, c, g, other or unknown
cacagctaacatggcggcgccctgtgtgtcctacggcggagcagtttcgtaccggcttcttctctggggtaggggtagcctcgcccggaagcaaggcctctggaaaaccgcggcccctgagttgcaaacaaatgtcagatcccagatattaaggctaagacatactgcatttgtaataccaaagaaaaacgttcctacctcaaaacgtgaaacttacacagaggattttattaaaaagcagattgaagagttcaacataggaaagagacatttagccaacatgatgggagaagatccagaaactttcactcaagaagatattgacagagctattgcttaccttttcccaagtggtttgtttganaaacgagccaggccagtaatgaagcatcctgaacagatttttccaagacaaagagcaatccagtgggganaagatggccgtccatttcactatctcttctatactggcaaacagtcatactattcattaatgattaccagctttacttcccgatcacacaggacaganaacagctgatgttccctttccactttgttgaccggctgggaaagcacgacgtgacctgcacantctcangggggcgggaagtcncccangctggaacaatacgactggcaatggccaaagccttgtgcactttgtccccccaagacaaagtccaattggatnaaaacaagctgggactacttactactgatccncntttttaagggaacggnaaaaaacccn

SEQ ID NO: 2974 - DNA, 577 bp, Homo sapiens
  misc_feature (529)..(529): "n" may be a, t, c, g, other or unknown
  misc_feature (532)..(532): "n" may be a, t, c, g, other or unknown
  misc_feature (567)..(568): "n" may be a, t, c, g, other or unknown
  misc_feature (575)..(575): "n" may be a, t, c, g, other or unknown
ggagaagttagagtccttagaaaaaaatatggccattcttgatccaccagatgctgaccacttatacagtgcaaaggtaatgctgatggctagccctagtatggaagatttatatcataagtcatgtgctcttgctgaggacccacaagaacttcgagatggattccaacatcctgctagacttgttaagtttttagtgggcatgaaaggcaaggatgaagctatggccattggaggccactggtctccttcgttggatggaccagacccagaaaaagatccctctgtgttgattaagactgctattcgttgttgtaaggctctgacaggcattgatctaagtgtgtgcacacaatggtaccgttttgcagagattcgctaccatcgccctgaggagacccacaaggggcgtacagttccagctcatgtggagacagtggttttatttttcccggatgtttggcattgccttcccacccgctcagagtgggaaaccctctcccgaggatacaagcagcagctggtcganaancttcagggtgaacgcaaggaggctgatggagaacnngatgaanaa

SEQ ID NO: 2975 - DNA, 903 bp, Homo sapiens
  misc_feature (297)..(297): "n" may be a, t, c, g, other or unknown
  misc_feature (506)..(506): "n" may be a, t, c, g, other or unknown
  misc_feature (582)..(582): "n" may be a, t, c, g, other or unknown
  misc_feature (676)..(676): "n" may be a, t, c, g, other or unknown
  misc_feature (691)..(691): "n" may be a, t, c, g, other or unknown
  misc_feature (723)..(723): "n" may be a, t, c, g, other or unknown
  misc_feature (752)..(752): "n" may be a, t, c, g, other or unknown
  misc_feature (768)..(768): "n" may be a, t, c, g, other or unknown
  misc_feature (811)..(811): "n" may be a, t, c, g, other or unknown
  misc_feature (836)..(836): "n" may be a, t, c, g, other or unknown
  misc_feature (865)..(865): "n" may be a, t, c, g, other or unknown
  misc_feature (885)..(885): "n" may be a, t, c, g, other or unknown
  misc_feature (892)..(892): "n" may be a, t, c, g, other or unknown
tatttctcagaaagattgccaggaagatgatacaacagtggaaggagcagaatttcctgtataaagagacccaggaaactgaaaaaaagctcctgtttatttcagagcccatcccccacccttcaaatgaattgagagggcttaatgagaaaatgagtaataaatgttccatgttaagtacagctgaagatgacataagacagaattttacacagctacctctacataaaaacaaacaggaatgcattcttgacatttccgaacacacattaagtgaaaatgacttagaagaactangggtagatcactataaatgtaacatacaggcatctgtacatgtttctgatttcagtacagataatagtggatctcaaccaaaacagaagtcagatactgtgctttttccagcaaaggatctcaaggaaaaggaccttcattcaatatttactcatgattctggtctgataacaataaacagttcacaagagcacctaactgttcaggcnaaggctccattccatactcctcctgaggaacccaatgaatgtgacttcaagaatatggatagtttaccctctggtnaaatacatcgaaaagtgaaaataatattagggacgaaatagaaaagaaaatctggaaccaaatgctgaatttgataaaagaactgaatttattnccccagaagaaaacngaatttgttttcaccggtacagtctttactanactgtttcagactagtggaaaaaaaatcngaatttttgggtttcncaagctacccagaaaaagaattggtatatgccatgtttttaanatattggggaaaaagaaaaattccnaataatctggttaacagcgttttttcccngtcccttccaacttcttccntttactngggcttttaaa

SEQ ID NO: 2976 - DNA, 746 bp, Homo sapiens
  misc_feature (581)..(581): "n" may be a, t, c, g, other or unknown
  misc_feature (617)..(617): "n" may be a, t, c, g, other or unknown
  misc_feature (663)..(663): "n" may be a, t, c, g, other or unknown
  misc_feature (672)..(672): "n" may be a, t, c, g, other or unknown
  misc_feature (728)..(728): "n" may be a, t, c, g, other or unknown
  misc_feature (739)..(739): "n" may be a, t, c, g, other or unknown
  misc_feature (743)..(743): "n" may be a, t, c, g, other or unknown
ggatgccgagcccaggccggttccggcgaagttaaaccctcggagctggcctcggactgctggggcgttaccccttcggccacccccgctgaccatggcagtgtttcatgacgaggtggaaatcgaggacttccaatatgacgaggactcggagacgtatttctatccctgcccatgtggagataacttctccatcaccaaggatcagtttgtgtgtggagaaacagtcccagccccttcagccaacaaagaattagttaaatgctgaagaagccttcaggaatccaaatcctgaacatttggaatgagcccagatagaaatatcgaatgcaaagctactggcttcacagagacaaccatttatgatttgctgttctgtaagagtgtggattctttctatcaactgctgatatcatcttcaggaagcaagtccataacatgacatatctggattttgtgcttagaaccttaaattggaagcattcttaattatgcatctaaatttaaaagaagataatttcaaaacagtgctttctttcccttggtttcatcattttcatatcttaaaccaaattacttcngtatctgacaacagcatcatctacctcagtcattangatttcttaataaaaaagaaattgtatttttgacttggttattaanattattaanattagcccttcctttgaaatatgacatcagctttgctgttctaaatttaaaattanttgcttcatcngtancac

SEQ ID NO: 2977 - DNA, 474 bp, Homo sapiens
  misc_feature (414)..(414): "n" may be a, t, c, g, other or unknown
  misc_feature (442)..(442): "n" may be a, t, c, g, other or unknown
  misc_feature (467)..(467): "n" may be a, t, c, g, other or unknown
atatatagggtcttatatgtttcttaataaattgatcccattactttatagtcacagctcctattagaagttttaatgaagactctccatgagcttaggcttcaaattacttgttttggaaaaggtcatcttgtcctttataaactgtaaattcatatattatttagctttaatatgcaaatacaatatccttgagttcatcctattaatttagaaactcccaggaggtaagatgggtggttggagcgcattctttggttattttcattagcattaagtccttattctttataggtggatttaattcttgaaaatattcaaaagtaattcagagtctaggtgttggggatggagagaaaggaggaacagagaggaaaaaaattagcatttgttgagtgttgacgatttgtagancattttgacaagcacttaatatacatcntcattcattttgatcctcttaattnccttgca

SEQ ID NO: 2978 - DNA, 715 bp, Homo sapiens
  misc_feature (499)..(499): "n" may be a, t, c, g, other or unknown
  misc_feature (536)..(536): "n" may be a, t, c, g, other or unknown
  misc_feature (622)..(622): "n" may be a, t, c, g, other or unknown
  misc_feature (653)..(653): "n" may be a, t, c, g, other or unknown
  misc_feature (682)..(682): "n" may be a, t, c, g, other or unknown
  misc_feature (691)..(691): "n" may be a, t, c, g, other or unknown
  misc_feature (695)..(695): "n" may be a, t, c, g, other or unknown
gcttccggctttcgctcgcttccatatccgctcctctagtcgccctccgctggccccgccttcgtccccggaagattgggtcctctggcgagccactgtttgccgtttgatcgggcaccaaataaagtttctttattcaaaagcactttttttttaaagccacaccacccccattctcagctcctccttcgcggcggtaccgcctctgtttctgcggcgattgaacagccgagctttgcggccgggatcgcggaaagtgatggctgtcgtcccggcgtctctctcaggacaggacgtgggatcatttgcatatcttacaattaaagacagaataccacagatcttaactaaggttattgatacattgcatcgacataaaagtgaattttttgagaaacacggagaggaaggcgtggaagctgaaaagaaagctatctctctcctttctaaattacggaatgaattgcaaacagataaaccatttatccccttggttganaaatttgttgatactgatatatggaatcagtacctanaatatcaacagaatcttttaaatgaaagtgatggaaaatcaagatggttctactcaccgtggttgttggtaaaatgttacatgttntcgaaaaattcatgaaagcaattatccagantccaccaatcgaatactttgatgtttttnaagaatccnaaanaaccaaattctatgggtcca

SEQ ID NO: 2979 - DNA, 671 bp, Homo sapiens
  misc_feature (243)..(243): "n" may be a, t, c, g, other or unknown
  misc_feature (436)..(436): "n" may be a, t, c, g, other or unknown
  misc_feature (468)..(468): "n" may be a, t, c, g, other or unknown
  misc_feature (573)..(573): "n" may be a, t, c, g, other or unknown
  misc_feature (614)..(614): "n" may be a, t, c, g, other or unknown
  misc_feature (634)..(634): "n" may be a, t, c, g, other or unknown
  misc_feature (649)..(649): "n" may be a, t, c, g, other or unknown
  misc_feature (664)..(664): "n" may be a, t, c, g, other or unknown
ggtggctggttctgcgccggatccgggagaggggcgggcgccattgtgcttcgctgccgactgcatttcctcagtcacgggcctagaactccaaggagaaaggcggcgaaaaatctttaagaatggagtctaaaccttcaaggattccaagaagaatttctgttcaaccttccagctccttaagtgctaggatgatgtctggaagcagaggaagtagtttaaatgatacctatcactcaaganactcttcatttagattggattctgaatatcagtctacatcagcatcagcatctgcgtcaccatttcaatctgcatggtatagtgaatctgaaataactcagggagcacgctcaagatcgcagaaccagcaacgggatcatgattcaaaaagacctaaactttcctgtacaaactgtactacctcagctggganaaatgttggaaatggtttaaacacattatcanattcatcttggaggcatagtcaagttcctagatcttcatcaatggtacttggatcatttggaacagacttaatgagagagaagagagatttggagagaagaacanattcctctattagtaatcttatggattatagtcccccgaanttggtgatttcacaacttcntccttatgtttcaanacagaattcccttcntattccc

SEQ ID NO: 2980 - DNA, 508 bp, Homo sapiens
  misc_feature (265)..(265): "n" may be a, t, c, g, other or unknown
  misc_feature (434)..(434): "n" may be a, t, c, g, other or unknown
  misc_feature (458)..(458): "n" may be a, t, c, g, other or unknown
  misc_feature (461)..(461): "n" may be a, t, c, g, other or unknown
cctttgcgcggcacctggcggtggcgggagccgttgggctgagtcgggatcggggacgtcgcccgagagcggggacgaggaggtgtcgggcgcgggttcgagcccggtgtcgggcggcgtgaacttgttcgccaacgacggcagcttcctggagctgttcaagcggaagatggaggaggagcagcggcagcggcaggaggagccgcccccgggtccgcagcgacccgaccagtcggccgccgccgctggccccggggatccgaanaggaagggcggtccgggctccacacttagcttcgtgggcaaacgcagaggcgggaacaaactagccctcaagacgggaatagtagccaagaagcagaagacggaggatgaggtattaacaagtaaaggtgacgcgtgggccaagtacatggcagaagtgaaaaagtacnaagctcaccagtgcggtgacgatnatnaaactcggcccctggtgaaatgacgcccctcccccacctgcccatgg

SEQ ID NO: 2981 - DNA, 464 bp, Homo sapiens
  misc_feature (6)..(6): "n" may be a, t, c, g, other or unknown
  misc_feature (78)..(78): "n" may be a, t, c, g, other or unknown
  misc_feature (143)..(143): "n" may be a, t, c, g, other or unknown
  misc_feature (152)..(152): "n" may be a, t, c, g, other or unknown
  misc_feature (265)..(265): "n" may be a, t, c, g, other or unknown
  misc_feature (293)..(293): "n" may be a, t, c, g, other or unknown
  misc_feature (317)..(317): "n" may be a, t, c, g, other or unknown
  misc_feature (368)..(368): "n" may be a, t, c, g, other or unknown
  misc_feature (391)..(391): "n" may be a, t, c, g, other or unknown
  misc_feature (418)..(418): "n" may be a, t, c, g, other or unknown
  misc_feature (431)..(431): "n" may be a, t, c, g, other or unknown
  misc_feature (437)..(437): "n" may be a, t, c, g, other or unknown
agtctngtttcgggttccggctgcgttgggcttgcgtgcggctcgctaaaactatggcgtccgggcctcattcgacanctactgctgccgcagccgcctcatcggccgccccaaacgcgggcggctccagctccgggacgacnaccacgacnactaccacgacgggagggatcctgatcggcgatcgcctgtactcggaagtttcacttaccatcgaccactctctgattccggaggagaggctctcgcccaccccatccatgcnggatgggctcgacctgcccattgagacngacttacgcatcctgggctgcganctcatccaggccgcctgcattctcctccggctgccgcatgtggcgatggcnacggggcaggtgttgtttcatcnttttttctactccaaatctttcgtcgnacacagtttcganattgtnggctatggcttgtattaatcttgcatc

SEQ ID NO: 2982 - DNA, 497 bp, Homo sapiens
  misc_feature (19)..(19): "n" may be a, t, c, g, other or unknown
  misc_feature (261)..(261): "n" may be a, t, c, g, other or unknown
  misc_feature (306)..(306): "n" may be a, t, c, g, other or unknown
  misc_feature (419)..(419): "n" may be a, t, c, g, other or unknown
  misc_feature (443)..(443): "n" may be a, t, c, g, other or unknown
  misc_feature (451)..(451): "n" may be a, t, c, g, other or unknown
  misc_feature (463)..(463): "n" may be a, t, c, g, other or unknown
  misc_feature (468)..(468): "n" may be a, t, c, g, other or unknown
aggatgcctggtggggcanaagtccctgggtctcgttcccgtcaggggcgagtgaaccttcacaacctcccggggctttggaatttgacttaatgatgaagggcaacatggaccactggacaaagacctggagttcccactacctgcaccgctctggccaatcccatttggaaatcagtcagcaagatccactctcctctggactctgagcccccgggaggagaggatgggagaggtcaagcgtgtgcaattctgttgcancctcacaaccaacaagcagccgtgttccgacggctctgcgggaancccagagggactcccgcggctcaaacgggggcagatacgtgcagggccccggggaacgtgaaggtgagagacagaacataccgtgaagaaaccactgagaatgggagacagangcaggaacagggatgacactggangacagcangcctgcctggangccancattctctacaaccttccacaaaccaaca

SEQ ID NO: 2983 - DNA, 896 bp, Homo sapiens
  misc_feature (435)..(435): "n" may be a, t, c, g, other or unknown
  misc_feature (669)..(669): "n" may be a, t, c, g, other or unknown
  misc_feature (698)..(698): "n" may be a, t, c, g, other or unknown
  misc_feature (839)..(839): "n" may be a, t, c, g, other or unknown
  misc_feature (872)..(872): "n" may be a, t, c, g, other or unknown
  misc_feature (879)..(879): "n" may be a, t, c, g, other or unknown
  misc_feature (889)..(889): "n" may be a, t, c, g, other or unknown
  misc_feature (893)..(893): "n" may be a, t, c, g, other or unknown
gataaaagtgcactagggggacagttgatttcaatctaagaaaagttaacacttgggaattacaagaagtaaaacaagtgcaactaaatcatttattagttgttttttgaaagcagttttatgtataaataacaaatgtttatatttaactaaatgtaaggtacgaattattacatattaaacttttcttccccttcctagttctgaagtagatatatatatatatatatctactgtcacattccatatattttgaatatttaactcatctagttaataatgtttttattccatgcgaatgatttgatattttcatccttatttctctttggctacaatttatattgagttatatctgtacattctggtaatctaaaatccttaaaaatactctaatagccttgagtgaccaactttttttttaaagcacagatntaattgtctaatgttctgatgggaacgtaacacttatttttatataaaaagagactgagtaaacaaacattatagaaaaaaagtgaagttttttagttgttttttgtggtattcaaccagcaagttgttttctttcagagtttcctccttcaaaaagttatattgcatttacaaatgttttacaaggcagaaagtttgactgggatagttagtgttaaaagcttcatgttgaanatcttcacgtttcattctgctaaacccanaatatgttccagctggtgttactaatttttccagcttaatccctcagtggcttattatttacataacaataactttttatcagttacattttatttttatttaaacctgggccaaaaccaaattattttatgttaaaatgntgtgccaaactatcccaggaaaagtttttaaanccaaccnttggtaaatnaaanttt

SEQ ID NO: 2984 - DNA, 745 bp, Homo sapiens
  misc_feature (445)..(446): "n" may be a, t, c, g, other or unknown
  misc_feature (725)..(725): "n" may be a, t, c, g, other or unknown
  misc_feature (731)..(731): "n" may be a, t, c, g, other or unknown
  misc_feature (738)..(738): "n" may be a, t, c, g, other or unknown
actcttcgctgccttttctgcattcctgacttctaaaagatgccttaaggcttaagggatgccatatttttgataaggcctctggtaggtaccacagccaagaggaccagagatcatggcccttccagtatgggggcgatagagacatcggggacctgggatatttgttttgtgcagagatctcctgcctgctgtcaccatgagaaacagtggagtggagtggatggatggcctgacttgaagaaagggccctggaaagttttctactttgctattttgaaattttttcccttcttatagagactttgaaatacttttgtaaatgtgtgtagttgttaatggaactttgccttttgcaaagtcggaaagagtccgcttttccatgtgaggctcgcagagctgaaaggggagctacgtccaccagcctgtgggtctttgggttttnnttttgttgttgttgttgtttttttaagatggagttcactcttgttgcccaggctggagtgcaatggttcaatctccgctcactgcaacctccgcctctcgggttcaggtgattctcctgcctcagcctcctgagtactgggattacagggcgcccaccaccactcccgggtaatttttgttttttttaataaaaaacagggtttccctcctgtttttccaaaactggtctccaaaccccctgatgtttgggttaacccgcagaccctcgggcctccttnaaaatncctgggnatttacc

SEQ ID NO: 2985 - DNA, 700 bp, Homo sapiens
  misc_feature (14)..(14): "n" may be a, t, c, g, other or unknown
  misc_feature (336)..(336): "n" may be a, t, c, g, other or unknown
  misc_feature (381)..(382): "n" may be a, t, c, g, other or unknown
  misc_feature (457)..(457): "n" may be a, t, c, g, other or unknown
  misc_feature (472)..(472): "n" may be a, t, c, g, other or unknown
  misc_feature (487)..(487): "n" may be a, t, c, g, other or unknown
  misc_feature (535)..(535): "n" may be a, t, c, g, other or unknown
  misc_feature (547)..(547): "n" may be a, t, c, g, other or unknown
  misc_feature (611)..(611): "n" may be a, t, c, g, other or unknown
  misc_feature (644)..(644): "n" may be a, t, c, g, other or unknown
  misc_feature (655)..(655): "n" may be a, t, c, g, other or unknown
  misc_feature (675)..(675): "n" may be a, t, c, g, other or unknown
  misc_feature (700)..(700): "n" may be a, t, c, g, other or unknown
gatgcaaaatgtcngacacaggtagtccaggtatgcagagaaggagaagaaaaatcttagatacgtcagtggcatatgtgcggggagaagagaacttagcaggctggcggccccgtggagacagcctcatccttgagcaccagtgggagctggagaagctggagctcctacatgaggtggaaaaaacccgccactttttgctgctgcgtgagagacttggtgacagcatccccaaatccctgagcgactcgttatcccccagcctcagcagtgggaccctcagcacctccaccagtatctcctctcagatctcaaccactacctttgaaagcgccntcacacctgagcgagagcagtggctatgattcaggagacatcganngcctggtggaccgagagaaagagctggctaccaagtgcctgcaacttctcacccacactttcaacagagaattcngccaggtgcacggcngcgtcagtgactgtnagttgtctgatatctctccaattggacgggatccctctgagtccagtntcagcagtgccnccctcactccctcctccacctgtccctctctgggtagactctagggagcacctctctgggatcngaagaccccaaaaagcccttcccgggcctctantccctgcccanaatttgaaacaggtttccanattgttccccgcttgtgggaaaacn

SEQ ID NO: 2986 - DNA, 746 bp, Homo sapiens
  misc_feature (378)..(378): "n" may be a, t, c, g, other or unknown
  misc_feature (517)..(517): "n" may be a, t, c, g, other or unknown
  misc_feature (638)..(638): "n" may be a, t, c, g, other or unknown
  misc_feature (681)..(681): "n" may be a, t, c, g, other or unknown
  misc_feature (688)..(688): "n" may be a, t, c, g, other or unknown
  misc_feature (725)..(725): "n" may be a, t, c, g, other or unknown
  misc_feature (740)..(740): "n" may be a, t, c, g, other or unknown
  misc_feature (744)..(744): "n" may be a, t, c, g, other or unknown
acgggcggccggatttgcccggaggccgcacccgcctccggcggggctctcagtgaaaaatgtactctgacctgaatcctgaattttccttgatggtcaaaagattaagaaatcatgagtggaggatctcaagtccacattttttggggtgctccaattgctccactgaaaatcacagtatcagaagacacagcttctttaatgtctgttgctgacccctggaaaaaaattcagcttttatacagtcaacattctttatatctgaaggatgaaaaacagcacaaaaatcttgaaaactataaagtcccagaatctattggttctccagatcttagtggtcatttcttagcaaactgtatgaatagacatgttcatgtnaaagatgactttgtacgttctgtttctgaaacacagaatatagaatcccagaagattcactcctctagactgagtgatataactagctctaatatgcaaatatgtggatttaaaagcacagttccgcatttcaccgaanaagaaaagtatcaaaagcttctcagtgaaaataaaattagagatgaacagcctaaacatcagccagatatatgtggtaagaactttaacacaaatttgtttcagttggggccataaatgtncagctgtgttggatttggtttgttattactgaaaaaattaatntaggggnctgaaagttggtacaaaaaaaattttgtgcccacccnaaatttcctggaaantacnaa

SEQ ID NO: 2987 - DNA, 646 bp, Homo sapiens
  misc_feature (140)..(140): "n" may be a, t, c, g, other or unknown
  misc_feature (337)..(337): "n" may be a, t, c, g, other or unknown
  misc_feature (505)..(505): "n" may be a, t, c, g, other or unknown
  misc_feature (548)..(548): "n" may be a, t, c, g, other or unknown
  misc_feature (565)..(565): "n" may be a, t, c, g, other or unknown
  misc_feature (571)..(571): "n" may be a, t, c, g, other or unknown
  misc_feature (632)..(632): "n" may be a, t, c, g, other or unknown
  misc_feature (638)..(638): "n" may be a, t, c, g, other or unknown
tccggaagtggcttctgcgacaacatgcttgcggacctcggcttaatcggaaccataggcgaggatgacgaggtgccggtggagcccgagtctgactccggggacgaggaagaggaggggcccattgtgctgggcagacnacaaaaagctttggggaagaaccgcagtgctgatttcaaccctgatttcgttttcactgagaaggaggggacgtacgatggcagctgggccctggctgatgtcatgagccaactcaagaagaagagggcagccactacattagatgagaagattgagaaagttcgaaagaaaaggaaaacagaggataaagaagccnagtctgggaagttggaaaaggagaaagaagcaaaggaaggctctgaaccaaaggagcaggaagaccttcaagagaatgatgaggaaggctcagaagatgaagcctcggagactgactactcatcagctgatgagaacatcctcaccaaagcagatacactccaagtanaggatcggaagaagaagaagaagaaaggaccgggaagcaggangattttttgaagatgcntctcantacgatgaaaacctctcgttccaggacatgaacctttcccgccctcttctgaaggccattncagccntgggcttc

SEQ ID NO: 2988 - DNA, 766 bp, Homo sapiens
  misc_feature (178)..(178): "n" may be a, t, c, g, other or unknown
  misc_feature (326)..(326): "n" may be a, t, c, g, other or unknown
  misc_feature (381)..(381): "n" may be a, t, c, g, other or unknown
  misc_feature (408)..(408): "n" may be a, t, c, g, other or unknown
  misc_feature (434)..(434): "n" may be a, t, c, g, other or unknown
  misc_feature (476)..(476): "n" may be a, t, c, g, other or unknown
  misc_feature (550)..(550): "n" may be a, t, c, g, other or unknown
  misc_feature (568)..(568): "n" may be a, t, c, g, other or unknown
  misc_feature (606)..(606): "n" may be a, t, c, g, other or unknown
  misc_feature (625)..(625): "n" may be a, t, c, g, other or unknown
  misc_feature (633)..(633): "n" may be a, t, c, g, other or unknown
  misc_feature (663)..(663): "n" may be a, t, c, g, other or unknown
  misc_feature (697)..(697): "n" may be a, t, c, g, other or unknown
  misc_feature (721)..(721): "n" may be a, t, c, g, other or unknown
  misc_feature (725)..(725): "n" may be a, t, c, g, other or unknown
  misc_feature (755)..(755): "n" may be a, t, c, g, other or unknown
  misc_feature (766)..(766): "n" may be a, t, c, g, other or unknown
attaaaaaggaagctcaaggccaggcgcggtggctcacgcctgtaatcccaacactttgggaggccgaggccgacgtatcacgagattaggaggtcgagaccagcctggccaacatggtgaaaccctgtctttactaaaaatacaaaaactagccgggcgtggcggcgcgcgcctgtnacccatgctactcggaaggctgaggcaggagaatcgcttgaacccgggaggcggaggttgcagtgagccgagatcgcgcctctgcactccagcctgggacagagcgagcctccgtctccaaaaaaaaataaggaagctcaagatgaanagtcagaagtggtaacttgtttgttgcacaagaaacaaatttagcattctatttnggggatccagattaccaaaaaaaaaanagaagtgaagttatttctgcattaantatattaataaaactttatcactaaaaacaattctgttagangaacgcccaggaaaaaaatatttgagtttttagagaagtcattttttaaacttttagaggttgtgacatttaanttacataattttatttantacctagtatgcaaagacattgttctggggcatggcancaaataaaaagcttttgtnaatcgcantgtcccctcttattaaccccgcattcctancaggttggtttttttttgctggaccgcaccacantccgggttacaccaaaaaatatcncctnatgttatttttttaagttgaattttttttnggaatcccttn

SEQ ID NO: 2989 - DNA, 527 bp, Homo sapiens
  misc_feature (8)..(8): "n" may be a, t, c, g, other or unknown
  misc_feature (100)..(100): "n" may be a, t, c, g, other or unknown
  misc_feature (248)..(248): "n" may be a, t, c, g, other or unknown
  misc_feature (340)..(340): "n" may be a, t, c, g, other or unknown
  misc_feature (370)..(370): "n" may be a, t, c, g, other or unknown
  misc_feature (392)..(392): "n" may be a, t, c, g, other or unknown
  misc_feature (451)..(451): "n" may be a, t, c, g, other or unknown
  misc_feature (472)..(472): "n" may be a, t, c, g, other or unknown
  misc_feature (491)..(491): "n" may be a, t, c, g, other or unknown
  misc_feature (501)..(501): "n" may be a, t, c, g, other or unknown
  misc_feature (522)..(522): "n" may be a, t, c, g, other or unknown
tcatgatnaaacatctgtttccactcatactcgaagtggtaatctaaagcggccaaagattggaaagcggtttcaggattctgaatttagcagttctcanggtgaagatgaaaagacctcccagacttcacttacagcttcaataaacaaattggagtctactgcacgcccatcagagagctcagaagaattcctggaagaagaacctgaacagagagggattgaatttgaggatgaaagcagtgatngagatgcacggccagcactggaaacccagccacagcaagagaagcaagatggtgaaaaggaatctgaattagagcctatgaatggtgagatnatggacgattctcttaagacctcacttatnacagaagaggaagactccactngtgaagttttagatgaagaattaaaattgcagccttttaattccagtgaagactctacnaatcttgttccactggtggtngaatcttcaaaaccccctngaggttgatncaccagattagaccccacgtntacct

SEQ ID NO: 2990 - DNA, 704 bp, Homo sapiens
  misc_feature (436)..(436): "n" may be a, t, c, g, other or unknown
  misc_feature (450)..(450): "n" may be a, t, c, g, other or unknown
  misc_feature (471)..(471): "n" may be a, t, c, g, other or unknown
  misc_feature (568)..(568): "n" may be a, t, c, g, other or unknown
  misc_feature (577)..(577): "n" may be a, t, c, g, other or unknown
  misc_feature (665)..(665): "n" may be a, t, c, g, other or unknown
  misc_feature (682)..(682): "n" may be a, t, c, g, other or unknown
  misc_feature (684)..(684): "n" may be a, t, c, g, other or unknown
  misc_feature (690)..(690): "n" may be a, t, c, g, other or unknown
  misc_feature (695)..(695): "n" may be a, t, c, g, other or unknown
ggacggcttagccgcggtgcagactgcggcggcggtggtctgaggaagttctatcttggcgctaaagcggagacgcatcccccgacccgaggctacgatgagcacaccggccgtgccccaggacctgcagctgcccccgagtcagagggcgcagtccgcattcaaagagcaaagaagacaaaaactcaaggaacatctgttgagaagaaaaacgctttttgcatacaagcaggaaaatgagatgttatccagtagagatcagagagttgtgacatctgaggaccaagttcaagaagggactaaagtgctgaaacttaaaacaaaaatggctgataaagaaaacatgaagagacctgcagagagcaaaaataatacagtggtggggaaacattgtattcctttaaaaccttcaaatgaactaaccaattcaactgtngtaattgacacacntaaacctaaggatagtaatcnaactccgcatttgttactaactgaagatgatccccaaagtcaacatatgacattaagccaggcatttcaccttaaaaactatagttaaaagaaacanatgactacngaaaaacaaaagcaagatgcttacatgcccaagaaacctgtgcttggatcttatcgtgggccagattgttccatctaagattaattcntttagaaaacctctacnantcaaanatganaatttctgc

SEQ ID NO: 2991 - DNA, 663 bp, Homo sapiens
  misc_feature (320)..(320): "n" may be a, t, c, g, other or unknown
  misc_feature (339)..(339): "n" may be a, t, c, g, other or unknown
  misc_feature (363)..(363): "n" may be a, t, c, g, other or unknown
  misc_feature (451)..(451): "n" may be a, t, c, g, other or unknown
  misc_feature (459)..(459): "n" may be a, t, c, g, other or unknown
  misc_feature (483)..(483): "n" may be a, t, c, g, other or unknown
  misc_feature (533)..(533): "n" may be a, t, c, g, other or unknown
  misc_feature (611)..(611): "n" may be a, t, c, g, other or unknown
  misc_feature (614)..(614): "n" may be a, t, c, g, other or unknown
  misc_feature (629)..(629): "n" may be a, t, c, g, other or unknown
  misc_feature (650)..(650): "n" may be a, t, c, g, other or unknown
  misc_feature (660)..(660): "n" may be a, t, c, g, other or unknown
agccaacaccgcctttctcagcatgggagacctttgagcccatcagccaagagcccctcagccaagccagctatgacaaagccccagacccagttcctgagctccaagactcgttctatgcagaactgcaacgtgcagagagcctccaagagaagagcataaaagaggccaagaccaaatgcaggacaattgcatccctgctcactgcagcccccaacccccactccaaaggggtacttatgtttaagaaacggcggcagagagccaagaagtacaccctggtgagcttcggggctgctgctgggacaggcgctgaggangaggacggcgttccccccncgagtgagtccgagctggacgaanaagccttctctgacgcccgcagcctcaccaatcaatctgactgggacagtccctatctggacatggagcttgccagggcgggctcaanaacatcanaaggccagggctctgggctggganggcagctgagtgaggtctctgggcgaagggtgcagctctttgaacagcancgcccgcgcgcagactccagcacccaaggaactggcacgggtcgaaccagcagccatgctcaacggggaaggctgcantcnccacctcggggccanaatgctccccagaagcagctnttgctccccnccc

SEQ ID NO: 2992 - DNA, 818 bp, Homo sapiens
  misc_feature (356)..(356): "n" may be a, t, c, g, other or unknown
  misc_feature (567)..(567): "n" may be a, t, c, g, other or unknown
  misc_feature (753)..(753): "n" may be a, t, c, g, other or unknown
  misc_feature (800)..(800): "n" may be a, t, c, g, other or unknown
  misc_feature (802)..(803): "n" may be a, t, c, g, other or unknown
  misc_feature (810)..(810): "n" may be a, t, c, g, other or unknown
gacagatgtttgggagctcttactctgacatgaagttataattggtaatggagactcagacaatgttgtagattacagagtgaactatgctttttagtgttaaatgcaatagcttgagatacaatgttttacttggtacataaatgctggttttctttcagatttaaggacatacacttttttttttttttttttaagagacagggtcttctatgttgcccaggctgtctttgaactcctgggatcaagtgatcctcctgcctcagccttcgaagtagttgggactacaggcccacgccaccgtgcctggctggacatgtaaatttgaagtgaatggttaaacatccagctagctnaaagcatggcagaccctaacagaaaagctacagtgtgtttttgcagctatgaagtgaatggtttcctggggaaaattgtgactttgtataactgttgttgaaaccagaataaattatatttcacttgcatatgcataaattattaaaattttcagaagtcagtgatacagaagtactattttgcaatgttaatctgtttgagtctttgganaaagtggtttcattgttaggtacatagtgcactgttaatattttaaacaagttgttcactcttccatttaagggatagcagttccttggtataaaatgactgggatgaattataaaggaattatgtttgtcatgttgccctttaacccagctttagtaattactataatctcatatttatgaatanttcctgttaggttacaggaacaaatgaaaaatattttatgttttccncnnccctttnaaatttaa

SEQ ID NO: 2993 - DNA, 630 bp, Homo sapiens
  misc_feature (299)..(299): "n" may be a, t, c, g, other or unknown
  misc_feature (492)..(492): "n" may be a, t, c, g, other or unknown
  misc_feature (519)..(519): "n" may be a, t, c, g, other or unknown
  misc_feature (563)..(563): "n" may be a, t, c, g, other or unknown
  misc_feature (591)..(591): "n" may be a, t, c, g, other or unknown
  misc_feature (600)..(600): "n" may be a, t, c, g, other or unknown
  misc_feature (619)..(619): "n" may be a, t, c, g, other or unknown
  misc_feature (629)..(629): "n" may be a, t, c, g, other or unknown
cagaagaagcacaaatgctcagtgtattacagtaaacacaaaaccagcacagctgcggccagcagcaccagcacgactactgaggaaaaacagacttcacccctgggcagctcactgcctgctgctaaagaggacatttgcactgatgccatgcgtgagaactggatcagcctcagatatgcaagtggcataaatgtcaacctgcagaagaatttaacccttcccaaaaacttactgaataaagaagaaaacacactgaaaaacacaattgttttcagtaatccttcttcagaatgtantatgaaggagggagtacagacatgtatgtttcctaaggaaactgacattaaaacttcagagaacacagccgagttcaaggaacgggagctctgtccactgaagacctccaagaaaactacctgaaaaccatttaccaagaaactcacctcagtaccaccagccagacttgccagaaaatttccaggaaaaatnatgggaataaccagcaagttcctgtcnagaatgaagtaaatcattgtgaaaatttgaagaaaggtggaccnaagccttcttccgaaaagaagattcccnaacctctgnagaaaacttgttttctganaaacgggacnt

SEQ ID NO: 2994 - DNA, 523 bp, Homo sapiens
  misc_feature (504)..(504): "n" may be a, t, c, g, other or unknown
  misc_feature (507)..(507): "n" may be a, t, c, g, other or unknown
  misc_feature (517)..(517): "n" may be a, t, c, g, other or unknown
attgcccgcgcggtgagggagcgtggtctcgcgcaagccggcgtgcggtccggcggcgctgcagttgtgtccagccggtcacggggcggctatggcggccacgttcttcggagaggtggtgaaggcgccgtgccgagctgggactgaggacgaagaggaggaggaggaggggcggagggagacgcccgaggacagggaggtgcgtctgcagctggcgcggaagagggaagtgcggctccttcgaagacaaacaaaaacatctttggaagtttctttgctagaaaaatatccgtgctccaagtttataattgctataggaaataatgcagtagcatttctgtcatcatttgttatgaattcaggagtctgggaggaagttggttgtgctaaactctggaatgaatggtgtagaacaacagacactacacatctgtcctccacagaggctttttgtgtgttttatcatctaaaatccaatccctcggtttttctctgtcggtgcanttnctatgttcanaaaatc

SEQ ID NO: 2995 - DNA, 728 bp, Homo sapiens
  misc_feature (582)..(582): "n" may be a, t, c, g, other or unknown
  misc_feature (635)..(635): "n" may be a, t, c, g, other or unknown
  misc_feature (661)..(661): "n" may be a, t, c, g, other or unknown
  misc_feature (714)..(714): "n" may be a, t, c, g, other or unknown
  misc_feature (721)..(721): "n" may be a, t, c, g, other or unknown
  misc_feature (725)..(725): "n" may be a, t, c, g, other or unknown
agatactatgtccctgctttctaagatcattagccctggttcctcaacacccagcagtacaagatcaccaccccctgggagagatgaaagctacccccgagagctctccaattctgtatctacatatcgaccctttggtctgggcagtgaatctccctataagcagccttctgatggaatggagagaccatcttccctgatggactcttcacaggaaaagttctacccagatacttctttccaagaagatgaggattaccgagattttgagtattcagggcctccaccctctgccatgatgaacctagagaagaaaccagccaaatctatcctgaaatcaagcaagctgtctgataccaccgagtaccagccaattctgtccagttatagccacagagcccaagaatttggggtaaagtctgccttccctccatctgtaagggccctcctggactctagtgagaactgtgaccgtctctcatcttcccctgggctatttggtgccttcagcgtaagagggaatgaacctgggtctgaccggtcaccatcaccgaagtaagaatgattcatttttcacccctnactccaaccacaatagcttgtctcaatctaccactgggcatctcagtttgccncagaagcagtacccagaatctcctcncccagtcccacatcgttccttttctctcccgcaaaaaacccttgccgctcccncgggttncccnccc

SEQ ID NO: 2996 - DNA, 461 bp, Homo sapiens
  misc_feature (210)..(210): "n" may be a, t, c, g, other or unknown
  misc_feature (386)..(386): "n" may be a, t, c, g, other or unknown
  misc_feature (398)..(398): "n" may be a, t, c, g, other or unknown
  misc_feature (420)..(420): "n" may be a, t, c, g, other or unknown
  misc_feature (427)..(427): "n" may be a, t, c, g, other or unknown
  misc_feature (458)..(458): "n" may be a, t, c, g, other or unknown
cacccattctgtcttccagacagttctcttccttctctgtactgcgtactgggtcaccacatcccagagccttgctcagttatagcaactgctgcgggcgtgcacatggcataggcccagtaacttacatacatcggctcacttaggcctcagacagcagcacgaggcaggcacttttacttcttttaccattagaaagccaaggcctanagtggtgggctttgaccacagccacacaattttgaagtggcagaaccaggactggagcttagccctgctcaccctagacctatgcgcttgacaagtgcgtgactgtgacaggcccatgggcccggactgcccataggggtcactgtaccatggcaaaggctgaggtgcaccaagangctgtggcgtcntcacctgccttatttgctgganaactgtngcaaagaaccacagactgggcgacttagacnata

SEQ ID NO: 2997 - DNA, 675 bp, Homo sapiens
  misc_feature (493)..(493): "n" may be a, t, c, g, other or unknown
  misc_feature (556)..(556): "n" may be a, t, c, g, other or unknown
  misc_feature (582)..(582): "n" may be a, t, c, g, other or unknown
  misc_feature (608)..(608): "n" may be a, t, c, g, other or unknown
  misc_feature (637)..(637): "n" may be a, t, c, g, other or unknown
  misc_feature (657)..(657): "n" may be a, t, c, g, other or unknown
  misc_feature (665)..(665): "n" may be a, t, c, g, other or unknown
attgactgcagccctcataaaactgtcaagaagactgcgaatgaatttccctgtttgccaaagcaagtggcttggattctggccacaagcaaggttttcatgtatccagagttacttccagtgtgttccctgaaggcaaagaatccccaggataagatcgtcttcaccaaggctgaggacaatttgttagctttaggactgaagcattttgaaggaactgagtttcctaatcctctaatcagcaagtaccttctaacctgcaaaactgcccaccaactgacagtgagaatcaagaacctcaacatgaacagagctcctgacaacatcattaaattttataagaagaccaaacagctgccagtcctaggaaaatgctgtgaagagatccagccacatcagtggaagccacctatagagagagaagaacaccggctcccattctggttaaaggccagtctgccatccatccaggaagaactgcggcacatggctnatggtgctagaaaggtaggaaatatgactggaaccacagagatccactcagatcgaagcctanaaaaagacaatttgggagttggggantgaatctcggtaccactggctattgnctaagggtgtatcctgaaaactgaagccngtttgccccccgtttccccngggaaagnttgggaaaca

SEQ ID NO: 2998 - DNA, 702 bp, Homo sapiens
  misc_feature (412)..(412): "n" may be a, t, c, g, other or unknown
  misc_feature (486)..(486): "n" may be a, t, c, g, other or unknown
  misc_feature (509)..(509): "n" may be a, t, c, g, other or unknown
  misc_feature (513)..(513): "n" may be a, t, c, g, other or unknown
  misc_feature (621)..(621): "n" may be a, t, c, g, other or unknown
  misc_feature (660)..(660): "n" may be a, t, c, g, other or unknown
  misc_feature (664)..(664): "n" may be a, t, c, g, other or unknown
  misc_feature (666)..(666): "n" may be a, t, c, g, other or unknown
  misc_feature (674)..(674): "n" may be a, t, c, g, other or unknown
ggagaatggctcaactctccaaatagagagaatttctatcagttgcaagtacgaaaatttcctgccgattatataaaatactgggagtttgcagtttatctggaagaatgtgaactggctaaacagctttatccaaaggaaaacgatttggtgtttttagctcctgagagaataaatgaagagaagaaagatacagagagaaatgacatacaagatctccacgaatatcattctggttatgttcataaatttcgccgcacgtcagtcatgcgtaatgggaaaactgagtgttacctttccatccagactcaagagaactttccggccaatttaaacgaacttgtgaattgtattgtaatcagttctctggtaactacacaaaggaagttgaaagccatgtctctgttgggtngtcggaaccaactggctagagctgttctgaatccaaaccctatggacttctgtacaaaagatttactgactacnacatctgagagaattattgcgtncttnagagatttcaatgaagatcaaaagaaagcaatagaaactgcatatgctatggtgaaacactcaccatcagttgccaaaatctgcttgattcatggaccacctggaacnggaaaatccaaaactattgttgggctcctctttcgtctnctgncngaaaaccnaagaaggggcttcaaacaaaactccatg

SEQ ID NO: 2999 - DNA, 605 bp, Homo sapiens
  misc_feature (278)..(278): "n" may be a, t, c, g, other or unknown
  misc_feature (394)..(394): "n" may be a, t, c, g, other or unknown
  misc_feature (557)..(557): "n" may be a, t, c, g, other or unknown
  misc_feature (570)..(570): "n" may be a, t, c, g, other or unknown
  misc_feature (593)..(593): "n" may be a, t, c, g, other or unknown
atgtgacctgttgactttgtatctgcacgtgggcacgagtgatgttcagtttgctaggcactagtcatagtgttatggacgtggtggagtgtaaggtcttgatgaattacggcagtatgcagaaaaggaaccaaggccagagagacaaataatgcctcatgtcccactgctttaaaattacattaatttataaaatggccactatgggctctttttgactgtttctcggagtaggaacaaaataagacattaaatggtggcttgaagaaaaagatacncattttcagaaaaaagaaaggggagggctgcagggatcctgtcttggcgggagctctccagtctgttggattagcacagggacacgcttatggtgccatgacgccgaaactagtcntcccccatctccagcataggcaacggcctgcaggggtgagtgtcagaaaagacttactttggaagaaaagggtttttttttgtttgtttgttttttgtttttttttgtttgtttgttttgggtttttttcctgaaatttcctgatacctttttcagaatgtcncccttgtaaatangcacctaaagccaagttggtcancaaaactcctga

SEQ ID NO: 3000 - DNA, 642 bp, Homo sapiens
  misc_feature (550)..(550): "n" may be a, t, c, g, other or unknown
  misc_feature (552)..(552): "n" may be a, t, c, g, other or unknown
  misc_feature (563)..(563): "n" may be a, t, c, g, other or unknown
  misc_feature (605)..(605): "n" may be a, t, c, g, other or unknown
  misc_feature (613)..(613): "n" may be a, t, c, g, other or unknown
ggtaagtatgtttgttcgagctaccagtccagaatctaccagtaggagttctagtaaaactggacgagatactccagaaaatggagaaactgcaattggtgctgaaaattcagaaaaaatagatgagaattcagataaagagatggaagtagaagaatctccagagaaaataaaagtacagacaacaccaaaagtagaagaagaacaggatttgaaatttcagattggagaactggcaaataccctgacaagtaaattcgagtttctaggcattaatagacaatccatctccaactttcatgtgctgctcttacagactgagactcgaattgcagactggcgggaaggggctcttaatggaaactaccttaaacgaaaacttcaggatgcagcagaacaactaaaacagtatgaaataaacgccactcctaaaggctggtcctgccactgggacagggatcatagacggtatttctatgtaaacgaacagtcgggcgagtctcagtgggagtttccagatggtgaagaggaagaagaagaaagccccgcncnagaaaataganatgagactcttgccaaacagaccttgaaagacaaaactggcnctgattcnaattccacagaatcctctgaaacttcccc

SEQ ID NO: 3001 - DNA, 579 bp, Homo sapiens
  misc_feature (310)..(310): "n" may be a, t, c, g, other or unknown
  misc_feature (312)..(312): "n" may be a, t, c, g, other or unknown
  misc_feature (410)..(410): "n" may be a, t, c, g, other or unknown
  misc_feature (418)..(418): "n" may be a, t, c, g, other or unknown
  misc_feature (426)..(426): "n" may be a, t, c, g, other or unknown
  misc_feature (446)..(446): "n" may be a, t, c, g, other or unknown
  misc_feature (503)..(503): "n" may be a, t, c, g, other or unknown
  misc_feature (528)..(528): "n" may be a, t, c, g, other or unknown
  misc_feature (559)..(559): "n" may be a, t, c, g, other or unknown
  misc_feature (565)..(565): "n" may be a, t, c, g, other or unknown
  misc_feature (575)..(575): "n" may be a, t, c, g, other or unknown
tatagggaagtgatttaaaaagaaaaaacaaacaacaacaaaaaaaactcttcggaataaagagggctgtaaattttgaattccagtgtcggatcctttcaagcactgagaaattctttctcaggtttctttttttgggggagacagggtcttgctctgtcacccagactggaacacagtggcacgatcttggctcactgcaacctctgcgggctcacgcaatcctcctgccacagcttcccaagtagctgggaccacaggcgcgagccaccactgctggccagtttttgtattttttttttttttgtananacagggtctcgccatgttgcccaggctggtttaaaactcctgagctcaagcagttctcccacctgggcctcccaaagtgctaggattacagacatganccactacncctggccnggtttctgttggaaacccanattgtgacaagacatttgttttcttccgaatcaccagatttgcagcttactgtgccnaaagtggactggctgccggggcccntcaaatgccctctggcccatggcacactcancagaangccaaacccntgct

SEQ ID NO: 3002 - DNA, 784 bp, Homo sapiens
  misc_feature (8)..(8): "n" may be a, t, c, g, other or unknown
  misc_feature (18)..(18): "n" may be a, t, c, g, other or unknown
  misc_feature (481)..(481): "n" may be a, t, c, g, other or unknown
  misc_feature (551)..(551): "n" may be a, t, c, g, other or unknown
  misc_feature (643)..(643): "n" may be a, t, c, g, other or unknown
  misc_feature (693)..(693): "n" may be a, t, c, g, other or unknown
  misc_feature (697)..(697): "n" may be a, t, c, g, other or unknown
  misc_feature (702)..(702): "n" may be a, t, c, g, other or unknown
  misc_feature (718)..(718): "n" may be a, t, c, g, other or unknown
  misc_feature (781)..(781): "n" may be a, t, c, g, other or unknown
tgctaatnaaggtagganagtacatttgttggaataacagaaatggtgatttcagcctaaaagtttctgagggtaaaggatcacatgaccttcaggaaactctctgcctcctgtaggtgctttcctatctcccccatccttccctaccccttttcccttttccttcctctctttttctctcactgtcactctgtctacacacactggcatcttttgaacactaaaagtaagcactgttttttaaaaaagtaattatttgttggatcagatacttttatcccaagtgaataccttcactgagatgtggccaatgcaatagtttcacagtaaaaacagtgcctataagaaaatagatcacatactatttttcaatgatattaagtgtattttgtaactattttcatttggtccttggtaacatgaaataatacatggaacttacctttataataaaaatggagtgccctggttcatcatagangtgcatctagtttgcccttaatgggaagtatacttgctgtgtggattgatagcaccttcttgaaatggangaactcagctggcctcatggatgtgcaatttttgcagtcccacagggccttgcatacagaaacacccgagctcagttgaatgtctgtttgantttttcctatttattttttgaaaaccagttcccctttgtcttttttgtcncccnaggantggaattccattggcncaaaacatgggtccctgttaccctccaaccccctggctgaaaggggatcctccccacctccancct

SEQ ID NO: 3003 - DNA, 579 bp, Homo sapiens
  misc_feature (72)..(72): "n" may be a, t, c, g, other or unknown
  misc_feature (401)..(401): "n" may be a, t, c, g, other or unknown
  misc_feature (469)..(469): "n" may be a, t, c, g, other or unknown
  misc_feature (485)..(485): "n" may be a, t, c, g, other or unknown
  misc_feature (490)..(490): "n" may be a, t, c, g, other or unknown
  misc_feature (509)..(509): "n" may be a, t, c, g, other or unknown
  misc_feature (551)..(551): "n" may be a, t, c, g, other or unknown
  misc_feature (574)..(574): "n" may be a, t, c, g, other or unknown
ttactgtgtgtttctctacctacctctcattctcaccttcttttcctaagctttttttttctctttaatttntccccctaggaatcctccctcaatttcaaagccctccttcccttctcctggctcttcccctctaattcccttctccttccaactttggtttctggctccttttcctcaactttcctttcacctccttaattccttctttctggcccaatatttggtctccaaattttcatatagttctgcctctttcttccccccgtctctgctggccccctaagcttcccctgttaaatcccctcttccctgctatatccacctgtcccctctctggcatccccagatcccagttctccccaagctgtggttctccctgtgctctccttgtcactggntgcccctcttgctctcccagcaaccatgctgctctgtctgccctggctccaaatccctccttctctcnccaactctccatcttnaagancctccccttttctgacccnctccctatcttgggtgaaattttatctctcgtagaaaaccantttttctctaaaatttctctagntggct

SEQ ID NO: 3004 - DNA, 698 bp, Homo sapiens
  misc_feature (343)..(344): "n" may be a, t, c, g, other or unknown
  misc_feature (633)..(633): "n" may be a, t, c, g, other or unknown
  misc_feature (684)..(684): "n" may be a, t, c, g, other or unknown
  misc_feature (687)..(687): "n" may be a, t, c, g, other or unknown
tgattttggagttgctggtcagctgacagatacacagattaaaagaaatacctttgtgggaactccattttggatggctcctgaagttattcaacagtcagcttatgactcaaaagctgacatttggtcattgggaattactgctattgaactagccaagggagagccacctaactccgatatgcatccaatgagagttctgtttcttattcccaaaaacaatcctccaactcttgttggagactttactaagtcttttaaggagtttattgatgcttgcctgaacaaagatccatcatttcgtcctacagcaaaagaacttctgaaacacaaattcattgtnnaaaattcaaagaagacttcttatctgactgaactgatagatcgttttaagagatggaaggcagaaggacacagtgatgatgaatctgattccgagggctctgattcggaatctaccagcagggaaaacaatactcatcctgaatggagctttaccaccgtacgaaagaacctgatccaaagaaagtacagaatggggcagagcaagatcttgtgccaaccctgagttgtttgtctatgataatcaccctgcatttgctgaacttaaaccgcaggacaagaataacgctngcaggaatcaggcgattgaagaactccaaaaaaattttgctgtggctgaanccncctgtcccggc

SEQ ID NO: 3005 - DNA, 756 bp, Homo sapiens
  misc_feature (14)..(14): "n" may be a, t, c, g, other or unknown
  misc_feature (201)..(201): "n" may be a, t, c, g, other or unknown
  misc_feature (507)..(507): "n" may be a, t, c, g, other or unknown
  misc_feature (513)..(513): "n" may be a, t, c, g, other or unknown
  misc_feature (721)..(721): "n" may be a, t, c, g, other or unknown
  misc_feature (729)..(729): "n" may be a, t, c, g, other or unknown
  misc_feature (735)..(735): "n" may be a, t, c, g, other or unknown
  misc_feature (740)..(740): "n" may be a, t, c, g, other or unknown
  misc_feature (750)..(750): "n" may be a, t, c, g, other or unknown
tttagtttaaaaanaaaaaatgcagggtgatttcttattattatatgttagcctgcatggttaaattcgacaacttgtaactctatgaacttagagtttactattttagcagctaaaaatgcatcacatattcatattgttcaataatgtcctttcatttgtttctgattgttttcatcctgatactgtagttcactgtanaaatgtggctgctgaaactcatttgattgtcatttttatctatcctatgttaaatggtttgtttttacaaaataataccttattttaattgaaacgtttatgcttttgccaacacatcttgtaacttaatatactagatgttaaggttgttaatgtacaaaaaaaaaacccttatactcacctgcgttttcatttgtttgacatttgtctattattggatttcattatcatatgaacttgtcagtgggaaacaaactgtctaaaaatttttctcttacgtttaacatacaatcatgtgaaatttangcaganttcgataaattactggcaaaaacaaaactcttttataaagattttctaatgttgactttaatactctaacatggtacaaaccaaatggtaaaatcccaagtcatttcttttttcactctattcagcaacagaattaagtggatgaagatattctactgtgcattaaatcttgaacttttataaaacatgttcaaaaattgtacaaaanaaattccncctggntaaantctttccccnaataca

SEQ ID NO: 3006 - DNA, 706 bp, Homo sapiens
  misc_feature (263)..(263): "n" may be a, t, c, g, other or unknown
  misc_feature (305)..(305): "n" may be a, t, c, g, other or unknown
  misc_feature (308)..(308): "n" may be a, t, c, g, other or unknown
  misc_feature (344)..(344): "n" may be a, t, c, g, other or unknown
  misc_feature (408)..(408): "n" may be a, t, c, g, other or unknown
  misc_feature (463)..(463): "n" may be a, t, c, g, other or unknown
  misc_feature (555)..(555): "n" may be a, t, c, g, other or unknown
  misc_feature (588)..(588): "n" may be a, t, c, g, other or unknown
  misc_feature (614)..(614): "n" may be a, t, c, g, other or unknown
  misc_feature (656)..(656): "n" may be a, t, c, g, other or unknown
  misc_feature (670)..(670): "n" may be a, t, c, g, other or unknown
  misc_feature (689)..(689): "n" may be a, t, c, g, other or unknown
  misc_feature (703)..(703): "n" may be a, t, c, g, other or unknown
gattgcaaaggaaaaattagatcaattaaagcaggagtttgaattctggtatcctgttgatcttcgcgtctctggcaaggatcttgttccaaatcatctttcatattacctttataatcatgtggctatgtggccggaacaaagtgacaaatggcctacagctgtgagagcaaatggacatctcctcctgaactctgagaagatgtcaaaatccacaggcaacttcctcactttgacccaagctattgacaaattttcagcanatggaatgcgtttggctctggctgatgttggtgacactgtanaanatgccaactttgtggaagccatggcagatgcaggtnttctccgtctgtacacctgggtagagtgggtgaaagaaatggttgccaactgggacagcctaanaagtggtcctgccagcactttcaatgatagagtttttgccagtgaattgaatgcnggaattataaaaacagatcaaactatgaaaagatgatgtttaaagaagctttgaaaacagggttttttgaatttcaggccgcaaaaaataantaccgtgaaattggctgtggaagggatgcacanaaaacttgtgttccggtttattgaanttcaaacacttctcctccctccattctgtccacatttgtgtnaacacatctggacnccctgggaaaacccgaccnattatgaatgctcntgg

SEQ ID NO: 3007 - DNA, 665 bp, Homo sapiens
  misc_feature (275)..(275): "n" may be a, t, c, g, other or unknown
  misc_feature (308)..(308): "n" may be a, t, c, g, other or unknown
  misc_feature (335)..(335): "n" may be a, t, c, g, other or unknown
  misc_feature (338)..(338): "n" may be a, t, c, g, other or unknown
  misc_feature (421)..(421): "n" may be a, t, c, g, other or unknown
  misc_feature (450)..(450): "n" may be a, t, c, g, other or unknown
  misc_feature (506)..(506): "n" may be a, t, c, g, other or unknown
  misc_feature (516)..(516): "n" may be a, t, c, g, other or unknown
  misc_feature (603)..(603): "n" may be a, t, c, g, other or unknown
  misc_feature (618)..(618): "n" may be a, t, c, g, other or unknown
  misc_feature (630)..(630): "n" may be a, t, c, g, other or unknown
  misc_feature (659)..(659): "n" may be a, t, c, g, other or unknown
  misc_feature (663)..(663): "n" may be a, t, c, g, other or unknown
gggacggggtccgactcagaaatggcggcctccatgttctacggcaggctagtggccgtggccacccttcggaaaccaccggcctcggacggcccagcaacagcaaaggaatctctcactacatgaatacatgagtatggaattattgcaagaagctggtgtctccgttcccaaaggatatgtggcaaagtcaccagatgaagcttatgcaattgccaaaaaattaggttcaaaagatgtcgtgataaaggcacaggttttagctggtggtagangaaaaggaacatttgaaagtggcctcaaaggangagtgaagatagttttctctccagaanaancaaaagctgtttcttcacaaatgattgggaaaaaattgtttaccaagcaaacgggagaaaagggcagaatatgcaatcaagtnttggtctgtgagcgaaaatatcccagganagaatactactttgcaataacaatggaaaggtcatttcaaggtcctgtattaatangaaattcacntggtggtgtcacattgaagatgttgctgctgagactcctgaagcaataattaaagaacctattgatattgaagaaagcatcaaaaangaacaagctctcccncttgcacagaanattggatttccccttatattgtggaatcngcanca

SEQ ID NO: 3008 - DNA, 497 bp, Homo sapiens
  misc_feature (477)..(477): "n" may be a, t, c, g, other or unknown
  misc_feature (483)..(484): "n" may be a, t, c, g, other or unknown
agtagacctttctgcgagtacgagccaaccggcagacccgactgaatgctcggattgggaaaatgaaacggaggaagcaagatgaagggcagagggaaggctcctgcatggctgaggatgatgctgtggacatcgagcatgagaacaacaaccgctttgaggagtatgagtggtgtggacagaagcggatacgggccaccactctcctggaaggtggcttccgaggctctggcttcatcatgtgcagcggcaaagagaacccggacagtgatgctgacttggatgtggatggggatgacactctggagtatgggaagccacaatacacagaggctgatgtcatcccctgcgcaggcgaagagcctggtgaagcccaggagagagaggcacttcggggcgcagtcctaaatggcggccctcccagcacgcgcatcacacctgaattctctaaatgggccagtgatgaaatgccatccnccaacnntggtgaaagcagc

SEQ ID NO: 3009 - DNA, 495 bp, Homo sapiens
  misc_feature (313)..(313): "n" may be a, t, c, g, other or unknown
  misc_feature (401)..(401): "n" may be a, t, c, g, other or unknown
  misc_feature (420)..(420): "n" may be a, t, c, g, other or unknown
  misc_feature (465)..(465): "n" may be a, t, c, g, other or unknown
agttctcctgagggaagaggagtgtagtaggggggacgcggcggcggcgttgacaatgtagttttcttggaggcttttttggtccaatttgtgagatcgatattgttcttaatgatggggaaaccaggaaaatggcagaaatgaaaactgaagatggcaaagtagaaaaacactatctcttctatgacggagaatccgtttcaggaaaggtaaacctagcctttaagcaacctggaaagaggctagaacaccaaggaattacaattgaatttgtacgtcgaattgaacttttcaatgacaagagtaatactcntgaatttgtaaacctagtgaaagaactagccttacctggagaactgactcagagcagaagttatgactttgaatttatgcaagttganaagccatatgaatcttacntcggtgccaatgtccgcttgaggtattttcttaaagtgacaatgntgagaagactgacagatttggtaaaagaat

SEQ ID NO: 3010 - DNA, 612 bp, Homo sapiens
  misc_feature (9)..(9): "n" may be a, t, c, g, other or unknown
  misc_feature (249)..(249): "n" may be a, t, c, g, other or unknown
  misc_feature (492)..(492): "n" may be a, t, c, g, other or unknown
  misc_feature (495)..(495): "n" may be a, t, c, g, other or unknown
  misc_feature (549)..(549): "n" may be a, t, c, g, other or unknown
  misc_feature (576)..(576): "n" may be a, t, c, g, other or unknown
  misc_feature (585)..(585): "n" may be a, t, c, g, other or unknown
  misc_feature (597)..(597): "n" may be a, t, c, g, other or unknown
  misc_feature (610)..(610): "n" may be a, t, c, g, other or unknown
acttttccngatctaggagcaccatggacacctcgtcagagatgctggtacggtttggacggcgctgtggacgggcgaaggaaagtacagtcttaggtatgtctttatcagcagtgtgaaaacggactaatacagtaaattggtaccagcagagtggggcattgctgaaaagataactgaaaatgtggaagcgactttggcactgggtaacaggcagagattggaacagtttgaagagctcagaagaanacaggaaaatgtgggaaagtttggaacttcctagagacttgttgaatgcctttgaccaaaatgctgattgcgacatggacaataaaatgcaggctgagatggtctcagatggagatgaggaactttctggaaactggagtaaaggtgattcttgctatgttttagcaaaaagactagcgtcattttacctctgccctagagatttgtggaactttgagaaagatgatttagggtacctcgcanaanaaatttctaagcagcaaagcattccagaagtgagttggatactgttaagggcantcagttttaaaagggaaacagagcatntaaattcanaaaatttgttancctgatctggcanaa

SEQ ID NO: 3011 - DNA, 473 bp, Homo sapiens
  misc_feature (446)..(446): "n" may be a, t, c, g, other or unknown
  misc_feature (468)..(468): "n" may be a, t, c, g, other or unknown
  misc_feature (470)..(470): "n" may be a, t, c, g, other or unknown
tcgctcaggatgtcactctctttgatgagattgtcggcaaaatctgccaagccggggtgtgggtatttcccgggagaatgctcttggagtcctgcctgccctcagccgtggggcagccgctgctctgggtgccgctgctcaagctgccctcgtcagagtccagcaaggttcccttgccagtctcaccggtccactcgttgctggaggaattcttcaggacttttaaagacctggatgaagctacagtgagaaaaacacatttcgctgtgatacagaaacaggttacacaatgtgtaatgtttgcctcaaagcttgtgtaagatttaacattaagattttattttatgatatgacttcagttagcaactatcctggtaattaggcaaaaatgtagcttctgaaaacatggacatttttgacttaggtttacagttgtaagttaggcnattcacatttttagattaccananctc

SEQ ID NO: 3012 - DNA, 727 bp, Homo sapiens
  misc_feature (441)..(441): "n" may be a, t, c, g, other or unknown
  misc_feature (482)..(482): "n" may be a, t, c, g, other or unknown
  misc_feature (488)..(488): "n" may be a, t, c, g, other or unknown
  misc_feature (508)..(508): "n" may be a, t, c, g, other or unknown
  misc_feature (533)..(533): "n" may be a, t, c, g, other or unknown
  misc_feature (592)..(592): "n" may be a, t, c, g, other or unknown
  misc_feature (647)..(647): "n" may be a, t, c, g, other or unknown
  misc_feature (650)..(650): "n" may be a, t, c, g, other or unknown
  misc_feature (681)..(681): "n" may be a, t, c, g, other or unknown
  misc_feature (696)..(696): "n" may be a, t, c, g, other or unknown
  misc_feature (706)..(706): "n" may be a, t, c, g, other or unknown
gatttcatgcattgcccttcagctgccatgttatgaggacacttggagaaagctacaggagaggaactgaggtctcctgccatcagccacttgagtgagcatgggagtggattctccaaactccagttaagacttgagatgtccacagtggcagccactagcttgactgcaacttacgagagaccctgagccagaggcactcagttaagtcatacacagtttcctgacccgtaaaacctgtgacacaatgaaggtttgttgttttgggggtaatccgttattcagcaatagataacgaatacagaaggcttgtaattgtataaccaacgtgagtttataagcggatatctgacctcatttgttttctcctgaaaaagttatagaaaaatcacaagactgcaagtcactctctctctttcttttgtggggaataaacaagtntaattacaatttctaaacctattgttttattctcaaatatnattacnatttaaacaggatattgtanagctccatcatagggattaacactnattagaattaaagaacgtttttgtgaatgtcagcttttttttttttaaataaacactcntcccttgataatgtttttctttttcataaaattaaaaaaaaaatgtgggttgtantangtgtatatatttatgttggtacatgaaaatnttttgatacagggcntgacgtgttntaaccccctcctgggaaaaat

SEQ ID NO: 3013 - DNA, 539 bp, Homo sapiens
  misc_feature (276)..(276): "n" may be a, t, c, g, other or unknown
  misc_feature (335)..(335): "n" may be a, t, c, g, other or unknown
  misc_feature (352)..(352): "n" may be a, t, c, g, other or unknown
  misc_feature (369)..(369): "n" may be a, t, c, g, other or unknown
  misc_feature (391)..(391): "n" may be a, t, c, g, other or unknown
  misc_feature (466)..(466): "n" may be a, t, c, g, other or unknown
  misc_feature (494)..(494): "n" may be a, t, c, g, other or unknown
  misc_feature (514)..(514): "n" may be a, t, c, g, other or unknown
  misc_feature (531)..(532): "n" may be a, t, c, g, other or unknown
attctccgggctgcggagggtaaagagcgggctcgggccgaggctggagggctgggtggggccagagcggcgcttcgggggcccgcggaggacgagggagggagagaatctgaggagctgggttgccattaggggactcctgaggtcctatctccaggctgcggtgactgcactttccctggagtggaagctgctggaaggcggaccggccgccatgtccacgttcaggcaggaagacgtggaggaccattatgagatgggggaggagctgggcancggccagtttgcgatcgtgcggaagtgccggcagaagggcacgggcaaggagtacgcanccaagttcatcaagaancgccgcctgtcatccanccggcgtggggtgagccgggangaaatcgagcgggaagtgaacatcctgcgggagatccggcaccccaacatcatcaccctgcacgacatcttccanaacaagacggacgtggtcctcatcctgnaactggtctctggcgggganctcttttgacttcctgnnggaaaaa

SEQ ID NO: 3014 - DNA, 383 bp, Homo sapiens
  misc_feature (301)..(301): "n" may be a, t, c, g, other or unknown
  misc_feature (369)..(369): "n" may be a, t, c, g, other or unknown
  misc_feature (373)..(373): "n" may be a, t, c, g, other or unknown
gtggcccggatgttcggtgcagctgccagatccgctgatctagcgcttctcgaaaaaaaccttcaggcggcccatggctgtcgatattcaaccagcatgccttggactttattgtgggaagaccctattatttaaaaatggctcaactgaaatatatggagaatgtggggtatgcccaagaggacagagaacgaatgcacagaaatattgtcagccttgcacagaatctcctgaactttatgattggctctatcttggatttatggcaatgcttcctctggttttacatgggtcctccatngaatggtactcggggaaaaaagattccagcgcacttttccaacacatcactgcattatttgaattgcncatnggcacctata

SEQ ID NO: 3015 - DNA, 767 bp, Homo sapiens
  misc_feature (115)..(115): "n" may be a, t, c, g, other or unknown
  misc_feature (292)..(292): "n" may be a, t, c, g, other or unknown
  misc_feature (325)..(325): "n" may be a, t, c, g, other or unknown
  misc_feature (490)..(490): "n" may be a, t, c, g, other or unknown
  misc_feature (588)..(588): "n" may be a, t, c, g, other or unknown
  misc_feature (611)..(611): "n" may be a, t, c, g, other or unknown
  misc_feature (690)..(690): "n" may be a, t, c, g, other or unknown
  misc_feature (729)..(729): "n" may be a, t, c, g, other or unknown
  misc_feature (745)..(745): "n" may be a, t, c, g, other or unknown
  misc_feature (762)..(762): "n" may be a, t, c, g, other or unknown
  misc_feature (764)..(764): "n" may be a, t, c, g, other or unknown
gttattaatcaaaatgcaaagcagttggaaaataaggagcatctctgggaaaatgtggagtgttatagtcaccccattaactgaattgattaatcagaccaatgaagtaaatcanggtgatgccttagaacataattttagtgccatctatggtgcattgactttaccagtaaaccacattttttcagaacagagatttccagtgcccaccatgaagactttgcttagaacttggtcagaattatatagagcatttgctcgttgtgctgctttggtggcaacagcagaaganaacttgtgctgtgaggaactttcttccaagatnatgtccagtttggaagatgaaggcttttctaatttgttgttcgtggatagaattatttatattattactgtaatggttgattgcattgacttctcaccatataatattaaatatcagcccaaagttaaatcaccacagagaccttcagattggtccaaaaagaanaatgagcccctagggaaattgacttctttatttaaacttattgtgaaagtgatctattctttccacacactgagcttcaagggaagcacattctgatnccctcttccctattggcaactcnatccccggcattatttcccgtgttcttgggcatatttcttttgccttctatgatccgaaaaatatttgcaactttaacnagacctctggctttttttatgaaaactccaagcttgatnaaattcccaaagtttnttgttttctgaaacacnanttt

SEQ ID NO: 3016 - DNA, 585 bp, Homo sapiens
  misc_feature (110)..(110): "n" may be a, t, c, g, other or unknown
  misc_feature (258)..(258): "n" may be a, t, c, g, other or unknown
  misc_feature (294)..(294): "n" may be a, t, c, g, other or unknown
  misc_feature (323)..(323): "n" may be a, t, c, g, other or unknown
  misc_feature (368)..(368): "n" may be a, t, c, g, other or unknown
  misc_feature (518)..(518): "n" may be a, t, c, g, other or unknown
  misc_feature (560)..(560): "n" may be a, t, c, g, other or unknown
  misc_feature (584)..(584): "n" may be a, t, c, g, other or unknown
gactcaccctgggccgggggtgaggcttggactgtttctttttccaaaagaggagctcaaaagagaaagttcatctagaaatctcaaagccatgtctcaggatgaactanagtatgcccttacaggggatcagtgtcattcaaggatgtgactgtggacttcacccaggaggagtggcagcaactagaccctgctcagaaggcgctttacagggatgtgatgttggaaaactattgccacttcgtatctgtggggttncacatggctaaccctgatatgatccgcaatttggancaaggaaaaaaagctatggacccaaaaanttttcccaagttacagctacctagaagaagatgggaaaactgaanatgtcttagtgaagttcaaagaataccaagacaggcattctagacccctcatattcatcaaccacaaaaaactaattaaggagagaagtaatatttatggtaaaacatttactctaggcaagaaccgtattacaatactatgttaatatnaacctgatggaaaagttttgaaaaatatttcagaactagtcnttagaaatataagccccctaaaana

SEQ ID NO: 3017 - DNA, 755 bp, Homo sapiens
  misc_feature (454)..(454): "n" may be a, t, c, g, other or unknown
  misc_feature (505)..(505): "n" may be a, t, c, g, other or unknown
  misc_feature (662)..(662): "n" may be a, t, c, g, other or unknown
  misc_feature (674)..(674): "n" may be a, t, c, g, other or unknown
  misc_feature (688)..(688): "n" may be a, t, c, g, other or unknown
  misc_feature (699)..(699): "n" may be a, t, c, g, other or unknown
  misc_feature (737)..(737): "n" may be a, t, c, g, other or unknown
attatgatggaagattaaagtgtggtgacatgattgtggccgtaaatgggctgtcaaccgtgggcatgagccactctgcactagttcccatgttgaaggagcagaggaacaaagtcactctgaccgttatttgttggcctggcagccttgtatagattttggaaattggtttcaaatcttgcatcttccttttttagatttttgaaagaaaacccttttgtttcattgtgtttgtggtttaggagctgctgacactgctggtatacacagggccaaaacccactaagattgtccgtttatgtttatttaaatggtttcctaagttagttacatttcttttagcttggaaacagtcttccactaacctttgtgagtttatattttcagaattcagacttagttgttaaaatgttacctatggtaatgagcaaagctcacccaaactgtgccccanatggagtaaagaccttctggtgggtctttgttttcagtaactgaatcatanaacgaattctgtatccctcaggcctgatgtcagcaaagccagtaacaacagcgtgtactgccactgtcataaccaataccatgaaatgaatatactttaaattttggtgataactgttccccatttttttttgaaccacagtctcactctcacccangctggaatgcantggcacaatctcanctcactgcaanctccgcctcctggggttcacgccattctcccacctcancctccccaattacttgga

SEQ ID NO: 3018 - DNA, 469 bp, Homo sapiens
  misc_feature (376)..(376): "n" may be a, t, c, g, other or unknown
  misc_feature (389)..(389): "n" may be a, t, c, g, other or unknown
  misc_feature (407)..(407): "n" may be a, t, c, g, other or unknown
  misc_feature (416)..(416): "n" may be a, t, c, g, other or unknown
  misc_feature (424)..(424): "n" may be a, t, c, g, other or unknown
cgtctatttccatccccttcctcatcacaaaaagaaacgtagaatctatggcacagcctagtattttacccaatactgttagtgtataataatttacagaatgaattttatttacttgtggtttttttcttaatgtaacatttcaaggagcactatatatatacacacatatatatacaccttggcttatgactgaaataatggagcaaattattaaatacagacagacttgagagataactgaaaattaaaagaactcctctgagagaaaaaaaaatatgacactgttatgatgtttaataaagttgcatgatcatttttcacatatctacttgaggctaaaatacatttgcatcacttatgttttacaaatatntttctttaagggntaatattcccccatcccnaaacagatnctaggatnaaaattccctaagaaacacttattggaccctgaattttaaaaatt

SEQ ID NO: 3019 - DNA, 439 bp, Homo sapiens
  misc_feature (359)..(359): "n" may be a, t, c, g, other or unknown
  misc_feature (387)..(387): "n" may be a, t, c, g, other or unknown
  misc_feature (438)..(438): "n" may be a, t, c, g, other or unknown
agtcgtggctgcagcgctgaggcgagaggttggtgggtgtctccggccataatgacccaggctgagaagggtgatacggagaacggaaaggagaagggcggcgagaaggagaaggagcagcgcggcgtgaagcggcccatcgtgcccgcgctggtgccggagtcgctgcaagagcaaatccagagcaacttcatcattgtcatacatccaggttcaacaactttaaggattggtcgagccacagacactcttcctgccagcattcctcacgtcattgcccgaagacacaaacaacaagggcagcccctatacaaggacagttggctcctaagggagggactaaataaaccagaaagtanttgaaccaaagacaaattggccttaaantggtggatcaagcaatatggtctaaaaagatgtccattgttacaagacgcnt

SEQ ID NO: 3020 - DNA, 803 bp, Homo sapiens
  misc_feature (328)..(328): "n" may be a, t, c, g, other or unknown
  misc_feature (482)..(482): "n" may be a, t, c, g, other or unknown
  misc_feature (564)..(564): "n" may be a, t, c, g, other or unknown
  misc_feature (613)..(613): "n" may be a, t, c, g, other or unknown
  misc_feature (632)..(632): "n" may be a, t, c, g, other or unknown
  misc_feature (639)..(639): "n" may be a, t, c, g, other or unknown
  misc_feature (709)..(709): "n" may be a, t, c, g, other or unknown
  misc_feature (748)..(748): "n" may be a, t, c, g, other or unknown
  misc_feature (766)..(766): "n" may be a, t, c, g, other or unknown
  misc_feature (768)..(768): "n" may be a, t, c, g, other or unknown
  misc_feature (797)..(797): "n" may be a, t, c, g, other or unknown
ttgttggttgaaatgtaagtcttttcctaaagttttaatcagaggtagccatcactaagacttaagccacctgtggttctcttaagtttcactgaagccagaagaaggaaattaccacaacttgtattatactaattatcttcattattaacgatcatattagagccactgacatgtcccaaattatattaaaataaaaacctgcattgctctgacatgaagctcaattcaatgtaataaacaaattaggtattaaacgttataatttaaaaaacttctacgatatcaccagaaatcctggtgaaatttaattttttcccttttttangtcagtggccggtgggataaatttttctaaactttttcctgctatgattttgaaggcgaatacatagagcacagttcagtaaaagagttccaagccttttcactgggagcatttacattttgattctgttgtcatttgaaataaaacatctgcnagggagataatgagcttaagttacaattgactttgggaaaaaataacagacttttgtgtttcctccatcatgttatccatanggaatctccagttatgtgaacaatcccagtcttttaagacaatacttanatctaaatgcaaaatctancatgcanaagctttttaaggattttagactgtccccaagaacttggctcgagatgggattacccgaattacaatgcngttttccactggttactccaactgatcttatctcattcntgttactcactgtgcccntngaaccccaaaagtggaatattttgtctcnttattt

SEQ ID NO: 3021 - DNA, 639 bp, Homo sapiens
  misc_feature (409)..(409): "n" may be a, t, c, g, other or unknown
  misc_feature (443)..(443): "n" may be a, t, c, g, other or unknown
  misc_feature (461)..(461): "n" may be a, t, c, g, other or unknown
  misc_feature (479)..(479): "n" may be a, t, c, g, other or unknown
  misc_feature (524)..(524): "n" may be a, t, c, g, other or unknown
  misc_feature (558)..(558): "n" may be a, t, c, g, other or unknown
  misc_feature (570)..(570): "n" may be a, t, c, g, other or unknown
  misc_feature (576)..(576): "n" may be a, t, c, g, other or unknown
  misc_feature (582)..(582): "n" may be a, t, c, g, other or unknown
  misc_feature (632)..(632): "n" may be a, t, c, g, other or unknown
ttttctattttgtacatacattattttgtatatactgtatatgatgacttcagtgagcagtgaccattgtcgaggtgctcgggaaaaaccacagatttcagcagcacaatcaacgcaaccacagaaacaagtggtacaggcaacagctgaacagatgcgtctcgctcaagtgatctttgataagaatgattcagattttgaagctaaagttaagcagcttatggaagtgacagggaaaaatcaggatgaatgcatagtggccctacatgattgtaatggagatgtgaacaaagctatcaatatattgctggaagggaattcagacacaacttcatgggagactgtagggtgtaagaaaaagaattttgcaaaagaaaattcagaaaacaaagagaatagagagaagaanagcgagaaagaatcgagtcgtggacgtggaaacnacaaccggaaaggaagangcggcaatcgtggcaganaatttagaggtgaaaaaaatggaattgattgcaatcaagtggacnaaccttcagatcgtggcaagcgagcccggggttnaagatttggacntggcanaagganaagggcaggaaggttctcaacccaaggcatggggacatttaatcctgcanactattc

SEQ ID NO: 3022 - DNA, 585 bp, Homo sapiens
  misc_feature (57)..(57): "n" may be a, t, c, g, other or unknown
  misc_feature (166)..(166): "n" may be a, t, c, g, other or unknown
  misc_feature (257)..(257): "n" may be a, t, c, g, other or unknown
  misc_feature (305)..(305): "n" may be a, t, c, g, other or unknown
  misc_feature (350)..(350): "n" may be a, t, c, g, other or unknown
  misc_feature (353)..(353): "n" may be a, t, c, g, other or unknown
  misc_feature (392)..(392): "n" may be a, t, c, g, other or unknown
  misc_feature (418)..(418): "n" may be a, t, c, g, other or unknown
  misc_feature (427)..(427): "n" may be a, t, c, g, other or unknown
  misc_feature (508)..(508): "n" may be a, t, c, g, other or unknown
  misc_feature (511)..(511): "n" may be a, t, c, g, other or unknown
  misc_feature (520)..(520): "n" may be a, t, c, g, other or unknown
  misc_feature (566)..(566): "n" may be a, t, c, g, other or unknown
  misc_feature (569)..(569): "n" may be a, t, c, g, other or unknown
ttcaaagggagacagactttctcaagtgtgcccactgccttgccccccggccatcanatccctttgctcgcttctgtcaagaatgtggctctcctgtcccacccatatttggctgtcgtctcccacccccagaaggagctcagatgggcttgtgtgcagaatgcanaagcttggtacccatgaacactcccatctgcgtggtgtgtgaggcccctcttgctctacagctgcagccacaggcaagcctccacttgaangaaaaggtaatttgccgggcctgtggtacaggaaatcctgctcacctnaaatactgtgtcacctgtgagggggccctgccttcatcacaagantcnatgtgcagtggggataaagcccctcctccgcccactcanaaaggggggaccatttcctgctacanatgtggtcnctggaatctctgggaagcgtccttctgcggctggtgtggaaccatgctcggcattcctgctggctgttctgtttgccctanatntggggccancaatcacctgtctgcccgattctgtggctcctgtggtatttgtgtnaantccctagtgaaactta

SEQ ID NO: 3023 - DNA, 464 bp, Homo sapiens
  misc_feature (23)..(23): "n" may be a, t, c, g, other or unknown
  misc_feature (255)..(255): "n" may be a, t, c, g, other or unknown
  misc_feature (280)..(280): "n" may be a, t, c, g, other or unknown
  misc_feature (313)..(313): "n" may be a, t, c, g, other or unknown
  misc_feature (357)..(357): "n" may be a, t, c, g, other or unknown
  misc_feature (425)..(425): "n" may be a, t, c, g, other or unknown
  misc_feature (435)..(435): "n" may be a, t, c, g, other or unknown
  misc_feature (447)..(447): "n" may be a, t, c, g, other or unknown
  misc_feature (455)..(455): "n" may be a, t, c, g, other or unknown
  misc_feature (462)..(462): "n" may be a, t, c, g, other or unknown
aattgcttccggggagttgcganggagcgagggggaataaaggacccgcgagggaaaggcccgcggatggcgcgtccctgagggtcgtggcgagttcgcggagcgtgggaaggagcggaccctgctctccccgggctgcgggccatggccacggcggaacggaaagccctcggcatcggcttccagtggctctcacggccactctggtgctcatctgcgccgggcaagggggacgcagggaggatgggggtccancctgctacggcggatttgacctgtncttcattttggacaaatcaggaagtgtgctgcnccactggaatgaaatctattactttgtggaacagttggctcacnaattcatcaacccacagttgaaaatgtcctttattgttttctccaccccaagaacaacctttatgaanctgacggaanacagaaaaccantccctccnggcctanaa

SEQ ID NO: 3024 - DNA, 840 bp, Homo sapiens
  misc_feature (588)..(588): "n" may be a, t, c, g, other or unknown
  misc_feature (602)..(602): "n" may be a, t, c, g, other or unknown
  misc_feature (621)..(621): "n" may be a, t, c, g, other or unknown
  misc_feature (643)..(643): "n" may be a, t, c, g, other or unknown
  misc_feature (689)..(689): "n" may be a, t, c, g, other or unknown
  misc_feature (698)..(698): "n" may be a, t, c, g, other or unknown
  misc_feature (790)..(791): "n" may be a, t, c, g, other or unknown
  misc_feature (811)..(812): "n" may be a, t, c, g, other or unknown
  misc_feature (816)..(816): "n" may be a, t, c, g, other or unknown
aaaccatgtacctcaaattgtagaattaatacttcgagaacagtgccaatagaaacagaaacatgaagtctggggttcaaaccagaactacatttgtaacacagaccctgaaactgatggcctttcaccttctgttgcctctccaagtcccaaagaagtcaattttgtttcaaggggagcttcaagtcaccagcccagagttccactttttcctgaaaatggtttacaccagcagccagaacccttgcttccaaataatatgaaatctgcctgtgaaaaacgtttagaatgttgtagttctcctcattctaagccaaattgctcaaccctttctccaccaatgccactgccccagctgttaccttcggttactgatgcaaggtcggcaggaccttctgatcatattgattcctcagttactggggttcaaaggtttcgagatactctaaaaataccctacaagctggaattaaaaaatgaaccaggggagaacggatttgaaacacattgttatagatgggagcaatgtttcaattacccatggtctgaaaaagttcttttcttgtcgtggaattgcaattgcagttnaatatttttggaancttggcaacaaaaacatcnctgtatttgtccctcagtgganaacaaggcgtgatcctaatgtcacagaacagcacttcttaacccanctccagganctcggaaatattatctttaactcctgccccggatggtctttgggaaaaaaaaattgcttcctcatgaatgaacagggtttctactacacttnnccggaaaaaaatgggtgggnnttanttgtttacaaaatgaataatttcc

SEQ ID NO: 3025 - DNA, 622 bp, Homo sapiens
  misc_feature (292)..(292): "n" may be a, t, c, g, other or unknown
  misc_feature (415)..(415): "n" may be a, t, c, g, other or unknown
  misc_feature (420)..(420): "n" may be a, t, c, g, other or unknown
  misc_feature (479)..(479): "n" may be a, t, c, g, other or unknown
  misc_feature (528)..(528): "n" may be a, t, c, g, other or unknown
  misc_feature (557)..(557): "n" may be a, t, c, g, other or unknown
  misc_feature (578)..(578): "n" may be a, t, c, g, other or unknown
  misc_feature (581)..(581): "n" may be a, t, c, g, other or unknown
  misc_feature (620)..(620): "n" may be a, t, c, g, other or unknown
gcggttcctctaggaaaaattcctttgtgcagatcagggcccgtggattggtgagtgaatcctaaccacgtcttccctggcctgtcttcactcttctccccagaatcaccacttctgcactggtgtctgaaggtgtattgagtgattttgtggagggcagaagtaggaagtctttgggacaaaactgtatttaccttgggatctgtgaacaagaggaacctcagcagccaggacaggcaggagcagtggaatagctactatggcttctggaatcctggttaatgtaaaggangaggtgacctgccccatctgcctggaactcctgacacaacccctgagcctggactgcggccacagcttctgccaagcatgcctcactgcaaaccacaagaagtccatgctagacaaaggaganagtanctgccctgtgtgccggatcagttaccagcctgagaacatacggcctaatcggcatgtanccaacttagtggaaaactcagggaggtcaagttgagcccagaagggcanaaagttgatcattgtgcacccatggaaanaaacttctactcttctgtcangangacgggaaggtcatttgctggctttgtgagcggtctcanga

SEQ ID NO: 3026 - DNA, 631 bp, Homo sapiens
  misc_feature (577)..(577): "n" may be a, t, c, g, other or unknown
  misc_feature (592)..(592): "n" may be a, t, c, g, other or unknown
  misc_feature (628)..(628): "n" may be a, t, c, g, other or unknown
gtgggggcggggaggaaaggcggcggcggcagtgtccaagctacgccactcgggctggggcgttgggagcgggagtgcagaacgtggtcgtggcggcggcggtgagaagagcgaggcggaggagggggtgccatggccgggcagcagttccagtacgatgacagtgggaacaccttcttctacttcctcacctccttcgtggggctcatcgtgatcccggcgacatactacctctggccccgagatcagaatgccgagcaaattccattaaagaatatcagaaaagtatatggaaggtgtatgtggtatcgtttacggttattaaaaccccagccaaatattattcctacagtaaagaaaatagttctgcttgcaggatgggcattgttcttattccttgcatataaagtttccagaacagaccgagaataccaagaataccatccttatgaagtattaaatttggatcctggagccacagtagcacaaattaaaaaacaatatcgtttgctgtcacttaaatatcatccagataaaggaggtgatgaggttatgtcatgaggatacaaaacttatnctgctttaaccgatnaaaatcccgaaaaatttggaaaattggaatccaatnggc

SEQ ID NO: 3027 - DNA, 491 bp, Homo sapiens
  misc_feature (41)..(41): "n" may be a, t, c, g, other or unknown
  misc_feature (181)..(181): "n" may be a, t, c, g, other or unknown
  misc_feature (198)..(198): "n" may be a, t, c, g, other or unknown
  misc_feature (201)..(201): "n" may be a, t, c, g, other or unknown
  misc_feature (323)..(323): "n" may be a, t, c, g, other or unknown
  misc_feature (399)..(399): "n" may be a, t, c, g, other or unknown
  misc_feature (409)..(409): "n" may be a, t, c, g, other or unknown
  misc_feature (443)..(443): "n" may be a, t, c, g, other or unknown
  misc_feature (446)..(446): "n" may be a, t, c, g, other or unknown
  misc_feature (451)..(451): "n" may be a, t, c, g, other or unknown
gctcagctggtagtttgacctccgttggtgcaatgccaganatgggattgtcagccaccacactgccaccaccctgcacacagtctgggtccctccgaaagaagcacgccaaccttaacatcccctacagcatcttggtgcttcacacaccatttaggaggccaccctaacgaggcaagangacatgggggtgtgcanaanttctgttcttagtgagaatggctggcctgagaatccagctcacctcctctgcccacagtctggactgcttgtgggaaggccatctcctcctgtctggtggtacctccactctgggcaggganggcctgtctgtgactcgctctggaccccacttcccgctctggccaagggctgtcttctgtgcacatagctcaagancctgcagcanttccctgtatgggtggatgtcctcaggggccaanaanaaaanaatggggacaacagaaacctgctttgtaggggattatgtt

SEQ ID NO: 3028 - DNA, 711 bp, Homo sapiens
  misc_feature (389)..(389): "n" may be a, t, c, g, other or unknown
  misc_feature (410)..(410): "n" may be a, t, c, g, other or unknown
  misc_feature (418)..(418): "n" may be a, t, c, g, other or unknown
  misc_feature (444)..(444): "n" may be a, t, c, g, other or unknown
  misc_feature (474)..(474): "n" may be a, t, c, g, other or unknown
  misc_feature (567)..(567): "n" may be a, t, c, g, other or unknown
  misc_feature (577)..(577): "n" may be a, t, c, g, other or unknown
  misc_feature (582)..(582): "n" may be a, t, c, g, other or unknown
  misc_feature (619)..(619): "n" may be a, t, c, g, other or unknown
  misc_feature (671)..(671): "n" may be a, t, c, g, other or unknown
  misc_feature (682)..(682): "n" may be a, t, c, g, other or unknown
  misc_feature (691)..(691): "n" may be a, t, c, g, other or unknown
  misc_feature (709)..(709): "n" may be a, t, c, g, other or unknown
taatagactttttcttatcatatccctcatttctttccctgaaataaaaatacacacaagcaaaaaaaaatgatagtttcacatctcttagttcccttgcccaaacaagaatattcttagttccactggccaggattttcctacatagtcagaacttacacattactagaggcacacccaccaaggagtattgtgtctacttttatctgtgcaccagccacaaatacccacattggaaagacccatttgtgatgggtaaacatcccttcctgtctcccacaacccctgtgactgccctgcatgtgttcatgacctccgaaggcccaaattcatgaagcagcaaacccagcaaatctccacccccctgcctcaggacctctgctgaaganggggatgaagtgggtctccanggaagcantgggggccttgttggcaactctgcanttgggaagggcaccgtccggaagaaacagncctctacacaccccccactctacttatcatccctgctcacacacccttgtccaaggctttatgcctcggatttatttttcccaatccagaagnacagtgatanatgcnttttccccaggctgtctcaaaaaggtcgctcaatgtntactgttgtcaaaattgctgaaatctccccccccttttggtttttgcagcanttaaaaatctntccactgtnacttatttcctctctcangc

SEQ ID NO: 3029 - DNA, 666 bp, Homo sapiens
  misc_feature (190)..(190): "n" may be a, t, c, g, other or unknown
  misc_feature (464)..(464): "n" may be a, t, c, g, other or unknown
  misc_feature (490)..(490): "n" may be a, t, c, g, other or unknown
  misc_feature (620)..(620): "n" may be a, t, c, g, other or unknown
  misc_feature (634)..(634): "n" may be a, t, c, g, other or unknown
  misc_feature (637)..(637): "n" may be a, t, c, g, other or unknown
  misc_feature (643)..(643): "n" may be a, t, c, g, other or unknown
  misc_feature (665)..(665): "n" may be a, t, c, g, other or unknown
gtggcttgtggagtggcgaccgttagtgaggcggttgctgagacagacgctggaggcgggtaggaggagcccgagccgtaagggaagccgtgatgagggccgtgttgacgtggagagataaagccgagcactgtataaatgacatcgcatttaagcctgatggaactcaactgattttggctgccggaancagattactggtttatgacacctctgatggcaccttacttcagcccctcaagggacacaaagacactgtgtactgtgtggcatatgcgaaggatggcaagcgctttgcttctggatcagctgacaaaagcgttattatctggacatcaaaactggaaggcattctgaagtacacgcacaatgatgctatacaatgtgtctcctacaatcctattactcatcaactggcatcttgttcctccagtgactttgggttgtggtctcctgaacagaantctgtctccaaacacaaatcaagcancaagatcatctgctgcagctggacaaatgatggtcagtacctgactggggacagaaagtttccttctaccagctgaatggaaaacagattggaaaggatcgggcacagaactttgaccctgctgcatcanctactttactaaangcnaattcnttttgctggggggtcaaacaanc

SEQ ID NO: 3030 - DNA, 669 bp, Homo sapiens
  misc_feature (644)..(644): "n" may be a, t, c, g, other or unknown
  misc_feature (647)..(647): "n" may be a, t, c, g, other or unknown
  misc_feature (652)..(652): "n" may be a, t, c, g, other or unknown
tattccaacagtcatgagtacaaacaggccgtccatgagcttgtgcgttgcgtagcactgacaagaatttgctatggagactcacattggaaactagcagaggcacatgttaatctggctcaaggctacctccagctgaaaggactgtcactgcaagcaaaacaacatgcagaaaaagccagacaaatcctcgccaactccattgtgcctccctatagtgagaatacagatgttttcaagttttccattgagcttttccataccatgggcagagctttactctcccttcaaaagtatccttttgcctctaacttttacaaatagaaatactattcacgtaacacttacacgccaagtaaaaagctgatgctgatggatgacttaggaagtgtgattggaagtatgggagccaaggaagttcaggacatggggtgtagaatctagaaccaagtggaaaatttcctgaacacaattcagatttaaggaagctgcagagaatttgacaaaagcagagagactttcaaaggagctgctacaatgtggaagaattatgaaggaagaatggatagaaattgaagcacggatcagattatcatttgcacaggtgtatcaaggtcagaagaagtcaaaagaactttgtcccnctntccancactttgggaatatgtt

SEQ ID NO: 3031 - DNA, 568 bp, Homo sapiens
  misc_feature (551)..(551): "n" may be a, t, c, g, other or unknown
  misc_feature (558)..(559): "n" may be a, t, c, g, other or unknown
agatttgaaggcggcgcgcggactaagtgcgcacttcagttctcggagagaagagcgggagtggacctggtcagccctaccccactgaccccaccggacccaggcgcggcctccgccacagccacagcccctgcccctgctgcggcgcggcgaggcgaggcgatggccaaggtgtcggtgctgaacgtggcggtcctggagaacccgagccctttccacagccccttccggttcgagatcagcttcgagtgcagtgaaaccctggcggacgacctggagtggaaaatcatttatgttggctcggctgagagtgaggaatttgatcagatcctagactcggtgctggtgggccctgtgccagcagggaaacacatgtttgtctttcaggccgacgcccccaacccatccctcatcccagaaactgatgccgtgggtgtgactgtggtcctcatcacctgcacctaccatggacaggaattcctcccagtgggctactacgtctaccacgagtttactccaccctgaactgcgtttagaaaccccgccccatnaaacccnnatttctccc

SEQ ID NO: 3032 - DNA, 671 bp, Homo sapiens
  misc_feature (568)..(568): "n" may be a, t, c, g, other or unknown
  misc_feature (574)..(574): "n" may be a, t, c, g, other or unknown
  misc_feature (621)..(621): "n" may be a, t, c, g, other or unknown
  misc_feature (629)..(629): "n" may be a, t, c, g, other or unknown
  misc_feature (660)..(660): "n" may be a, t, c, g, other or unknown
  misc_feature (671)..(671): "n" may be a, t, c, g, other or unknown
actcactggggcttccttccgtctcgctcggagtttccctctgcgttcgctccgcgctgctggaggctgtcgtcccaatgctccccaaacggcggcgagcgcgggtcgggtcccctagcggcgatgccgcttcctccacgccgccctcgacgcgcttcccgggagtcgccatctacctggtcgagcctcgcatgggtcgcagccgccgggccttcctcacaggcctggcgcgctccaaaggcttccgcgtccttgacgcctgcagctccgaagcgacacatgttgtgatggaagagacctcagcagaggaggccgtcagctggcaggagcgcaggatggcagctgctcccccgggttgcacccccccagctctgctggacataagctggttaacagagagcctgggagctgggcagcctgtacctgtggagtgccggcaccgcctggaggtggctgggccaaggaaggggcctctgagcccagcatggatgcctgcctatgcctgccaacgccctacgcccctcacacaccacaacactggcctctccgaggctctggagatactggncgaggnaacaagctttgaaggcagtgagggccgcctcctcaacttctgcaaancaacctcngtgctcaaaggccttccagccctgtcacaancctgaagcaan

SEQ ID NO: 3033 - DNA, 366 bp, Homo sapiens
  misc_feature (357)..(357): "n" may be a, t, c, g, other or unknown
  misc_feature (361)..(361): "n" may be a, t, c, g, other or unknown
  misc_feature (365)..(365): "n" may be a, t, c, g, other or unknown
aaaaagggagagaggacaagggtgacaagtgggggtgagagatcaaagatggggcgggagtgtgcctagggttgtctctccatgagtgctctccttccctactcttcctgttccaggtgtagcgtcggaccatgtggaagtttctgaggctggggagccggataatggggggtggggcccgttggggggtaaaggggcaatagcttcctttcacaagctaacctccgctcttcccagtcctcttgactaaaatgggggaacacattgggcctggcaccaatggggactttgccccgccggagcccccgccgagaggaacccctgcccaaccctagggagcttctatgagctgcaccntctntgcnc

SEQ ID NO: 3034 - DNA, 495 bp, Homo sapiens
  misc_feature (340)..(340): "n" may be a, t, c, g, other or unknown
  misc_feature (370)..(370): "n" may be a, t, c, g, other or unknown
  misc_feature (403)..(403): "n" may be a, t, c, g, other or unknown
  misc_feature (410)..(410): "n" may be a, t, c, g, other or unknown
  misc_feature (412)..(412): "n" may be a, t, c, g, other or unknown
  misc_feature (442)..(442): "n" may be a, t, c, g, other or unknown
  misc_feature (490)..(490): "n" may be a, t, c, g, other or unknown
ctggaatgaggagctgcagacgacgagggagctgcctcgcaagaacctgcctgagcggctgctccgagaaagggccatattcaaggtgcacagcgacttcaccgcggcagccaccaggggcgccatggccgtcattgacggcaacgtgatggccatcaaccccagcgaggagaccaagatgcagatgttcatctggaacaacatcttcttcagcctgggcttcgacgtccgagaccactacaaggacttcgggggggacgtggcggcctacgtggcgcccaccaacgacctgaatggcgtccgcacgtacaacgcggtggacgtggaggggctgtacacnctgggcacggtggtggtggattaccgcggntaccgggtcacggcccagtccatcatccccggnatcctgnancgggaccaggagcagagcgtcatctacggntccatcgacttcggcaagaccgtggtgtcacacccgcggtacctgganctgct

SEQ ID NO: 3035 - DNA, 395 bp, Homo sapiens
  misc_feature (393)..(395): "n" may be a, t, c, g, other or unknown
taagtaacgtcagcctgagaactgagtagctgtactgtgtggcgccttattctaggcacttgttgggcagaatgtcacacctgccgatgaaactcctgcgtaagaagatcgagaagcggaacctcaaattgcggcagcggaacctaaagtttcagggggcctcaaatctgaccctatcggaaactcaaaatggagatgtatctgaagaaacaatgggaagtagaaaggttaaaaaatcaaaacaaaagcccatgaatgtgggcttatcagaaactcaaaatggaggcatgtctcaagaagcagtgggaaatataaaagttacaaagtctccccagaaatccactgttttaaccaatggagaagcagcaatgcagtcttcccattcggaatcgnnn

SEQ ID NO: 3036 - DNA, 568 bp, Homo sapiens
  misc_feature (551)..(551): "n" may be a, t, c, g, other or unknown
  misc_feature (553)..(553): "n" may be a, t, c, g, other or unknown
  misc_feature (565)..(565): "n" may be a, t, c, g, other or unknown
ggggctggactggcggagcaggtggggtccgcggccgccggagcgttccggtcggcgtctgggcatctcggcctcggcagaaagcgcgaccgccctgctgcgcggggcccgcggcgatgccgttcctgcacggcttccggaggatcatcttcgagtaccagccgctggtggatgcgattctgggctccctggggatccaggaccccgagcggcaggagtctctggaccggcccagttatgtcgccagcgaggagagccgaatccttgttctcactgagctgctggagaggaaagcccactctcccttttaccaggaaggcgtcagcaacgccctgctcaagatggctgagctggggctgacgcgggcggccgacgttctcttgcggcatggggccaatctcaactttgaagacccagtcacctactacacggccttgcacatcgccgtcctgcggaaccagccggacatggtggagctgctggtggcatcacggggccgacgttaatcggagggaccggatccacgagagtagccccttggacctggccancnaagaccttaacncct

SEQ ID NO: 3037 - DNA, 538 bp, Homo sapiens
  misc_feature (499)..(499): "n" may be a, t, c, g, other or unknown
  misc_feature (511)..(511): "n" may be a, t, c, g, other or unknown
  misc_feature (524)..(524): "n" may be a, t, c, g, other or unknown
gtaagtccagagagtttagtgtccacacctagactggaattgaaagacaccagcagaagtgatgaaagtccaaaaccaggaaaattccaaagaactcgtgtccctcgagctgaatctggtgatagccttggttctgaagatcgtgatcttctttacagcattgatgcatatagatctcaaagattcaaagaaacagaacgtccatcaataaagcaggtgattgttcggaaggaagatgttacttcaaaactggatgaaaaaaataatgcctttccttgtcaagttaatatcaaacagaaaatgcaggaactcaataacgaaataaatatgcaacagacagtgatctatcaagctagccaggctcttaactgctgtgttgatgaagaacatggaaaagggtccctagaagaactgaagcagaaagacttcttctaattgcaactgggaagagaacacttttgattgatgaattgaataaattgaagaacgaaggacctcngaggaagaatanggctagtcccccnagtgaatttatgcc

SEQ ID NO: 3038 - DNA, 483 bp, Homo sapiens
  misc_feature (22)..(22): "n" may be a, t, c, g, other or unknown
  misc_feature (45)..(45): "n" may be a, t, c, g, other or unknown
  misc_feature (161)..(161): "n" may be a, t, c, g, other or unknown
  misc_feature (216)..(216): "n" may be a, t, c, g, other or unknown
  misc_feature (241)..(241): "n" may be a, t, c, g, other or unknown
  misc_feature (248)..(248): "n" may be a, t, c, g, other or unknown
  misc_feature (391)..(391): "n" may be a, t, c, g, other or unknown
  misc_feature (403)..(403): "n" may be a, t, c, g, other or unknown
  misc_feature (415)..(415): "n" may be a, t, c, g, other or unknown
  misc_feature (433)..(433): "n" may be a, t, c, g, other or unknown
  misc_feature (455)..(455): "n" may be a, t, c, g, other or unknown
acgcggcggcgtgccagcctanccactctagcgacggcggggaanagtgtgtacgtggtgggggcttcctcggtggcgggcatggaggcttcgcgctgccggctcagtcccagcggcgacagtgtcttccatgaagaaatgatgaatatgcgacaggctangctggattatcagaggctactacttgagaagaggcaaaggaaaaagcgccttganccatttatggtgcagcccaatccanaagccangctacgtcgggcaaagccaagggccagtgatgagcacactcccttggtgaactgtcatactccccacagcaatgtcatcttacatggtattgatggtccaactgctgtcctgaaaccagacgaagttcatgctccatcagtangctcctctgttntggaagaagatnctgaaaacaccgtggatnctgcttccaagccaggacttcnggagcgtctccaaaagcatgatatctct

SEQ ID NO: 3039 - DNA, 534 bp, Homo sapiens
  misc_feature (10)..(11): "n" may be a, t, c, g, other or unknown
  misc_feature (170)..(170): "n" may be a, t, c, g, other or unknown
  misc_feature (224)..(224): "n" may be a, t, c, g, other or unknown
  misc_feature (242)..(242): "n" may be a, t, c, g, other or unknown
  misc_feature (269)..(269): "n" may be a, t, c, g, other or unknown
  misc_feature (300)..(300): "n" may be a, t, c, g, other or unknown
  misc_feature (313)..(313): "n" may be a, t, c, g, other or unknown
  misc_feature (325)..(325): "n" may be a, t, c, g, other or unknown
  misc_feature (375)..(375): "n" may be a, t, c, g, other or unknown
  misc_feature (408)..(408): "n" may be a, t, c, g, other or unknown
  misc_feature (460)..(460): "n" may be a, t, c, g, other or unknown
  misc_feature (486)..(486): "n" may be a, t, c, g, other or unknown
  misc_feature (501)..(501): "n" may be a, t, c, g, other or unknown
  misc_feature (504)..(504): "n" may be a, t, c, g, other or unknown
  misc_feature (531)..(531): "n" may be a, t, c, g, other or unknown
gatgaatgcnnaggaaaagcagcttggcaaattgttattatcaacccttactttgctaagcaagaaaactgaactgttacaagattacccttgaaatgtctaccacaaaatgttggtttctataaaaagtttggatatactgtatctgaagaaaactacatgtgtcggangtttctaaagtaaaaatcttgtacgaaaattgtcaaaggggctaatgctacaangctacactcttcctaaanttgaaatattttgttgctgcagccgantgacctccataaatactggactgaaaaaacnttgtaatactacnagtataatgacntttaaaaaattactttgggctggtgggacatgctgtgaatttagattacnaatgaatattataaaggggatgatttttaaccnaaggaatatatttttaacttgaatcttttcctgcattgtatttttctaaaantttggcttcctttcttggtaatccanaatttgggttataanganttatatgtctgctatctgtgttgctcnttt

SEQ ID NO: 3040 - DNA, 593 bp, Homo sapiens
  misc_feature (156)..(156): "n" may be a, t, c, g, other or unknown
  misc_feature (197)..(197): "n" may be a, t, c, g, other or unknown
  misc_feature (209)..(209): "n" may be a, t, c, g, other or unknown
  misc_feature (275)..(275): "n" may be a, t, c, g, other or unknown
  misc_feature (326)..(326): "n" may be a, t, c, g, other or unknown
  misc_feature (359)..(359): "n" may be a, t, c, g, other or unknown
  misc_feature (451)..(451): "n" may be a, t, c, g, other or unknown
  misc_feature (502)..(502): "n" may be a, t, c, g, other or unknown
  misc_feature (530)..(530): "n" may be a, t, c, g, other or unknown
  misc_feature (548)..(548): "n" may be a, t, c, g, other or unknown
  misc_feature (574)..(574): "n" may be a, t, c, g, other or unknown
  misc_feature (585)..(585): "n" may be a, t, c, g, other or unknown
gcgaggcccggtccctgcagcgggcgaaaggagcccgggcctggaggtttgcgtaccggtcgcctggtcccggcaccagcgccgcccagtgtggtttcccataaggaagctcttcttcctgcttggcttccacctttaacccttccacctggggancgtcctctaacacattcagactacaagtccagacccagganagcaaggcccanaaagaagtcaaaatggggtttatattttcaaaatctatgaatgaaagcatgaaaaatcaaaagganttcatgcttatgaatgctcgacttcagctggaaaggcagctcatcatgcanagtgaaatgagggaaagacaaatggccatgcanattgcgtggtctcgggaattcctcaaatattttggaactttttttggccttgcaccatctctttaacagctggagcgattaaaaaaaagaanccagccttcctggtcccgattgttccattaagctttatcctcccctaccantatgacttgggctatggaacccttttanaaagaatgaaaggtgaanctgaagacattctggaaacagaaaanaatttattgcngctgccaa

SEQ ID NO: 3041 - DNA, 689 bp, Homo sapiens
  misc_feature (513)..(513): "n" may be a, t, c, g, other or unknown
  misc_feature (537)..(537): "n" may be a, t, c, g, other or unknown
  misc_feature (606)..(606): "n" may be a, t, c, g, other or unknown
  misc_feature (612)..(612): "n" may be a, t, c, g, other or unknown
  misc_feature (614)..(614): "n" may be a, t, c, g, other or unknown
  misc_feature (623)..(623): "n" may be a, t, c, g, other or unknown
  misc_feature (674)..(674): "n" may be a, t, c, g, other or unknown
gaaaagctagtgaggggcggggcaggcggcgcggtgggggcgggccgagcccggaggccagatgagcggacacagccccacgcgcggggccatgcaggtggccatgaacggtaaggcccgcaaagaggcggtgcagactgcggctaaggaactcctcaagttcgtgaaccggagtccctctcctttccatgctgtggctgaatgccgcaaccgccttctccaggctggcttcagtgaactcaaggagactgagaaatggaatattaagcccgagagcaagtacttcatgaccaggaactcctccaccatcatagcttttgctgtagggggccagtacgttcctggcaatggcttcagcctcatcggggcccacacggacagcccctgcctccgggtgaaacgtcggtctcgccgcagccaggtgggcttccagcaagtcggtgtggagacctatggtggtgggatctggagcacctggtttgaccgtgacctgactctggctggacgcgtcantgtcaagtgccctacctcaggtcngctggagcagcaactggttgcacgtggagcggcccattcttcgcatcccacaacctgggcatccatccngcagcnanatatcaacnaagaaatttggggccaacacagagatgcatctaagtcccaattccttgccnaaaagcatccaagga

SEQ ID NO: 3042 - DNA, 657 bp, Homo sapiens
  misc_feature (529)..(529): "n" may be a, t, c, g, other or unknown
  misc_feature (649)..(650): "n" may be a, t, c, g, other or unknown
  misc_feature (654)..(654): "n" may be a, t, c, g, other or unknown
agagagagaggaatcggacgtgggcgaggggcggggtgtctggactggaacctctgggcccacatgccatggacaatattaccaggcagaaccaattctacgatacccaagtcatcaaacaagaaaacgagtcaggctacgagaggagaccactggaaatggagcagcagcaggcctatcgtccagaaatgaagacagagatgaagcaaggagcacccaccagcttcctcccgcctgaagcttctcaactcaagccagacaggcagcaattccagagtcgaaagaggccttatgaagaaaaccggggacgggggtactttgagcaccgagaggataagaggggccgctctcctcagcctcctgctgaagaggatgaagatgactttgatgatacccttgttgctattgacacctataactgcgacctccacttcaaggtggcccgagatcggagtagtggctatccgctcacaattgagggctttgcatacctgtggtcaggagcccgtgccagctatggggtcagaangggccgtgtatgcttcgagatgaagatcaatgaggaaatctccgtgaagcacttccgtctacagagcctgacccccacgtggtccgtatcggctggtccctggactcctgcaacacccanncttnggc

SEQ ID NO: 3043 - DNA, 526 bp, Homo sapiens
  misc_feature (479)..(480): "n" may be a, t, c, g, other or unknown
  misc_feature (493)..(493): "n" may be a, t, c, g, other or unknown
gtacgtggcgcgcgggtccggcgggcggttggcttgagcgggaccggagctgaggcaggaagagccggcgccatggtggagaaggaggaggctggcggcggcattagcgaggaggaggcggcacagtatgaccggcagatccgcctgtggggactggaggcccagaaacggctgcgggcctctcgggtgcttcttgtcggcttgaaaagacttggggctgaaattgccaagaatctcatcttggcaggagtgaaaggactgaccatgctggatcacgaacaggtaactccagaagatcccggagctcagttcttgattcgtactgggtctgttggccgaaatagggctgaagcctctttggagcgagctcagaatctcaaccccatggtggatgtgaaggtggacactgaggatatagagaagaaaccagagtcatttttcactcaattcaatgctgtgtgtctgacttgctgctccanngatgtcatagttnaagtggaccagatctgtcacaaaaatagcatca

SEQ ID NO: 3044 - DNA, 510 bp, Homo sapiens
  misc_feature (21)..(21): "n" may be a, t, c, g, other or unknown
  misc_feature (66)..(66): "n" may be a, t, c, g, other or unknown
  misc_feature (158)..(158): "n" may be a, t, c, g, other or unknown
  misc_feature (268)..(268): "n" may be a, t, c, g, other or unknown
  misc_feature (298)..(298): "n" may be a, t, c, g, other or unknown
  misc_feature (323)..(323): "n" may be a, t, c, g, other or unknown
  misc_feature (344)..(344): "n" may be a, t, c, g, other or unknown
  misc_feature (429)..(429): "n" may be a, t, c, g, other or unknown
  misc_feature (477)..(477): "n" may be a, t, c, g, other or unknown
  misc_feature (490)..(490): "n" may be a, t, c, g, other or unknown
  misc_feature (505)..(506): "n" may be a, t, c, g, other or unknown
gtgctttcccaagcctggaanaatcgtcatgctctttgtagcgtggtgcttctgttgctcacagangtgcctgcttccccttctgccatgattggaagtttcctgaggcctccccagccatgtggaactgacaacttgcctttgatgattttcaaganagttgtgctatgatgtggcaaaagtatgcaggaagcaggcggtcaatgcctctgggaacaaggatccttttccacggtgtgttctatgccgggggctttgccattgtgtnttacctcattcaaaagtttcattccagggntttatattacaagttggcagtggancagctgcagaaccatcccgangcacaggaagctctgggccctcctctcaacatccattatctcaagctcatcgacagggaaaacttcgtggacattgttgatgccnagttgaaaattcctgtctctggatccaaatcagaaggccttctctacntccactcatccanaagtggcccctttcnnaagt

SEQ ID NO: 3045 - DNA, 602 bp, Homo sapiens
  misc_feature (542)..(542): "n" may be a, t, c, g, other or unknown
  misc_feature (589)..(589): "n" may be a, t, c, g, other or unknown
  misc_feature (596)..(596): "n" may be a, t, c, g, other or unknown
aaaaaaaaaaaaaaaaagagcctggggcccaggactgcagcggcttcggaaggtgggctctgccagcgggaccatgctgctccgagccgcttggaggcgggcggcagtggcggtgacagcggctccagggccgaagcccgcggcgcccactcgggggctgcgcctgcgcgttggagaccgtgctcctcagtctgcggttcccgcagatacagccgctgccccggaggtggggccagtgctgcgacctctctatatggatgtgcaagctacaactcctctggacccccgggtgcttgatgccatgctcccttacctaatcaactactatgggaacccacactcccggacacatgcttatggctgggagagtgaggcagccatggaacgtgctcgtcagcaagtagcatctctgattggagctgatcctcgtgagatcatttttactagtggtgctactgaatccgacaacatagcaattaagggggtggcccgattctacaggtcacggaaaaagcacttgatcaccacccagacagaacacnaatttttcttggactcctgccgttccctggaaacttaaggctttcangtccctncctccc

SEQ ID NO: 3046 - DNA, 607 bp, Homo sapiens
  misc_feature (401)..(401): "n" may be a, t, c, g, other or unknown
  misc_feature (436)..(436): "n" may be a, t, c, g, other or unknown
  misc_feature (571)..(571): "n" may be a, t, c, g, other or unknown
  misc_feature (595)..(595): "n" may be a, t, c, g, other or unknown
  misc_feature (599)..(599): "n" may be a, t, c, g, other or unknown
ttatgtatactcaacattgtcttttctccattcgtgttggtcatcatagttttttctacactactctcttctcccttactccctcttttcacccttcctgtgttcttggtggggtttccccgacctattcagagttggccaggagcagcaggcaccacagcctgtgtgtgtgcagatacagtgtactactaccaaatggtgcccaggttgactgctgtactgcagactgcaatggcagctggaagtttaggtctcctcctacctggatctcattacttgggccgttttcaggatcgtttaatgtggataatgattctggaatgtggctatacttactgctctattaacattaaggggttagaattgcaggaaacatcctgtcatactgcagaagctcgcanagttgatgaagtttttgaagatgcttttgaacaanaatacacaagagtatgttcccttaatgaacactttggaaatgtcttgacaccctgtactgttttgcctgtgaaattgtattctgatgccaggaatgttctatcaggcataattgatctcatgaaaactttaaaanaatttaaaggtgaactcattaaantacntgtgtgga

SEQ ID NO: 3047 - DNA, 495 bp, Homo sapiens
  misc_feature (155)..(155): "n" may be a, t, c, g, other or unknown
  misc_feature (243)..(243): "n" may be a, t, c, g, other or unknown
  misc_feature (260)..(260): "n" may be a, t, c, g, other or unknown
  misc_feature (330)..(330): "n" may be a, t, c, g, other or unknown
  misc_feature (401)..(401): "n" may be a, t, c, g, other or unknown
  misc_feature (411)..(411): "n" may be a, t, c, g, other or unknown
  misc_feature (471)..(471): "n" may be a, t, c, g, other or unknown
  misc_feature (486)..(486): "n" may be a, t, c, g, other or unknown
  misc_feature (489)..(489): "n" may be a, t, c, g, other or unknown
gcgggggctgaggggctgccatggcggcggcgggccggctcccgagctcctgggccctcttctcgccgctcctcgcagggcttgcactactgggagtcgggccggtcccagcgcgggcgctgcacaacgtcacggccgagctctttggggccgangcctggggcacccttgcggctttcggggacctcaactccgacaagcagacggatctcttcgtgctgcgggaaaaaaatgacttaatcntctttttggcagaccanaatgcaccctattttaaacccaaagtaaaggtatctttcaagaatcacagtgcattgataacaagtgtantccctggggattatgatggaaattctcaaatggatgtccttctgacatatcttcccaaaaattatgccaanaatgaattangaactgttatcttctggggacaaaatcaaacattatatcctaacaatatgaccatactcnataagacttttcaanatnaccact

SEQ ID NO: 3048 - DNA, 659 bp, Homo sapiens
  misc_feature (9)..(9): "n" may be a, t, c, g, other or unknown
  misc_feature (318)..(318): "n" may be a, t, c, g, other or unknown
  misc_feature (372)..(372): "n" may be a, t, c, g, other or unknown
  misc_feature (477)..(477): "n" may be a, t, c, g, other or unknown
  misc_feature (494)..(494): "n" may be a, t, c, g, other or unknown
  misc_feature (542)..(542): "n" may be a, t, c, g, other or unknown
  misc_feature (578)..(578): "n" may be a, t, c, g, other or unknown
  misc_feature (611)..(611): "n" may be a, t, c, g, other or unknown
  misc_feature (628)..(628): "n" may be a, t, c, g, other or unknown
  misc_feature (638)..(638): "n" may be a, t, c, g, other or unknown
  misc_feature (645)..(645): "n" may be a, t, c, g, other or unknown
cattactanaaagaatcttacaaacaaagttgaaggatatagtttctttggtcccacgcctgcggcacatcatcactgttgatggaaagccaccgacctggtccgagttccccaagggcatcattgtgcataccatggctgcagtggaggccctgggagccaaggccagcatggaaaaccaacctcatagcaaaccattgccctcagatattgcagtaatcatgtacacaagtggatccacaggacttccaaagggagtcatgatctcacatagtaacattattgctggtataactgggatggcagaaaggattccanaactaggagaggaagatgtctacattggatatttgcctctggcccatgttctanaattaagtgctgagcttgtctgtctttctcacggatgccgcattggttactcttcaccacagactttagcagatcagtcttcaaaaattaaaaaaggaagcaaangggatacatccatgttnaaaccaacactgatggcagcagttccggaaatcatggatcgggatctncaaaaatgtcatgaataaagtccgtgaaatgaatanttttcaccgtaatctgtttattctgggcctatnattaccaaatggaacanatttcaaaangaagttntactccactgttgc

SEQ ID NO: 3049 - DNA, 728 bp, Homo sapiens
  misc_feature (661)..(661): "n" may be a, t, c, g, other or unknown
  misc_feature (672)..(672): "n" may be a, t, c, g, other or unknown
  misc_feature (675)..(675): "n" may be a, t, c, g, other or unknown
  misc_feature (710)..(710): "n" may be a, t, c, g, other or unknown
  misc_feature (727)..(727): "n" may be a, t, c, g, other or unknown
ttcaaatgtgatgagtgcggaaaggccttcagtcagagtacgagcctctgcatccaccagagagtccacacaaaggagagaaaccatctcaaaatatcagttatataaaacgttttgctaagagtttaaaatcttaaaacccataagtgccactaggaaggaaaccctgtatatacctacattgacccaagaaatatttacgcaatccctagcagaacattgtttctgaggaggcatatgtgagattgatttgttggttcatgccaagtgtgttccacaggttgactttgaatgtggacctctgagcatccacgcaggatggctctcaggtcccagtcacagacgtcgcttcctgggattccagcacgatgcctccatagttgaaagactacacaaaaagccacaatcattgcccggcctcctgagtcaccttctatctatactttgcttaaaagctatcccagatactcccccttggggagctcatgcccttccttcctctttattcgagcatactggcaatgcattgggaaaacagacagctcccactaagatcacgttctggtatttctgaagttaacacttgatttagcccctacatatctttccatatatcctattatttctgaatatatgtcctccaaatccccataaatatccntcccttcctanatnggctttaactttcattttaaattttaggtgactcntaattcccattcccttng

SEQ ID NO: 3050 - DNA, 602 bp, Homo sapiens
  misc_feature (379)..(379): "n" may be a, t, c, g, other or unknown
  misc_feature (386)..(386): "n" may be a, t, c, g, other or unknown
  misc_feature (434)..(434): "n" may be a, t, c, g, other or unknown
  misc_feature (462)..(462): "n" may be a, t, c, g, other or unknown
  misc_feature (476)..(476): "n" may be a, t, c, g, other or unknown
  misc_feature (510)..(510): "n" may be a, t, c, g, other or unknown
  misc_feature (541)..(541): "n" may be a, t, c, g, other or unknown
  misc_feature (589)..(589): "n" may be a, t, c, g, other or unknown
  misc_feature (598)..(598): "n" may be a, t, c, g, other or unknown
  misc_feature (601)..(601): "n" may be a, t, c, g, other or unknown
tttacaaggatctaaaaggaacaggattaaagatgactgaatactgggttccagaaatttaaaacaatcagcttagcaaatcatatattcttctgtggagctgagaattgatgtccgctcttccccgtgatttggaactttccaatcccagagaaaagttgacaaagggactgcccaggactgagtccatatggaagaagaacttcctcttttctctggagacagtggcaagccagtacaggctactctgtcatctttgaagaagttagatgtgggaaagtggccaattttttccctttgttctgaagaaaaactacagttaattcgtcaggcttgtgtctttggcagtgctggcaatgaagttttatacactacagtnaatgatnagatttttgtgcttggcacaaactgctgtggctgtttggggttaggtnacctccagagcaccattgaacctcgganactggattctttanatggcaaaaaaataccctgcctcagctatgggantggtccacatattgtccttgcacaacagaangaaaatctttacctggggtcctaatgcttatacccgcttggccatggngacaactantcnt

SEQ ID NO: 3051 - DNA, 670 bp, Homo sapiens
  misc_feature (108)..(108): "n" may be a, t, c, g, other or unknown
  misc_feature (549)..(549): "n" may be a, t, c, g, other or unknown
  misc_feature (593)..(593): "n" may be a, t, c, g, other or unknown
  misc_feature (596)..(596): "n" may be a, t, c, g, other or unknown
  misc_feature (608)..(608): "n" may be a, t, c, g, other or unknown
  misc_feature (648)..(648): "n" may be a, t, c, g, other or unknown
  misc_feature (661)..(661): "n" may be a, t, c, g, other or unknown
acttgtaaacattcctatgattgttactaaaatgtattttcatgtttaaaatgtttttggatattttgggttaataactactacattgaattgcatgttaaggtgcanaaataatacattaaaagattttcactttaaattaattagtaatattgagcgctcaccctgtgcgtggccttgtgctaaccattagcactgcatcatttcaattcttttataagggcattcaatactacaaaatcaacatgatttcataaggtgcaaataaaagttggtgacagatttaatataattttgatcacaatttacaaatgatctttgcaaatagtggtcagacggcattagtttttcccttagttaagctaaattaaagggactccctcctgttatgattatattattattattattattattatttttgaggtggagtttcactcttgttgcccaagctggagtgcaatggcgcgatctcggctcaccacaacatccgcctcctgggttcaagcgattctcctgcctcagcctcctgagtatctgggaatacangcatgcgccactacacctggctaatttttgtatttttagttganatngggttttccacnttggtcaggctggtctccaaactcctgacctcaggtgatnccgtccacctcancctcccaaa

SEQ ID NO: 3052 - DNA, 626 bp, Homo sapiens
  misc_feature (437)..(437): "n" may be a, t, c, g, other or unknown
  misc_feature (501)..(501): "n" may be a, t, c, g, other or unknown
  misc_feature (510)..(510): "n" may be a, t, c, g, other or unknown
  misc_feature (588)..(588): "n" may be a, t, c, g, other or unknown
  misc_feature (600)..(600): "n" may be a, t, c, g, other or unknown
  misc_feature (612)..(612): "n" may be a, t, c, g, other or unknown
  misc_feature (614)..(614): "n" may be a, t, c, g, other or unknown
  misc_feature (618)..(618): "n" may be a, t, c, g, other or unknown
tgtgaagtcaactttatcccagacagttccatccaaggggagaattaagtagagaaatttgtctgcaatctcaatctaaagacaaatctacgacaccaggaggaacaggaattaagcctttcctggaacgctttggagagcgttgtcaagaacatagcaaagaaagtccagctcgtagcacaccccacagaacccccattattactccaaatacaaaggccatccaagaaagattattcaagcaagacacatcttcatctactacccatttagcacaacagctcaagcaggaacgtcaaaaagaactagcatgtcttcgtggccgatttgacaagggcaatatatggagtgcagaaaaaggcggaaactcaaaaagcaaacaactagaaaccaaacaggaaactcactgtcagagcactcccctcaaaaaacaccanggtgtttcaaaaactcagtcacttccagtaacagaaaaggtgaccgaaaaccagataccagccnaaaattctngtacagaacctaaagaagtgatacgtgaaattgagatgaatgtggatgatgatgatatccatagttcgaaagttattnatgaactcttcngtgatgttctanangaangtgaactt

SEQ ID NO: 3053 - DNA, 483 bp, Homo sapiens
  misc_feature (204)..(204): "n" may be a, t, c, g, other or unknown
  misc_feature (347)..(347): "n" may be a, t, c, g, other or unknown
  misc_feature (361)..(362): "n" may be a, t, c, g, other or unknown
  misc_feature (437)..(437): "n" may be a, t, c, g, other or unknown
  misc_feature (457)..(457): "n" may be a, t, c, g, other or unknown
  misc_feature (459)..(459): "n" may be a, t, c, g, other or unknown
  misc_feature (462)..(462): "n" may be a, t, c, g, other or unknown
  misc_feature (470)..(470): "n" may be a, t, c, g, other or unknown
aggaatggaagtgaggagagaggagaggagaaggggaccagctctccggactatcggcactaccttcgaatgtgggccaaggagaaagaggctcagaaggagacgattaaggatcttcccaagatgaaccaggagcagttcatttgagctgtgcaagacgctttacaacatgttcagtgaagaccccatggagcaggacctgtnccacgccatcgccaccgtggccagcctcctgctccgcatcggagaggtggggaagaagttctcagcccgcacaggcaggaagcccagggactgtgccactgaggaggacgagccaccagcacccgaactgcatcaggacgcanccaggggagcttcnncccccagctgcaggagacccccaagccaaagcaggcggagacacacccctcggaacagccccacaggaaaaccangttgtggtggaagggggcancngcnaaggacanggctcaccctccc

SEQ ID NO: 3054 - DNA, 411 bp, Homo sapiens
  misc_feature (25)..(25): "n" may be a, t, c, g, other or unknown
  misc_feature (353)..(353): "n" may be a, t, c, g, other or unknown
  misc_feature (406)..(406): "n" may be a, t, c, g, other or unknown
  misc_feature (411)..(411): "n" may be a, t, c, g, other or unknown
gactgcagagccggggctgggctangcgcgcgcttggagagcattgcgcgcggctgggcccgcggccggcggctcctcctcccactctgctcctcctcttttttctcctcctccgcctcctcctccgcctcctcctcctcctcttcctcctcctcttcaattctcccggtggctcgactcggctcgcaggcttcggagaaacccctactccagtcgccgactcagcgcccaagagggtcgccttgggctgggggcgcaccccagggaggggaggggtccaggcagctgggccgccgcggacacctagcggcttcagggttaatcccgaccgcagccgtcgccgcctcgggcanattttgcgcccttgctttgcgccccgggcgctgaagccgggcgggcgattttnactgn

SEQ ID NO: 3055 - DNA, 514 bp, Homo sapiens
  misc_feature (150)..(150): "n" may be a, t, c, g, other or unknown
  misc_feature (363)..(363): "n" may be a, t, c, g, other or unknown
  misc_feature (450)..(450): "n" may be a, t, c, g, other or unknown
  misc_feature (472)..(472): "n" may be a, t, c, g, other or unknown
  misc_feature (498)..(498): "n" may be a, t, c, g, other or unknown
  misc_feature (507)..(507): "n" may be a, t, c, g, other or unknown
  misc_feature (510)..(510): "n" may be a, t, c, g, other or unknown
ttttacaaaacgctctccttgttgaagaagaaggacccccgcatttatcagaaagatgccaccttctataacagaacagcatcgtcatcagacagtgaggaggacccagaagccttggagaagcagaagaaagtgcggcccatgtacctnaaggactacgagaggaaggttatcttggagaaggcaggcaaatatgttgatgaggagaactcagacggggagacttccaatcacagactccaggagacatcgtcgcaaagttatgtggaggaacagaaacagctcaaggaaagcttccgggcatttgtggaggacagtgaggacgaggacggcgctggggagggcggctccagtttgctgcanaaacgtgccaaaaccaggcaggagaagcccaggaggaggccgactacatcgagtggctgaagggacagaaagagattcggaacccanattccctgaaggaactgacgcntctcaaggaatactggaacgaccctnaattggatnaanggga

SEQ ID NO: 3056 - DNA, 527 bp, Homo sapiens
  misc_feature (257)..(257): "n" may be a, t, c, g, other or unknown
  misc_feature (302)..(302): "n" may be a, t, c, g, other or unknown
  misc_feature (332)..(332): "n" may be a, t, c, g, other or unknown
  misc_feature (401)..(401): "n" may be a, t, c, g, other or unknown
  misc_feature (432)..(432): "n" may be a, t, c, g, other or unknown
  misc_feature (485)..(485): "n" may be a, t, c, g, other or unknown
  misc_feature (502)..(502): "n" may be a, t, c, g, other or unknown
  misc_feature (515)..(515): "n" may be a, t, c, g, other or unknown
  misc_feature (525)..(525): "n" may be a, t, c, g, other or unknown
caatgttcccgagcctgatggacatatcatatcaccactgttggcaggattttatatgttttggaccatgatcattttgttacaggtcttgattcctatttctctctatgtttccatcgaaattgtgaagcttggacaaatatatttcattcaaagtgatgtggatttctacaatgaaaaaatggattctattgttcagtgccgagccctgaacatcgccgaggatctgggacagattcagtacctcttttccgatnagacaggaaccctcactgagaataagatggtttttcgaagatgtngtgtggcaggatttgattactgccatgaanaaaatgccaggaggttggagtcctatcaggaagctgtctctgaagatgaagattttatagacacagtcngtggttccctcagcaatatggcaaaaccganagcccccagctgcaggacagttcataatgggcctttggggaaataagccctcnaatcatcttgctggganctcttttactctnggaagtgganaa

SEQ ID NO: 3057 - DNA, 572 bp, Homo sapiens
  misc_feature (119)..(120): "n" may be a, t, c, g, other or unknown
  misc_feature (503)..(503): "n" may be a, t, c, g, other or unknown
  misc_feature (535)..(535): "n" may be a, t, c, g, other or unknown
  misc_feature (537)..(537): "n" may be a, t, c, g, other or unknown
  misc_feature (559)..(559): "n" may be a, t, c, g, other or unknown
  misc_feature (571)..(571): "n" may be a, t, c, g, other or unknown
aataaagctaagctgcgtgggtaacttctttttagttatataacagagtgttatatgattttttatgttcacctgctaagaacatatacgtttgaaatgtgtgatattgttaacgtttnnccttgagaagatatatggaatagatcttacgatcccattttgatctgtttcttgcagaatgcagttcttcatgttcagttcaattaaaagatgtttgaaatggtctaatctggctggcctctttggagcaatgagcgtttgttttgttgaatgagggactgaatgatgatttagttactcagctaatctagtgtcctgagaaaaatgtgagttgttattgcctctgaagagtaaacggttcactactgctgttccagaatgtttggacttaagacagtttgttgagagagatagaagatttggttaggtttagactttccacctgccggctcgcattaacagcagtgagggtggcgaggactgccttatttggcgcgctcccnatgttccaggcacactgctttggtgctttaanangctgcttcacgtaatctccccngcagcctcagana

SEQ ID NO: 3058 - DNA, 487 bp, Homo sapiens
  misc_feature (51)..(51): "n" may be a, t, c, g, other or unknown
  misc_feature (190)..(190): "n" may be a, t, c, g, other or unknown
  misc_feature (199)..(199): "n" may be a, t, c, g, other or unknown
  misc_feature (249)..(249): "n" may be a, t, c, g, other or unknown
  misc_feature (316)..(317): "n" may be a, t, c, g, other or unknown
  misc_feature (354)..(354): "n" may be a, t, c, g, other or unknown
  misc_feature (435)..(435): "n" may be a, t, c, g, other or unknown
  misc_feature (465)..(465): "n" may be a, t, c, g, other or unknown
  misc_feature (475)..(475): "n" may be a, t, c, g, other or unknown
ggactgagcaccttcgacttccgcacgggcaagatgcttatgagcaagatnaacaagagccgccagcgcgtgcgctacgactcctccaaccaggtcaagggcaagcccgacctgaacacggcgctgcccgtgcgccagacggcgtccatcttcaagcagccggtgaccaagattaccaaccaccccagcnacaaggtcnagagcgacccgcagaaggcggtggaccagccgcgccagctcttctggganaagaagctgagcggcctgaacgccttcgacattgctgaggagctggtcaagaccatggacctccccnngggcctgcagggggtgggacctggctgcacggatganacgcttctgtcggccatcgccagcgccctgcacactagcaccatgcccatcacgggacagctctcggccgccgtggaaaanaaccccggcgtatggctcaacaccacgcancccctgtgcnaagcttcatggt

SEQ ID NO: 3059 - DNA, 530 bp, Homo sapiens
  misc_feature (36)..(36): "n" may be a, t, c, g, other or unknown
  misc_feature (54)..(54): "n" may be a, t, c, g, other or unknown
  misc_feature (242)..(242): "n" may be a, t, c, g, other or unknown
  misc_feature (401)..(401): "n" may be a, t, c, g, other or unknown
  misc_feature (464)..(464): "n" may be a, t, c, g, other or unknown
  misc_feature (506)..(506): "n" may be a, t, c, g, other or unknown
  misc_feature (525)..(525): "n" may be a, t, c, g, other or unknown
agcgaccgaactctggcggtggtggttaagacggcnaaggcggcagcggcggcnacagctctggggtttgcgtctcggggtgtgtcggccgccgctgctgcttgggcctggtatgtacagatggctggttaggattctcggcaccattttccgtttctgcgaccggtcggtgccccctgcccgggccctcctgaagaggcggcgctcacacagcactctgttttctacagtggacactgatnaaataccagccaaaagaccaagattagattgctttattcaccaagtgaaaaacagtctctacaatgctgccagcttatttggattcccattccagctgaccacaaagcccatggtaacttctgcttgtaatggaacacggaatgtggccccttcagganaggtattttcgaactcttcatcttgtgaactgacaggttctggatcctggaaacaacatgctnaaactgggttataaatctcctaatggaataagtgactatccnaagatcagagtgacagttncccca

SEQ ID NO: 3060 - DNA, 575 bp, Homo sapiens
  misc_feature (573)..(575): "n" may be a, t, c, g, other or unknown
gatccggaagtcggagcctagctgcgcgagagtttctgctcgctcaaccgagttgtcgtgttgccctcgcttctcagatccccgccggaagtgaagagagcaagcagatttgaacctatctgctttcaagctggtcatcatgatgaaacttagacacaaaaataaaaagccaggtgaaggttccaagggccacaagaagataagttggccctaccctcagcctgcaaagcaaaatgggaagaaagcaacctccaaagtgccctctgcacctcattttgttcaccccaatgatcatgccaatcgagaggctgaattaaagaagaagtgggttgaggagatgagggagaagcagcaagccgcccgggagcaagaaagacaaaaacgcaggaccattgagagctactgtcaggatgtcctaagacgccaggaggagtttgagcataaggaggaagttttgcaggaattaaatatgtttcctcagctggatgacgaggccacgaggaaggcttattacaaggagttccgtaaggtggtggaatactctgatgtgattctggaagtcctggatgcccnnn

SEQ ID NO: 3061 - DNA, 704 bp, Homo sapiens
  misc_feature (10)..(10): "n" may be a, t, c, g, other or unknown
  misc_feature (278)..(278): "n" may be a, t, c, g, other or unknown
  misc_feature (325)..(325): "n" may be a, t, c, g, other or unknown
  misc_feature (547)..(547): "n" may be a, t, c, g, other or unknown
  misc_feature (579)..(579): "n" may be a, t, c, g, other or unknown
  misc_feature (582)..(582): "n" may be a, t, c, g, other or unknown
  misc_feature (633)..(633): "n" may be a, t, c, g, other or unknown
  misc_feature (665)..(665): "n" may be a, t, c, g, other or unknown
  misc_feature (689)..(689): "n" may be a, t, c, g, other or unknown
  misc_feature (696)..(696): "n" may be a, t, c, g, other or unknown
  misc_feature (704)..(704): "n" may be a, t, c, g, other or unknown
aattttcacntatttccttcaacgtccacagctgaatcctcaccagctgctaatgtttctgtaatggatggaaagatgcaaccaaacagctttccgtggcagtcccctttaccatgcagcaatagcctccctgcaacgtgcacaactggccagagtaaagtggcagcctggttacaggactcggaagagatggacaggtgtgcagaagatcttgcacattgccagtcaaaccttgtggaacttagcaaactcctgcaaaatttggaaatacttcaganaactcagtcagcacctaactttactgacatgcaggctaactgtgtanatatttcaaagaaagacaagcgggtcacaagacgatggagaacaaaaggtgtcagcaaagatacaaaaatacaactgcaggttcctttcagtgctaccatgtcaccagttcgcttgcattcctccaaccccaacctttgtgcagatattgaatttcagactccccctagccacctcactgaccctctggaaagttcaacagattatacaaagctgcaagaanaattttgtctaatccgcacagaaaagtttggnccnattttttccctcctttttttggaaaagttctgccatttaaataagccatangctattagaaaaaggagaagctgaaagccaanatggtttccgaagcaggatcacanttaaaanggccacan

SEQ ID NO: 3062 - DNA, 465 bp, Homo sapiens
  misc_feature (8)..(8): "n" may be a, t, c, g, other or unknown
  misc_feature (320)..(320): "n" may be a, t, c, g, other or unknown
  misc_feature (326)..(326): "n" may be a, t, c, g, other or unknown
  misc_feature (372)..(372): "n" may be a, t, c, g, other or unknown
  misc_feature (393)..(393): "n" may be a, t, c, g, other or unknown
  misc_feature (419)..(419): "n" may be a, t, c, g, other or unknown
  misc_feature (421)..(421): "n" may be a, t, c, g, other or unknown
  misc_feature (447)..(447): "n" may be a, t, c, g, other or unknown
ctctggcnggtggcggtgttgaaggcgaaagcttgcttggcccgtgtcgcttctgtcccaagaaccggacggagagtgagggcacgagggtcgctgtcgggggctgtcgtcttccacgtacacgtcgtcgtgaggagcgcagtccggactcttcccgcaacccctccggctccctttccgcacgcctcgaggcggcggcggccaccgagacagcagcgcaccttcccccatcccttccccttatcccccagcccaaaagggcccggtctgcgccccacccccgcccgtccgcccgctacgccgccgccatgtcggcgcangcccanatgcgcgcgatgctggaccagttgatgggcacctcccgggacaganatacaactcgtcaacgaatcnaattcagtgatgacagagtatgcaanantcaccttctcaactgttgtcctcatnatgtcctttctggaacta

SEQ ID NO: 3063 - DNA, 684 bp, Homo sapiens
  misc_feature (541)..(541): "n" may be a, t, c, g, other or unknown
  misc_feature (630)..(630): "n" may be a, t, c, g, other or unknown
  misc_feature (669)..(669): "n" may be a, t, c, g, other or unknown
  misc_feature (673)..(673): "n" may be a, t, c, g, other or unknown
cttccggggaccaggcccgcttttggctgcatcagccggggattgccggcgccaggcatctgcatctgggaccgacctcctgggctggctgatcaaagaggaagcagcagcaatgtctgctgtgggggctgcaactccatacctgcatcatcctggtgatagtcacagtggccgagtgagtttcttgggggcccagcttcctccagaggtggcagcaatggcccggctactaggggacctagacaggagcacgttcagaaagttgctgaagtttgtggtcagcagcctgcagggggaggactgccgagaggctgtgcagcgtcttggggtcagcgccaacctgccggaggagcagctgggtgccctgctggcaggcatgcacacactgctccagcaggccctccgtctgccccccaccagcctgaagcctgacatcttcagggaccagctccaggagctctgcatcccccaagacctggtcggggacttggccagcgtggtatttgggagccagcggcccctccttgattctgtggcccancagcagggggcctggctgccgcatgttgctgactttcggtggcgggtggatgtacaatctccaccagtgccctggctcgctccctgcanccgagcgtcctgatgcactgaaactttcagatgggtccncatnccgcttttgaa

SEQ ID NO: 3064 - DNA, 693 bp, Homo sapiens
  misc_feature (218)..(218): "n" may be a, t, c, g, other or unknown
  misc_feature (271)..(271): "n" may be a, t, c, g, other or unknown
  misc_feature (408)..(408): "n" may be a, t, c, g, other or unknown
  misc_feature (433)..(433): "n" may be a, t, c, g, other or unknown
  misc_feature (483)..(483): "n" may be a, t, c, g, other or unknown
  misc_feature (535)..(535): "n" may be a, t, c, g, other or unknown
  misc_feature (566)..(566): "n" may be a, t, c, g, other or unknown
  misc_feature (598)..(598): "n" may be a, t, c, g, other or unknown
  misc_feature (609)..(609): "n" may be a, t, c, g, other or unknown
  misc_feature (620)..(620): "n" may be a, t, c, g, other or unknown
  misc_feature (678)..(678): "n" may be a, t, c, g, other or unknown
  misc_feature (692)..(692): "n" may be a, t, c, g, other or unknown
ggaaaaaaatgagagacctctgcctacaaaacctcaaaccagtcacttttgtcaattgctaatacccagttacttatgatttaaaaacaaccaacagaaaacatcccactgactgtatggcactctatagtcaaaaaaggaaacttccttattgggacttttctttcttagtccagttgtgttgacacatatgaacacagacaaagtgctatgcggangaaagcaagtgttggtcagtagtttcatgttttagggagtggttcctgtgganatcagaaagtgacatttgctttcggtactgtaatacgtgcaccaaactgcctcaatcctaggtaacgagggcaacagggagcacctgtctggattgtttttaaacctccatactcaagctgtctcttcggcagggangtgaatactcttgaaaggccaacancaagtgtttgtgggacacaacacagataattttttcttaagtcggccaanatgtacttctctgtgtgcacacccatgcacactcatgcacacagatacatangtctgtatggctgtatttgctgttgattcanactttcacaccattaatggggaaaagcgtggncacaaaaacanatgctaggaancttggcttcctcttcttgttgaccttttttgaaccaacctcttttttattatattcanaatatgtttttaant

SEQ ID NO: 3065 - DNA, 516 bp, Homo sapiens
  misc_feature (18)..(18): "n" may be a, t, c, g, other or unknown
  misc_feature (21)..(21): "n" may be a, t, c, g, other or unknown
  misc_feature (186)..(186): "n" may be a, t, c, g, other or unknown
  misc_feature (279)..(279): "n" may be a, t, c, g, other or unknown
  misc_feature (317)..(317): "n" may be a, t, c, g, other or unknown
  misc_feature (430)..(430): "n" may be a, t, c, g, other or unknown
  misc_feature (457)..(457): "n" may be a, t, c, g, other or unknown
  misc_feature (491)..(492): "n" may be a, t, c, g, other or unknown
  misc_feature (508)..(508): "n" may be a, t, c, g, other or unknown
gtccggcgcgcagaggangangagaaagctgaccgcttaggcccgggtagtggtcgtcgtggttttccttgtagttcgtggtctgagaccaggcctcaagtggaaacggcgtcaccatgatcgcacggcggaacccagaacccttacggtttctgccggatgaggcccggagcctgcccccgcccnagctgaccgacccgcggctcctctacatcggctttcttgggctactgctccggcctgaattgaataacttgatccggcggaaggccaatcccnaacgggtggtttgcatccccagcttctatatatttacnggcctttttttttggctgggaatattatccttgttaaaactttaaaaactaacctgttttgctttgaagggaaccgtgaaatttttgggaatattttgaaatttccttcccanaaggaatttccctgaaaaaaaaataanaaaaccttttgttgaaattttttaaaaattcccnnccattcctttaaattntccaaatt

SEQ ID NO: 3066 - DNA, 882 bp, Homo sapiens
  misc_feature (79)..(79): "n" may be a, t, c, g, other or unknown
  misc_feature (548)..(548): "n" may be a, t, c, g, other or unknown
  misc_feature (551)..(551): "n" may be a, t, c, g, other or unknown
  misc_feature (592)..(592): "n" may be a, t, c, g, other or unknown
  misc_feature (699)..(699): "n" may be a, t, c, g, other or unknown
  misc_feature (702)..(702): "n" may be a, t, c, g, other or unknown
  misc_feature (792)..(792): "n" may be a, t, c, g, other or unknown
  misc_feature (811)..(811): "n" may be a, t, c, g, other or unknown
  misc_feature (833)..(833): "n" may be a, t, c, g, other or unknown
  misc_feature (872)..(872): "n" may be a, t, c, g, other or unknown
  misc_feature (875)..(875): "n" may be a, t, c, g, other or unknown
tacaccacatgcagtttacatctgtcttaactactccttcccaggtaaattccaattatatttgacatccagctaaganggcccatctcttctcacctctttcctagtcagtatattcagcaaatatttattgagcccttactgtgggcaaatcattgtactggataattgagaaaaatagataattcccttattcagtaaatgtctactgagcacaatctagtgaatcattacagtatggcctcattgttttgtttgaggtgtgttattcataacaatattttacaccattcgtatcaatgtaattatagaacacaatatacgatcaaggataagtaattgtgtggttatctgccatttaaaagtatccagtatttgatcacattattatatataatgaaaaaatgatttaatctgtaataaactggtttattgtgcagtgactgtaatatactaaagttataataaattgtttactctgcctcaccaaacacatgctaggatataacccccaaaataagtatttaactttgcattaggtataaagnganactgggtgctataattaaattattttgaggcagacagaaanctgttatcctaactgatttaatatgttctgtaattgaaaaaatgttcaccaaattatactttttagtgatttacatgttacattttataggggacatgttctgtttntanccaataaataacttttatagtatcacaaaatgtttttggatccctaatttcttattaagaatatgaagtttcttacctataccttgattnctcccatttgaatttgtcnctttttgccacatacttaaacnttccattttaaaattaactaaaaatcctggaaattgaanttnaaccttt

SEQ ID NO: 3067 - DNA, 482 bp, Homo sapiens
  misc_feature (166)..(166): "n" may be a, t, c, g, other or unknown
  misc_feature (250)..(250): "n" may be a, t, c, g, other or unknown
  misc_feature (387)..(388): "n" may be a, t, c, g, other or unknown
  misc_feature (455)..(455): "n" may be a, t, c, g, other or unknown
  misc_feature (457)..(457): "n" may be a, t, c, g, other or unknown
  misc_feature (463)..(463): "n" may be a, t, c, g, other or unknown
ggaagggcggcgcgcttaggcaggcggtggcgcggctggagtgccgcggggagggctgtgccggttgctttctgcagccgcatctcggccagctctcctcgccgtccccggggcgctgtgcgtctccagtccgggaccgaagccgcctgccgtagcgggcggccanatccgcgtcccgcctcagcggccggaggacatgcgggagagagaatgagccagagggacacgctggtgcatctgtttgccggangatgtggtggtacagtgggagctattctgacatgtccactggaagttgtaaaaacacgactgcagtcatcttctgtgacgctttatatttctgaagttcagctgaacaccatggctggagccagtgtcaaccgagtnntgtctcccggacctcttcattgcctaaaggtgatcttggaaaaagaagggcctcgttccttgtttanangactangccccaatttagtgggggt

SEQ ID NO: 3068 - DNA, 664 bp, Homo sapiens
  misc_feature (618)..(618): "n" may be a, t, c, g, other or unknown
  misc_feature (623)..(623): "n" may be a, t, c, g, other or unknown
  misc_feature (626)..(626): "n" may be a, t, c, g, other or unknown
gtataaatcccagctgatccgcggcttattagagaacaacctgggagaacccatagaggaatttatgcggccttatgatttacaagatccaagaattcatactgtcctgagtggagaagtgtacacctgtatgtgcttcctcattgatatggtgaatgtaagtctggagcttaaagatccaaaaagaaaagaaggtgctgggtccctagccagatttgacttcaagaaatgcaaactgctctatgaaagtttttccaaccaaaccaagtccattaacttggtttcccattccatgatggcttttgacacccgttatgctgggcagaagaccagccctggcatgacgaatgtgttcagctgtatctttcagcccgctaagaacagcagcaccacccaagggtccattcagattgaactacatttcagatctaccaaggattcctcctgctttacagtagttctcaacaatctccgtgtgtttctcatatttgactggctactgttagtccatgattttctccacactcccagtgatattaagaaacaaaatcatgttactccttctcgccaccgtaactctagcagcgaatctgctatagttcccaaaactgtgaagantggantanttaccaagcggtctcccttcctgtgttcaatgaaaggc

SEQ ID NO: 3069 - DNA, 744 bp, Homo sapiens
  misc_feature (272)..(272): "n" may be a, t, c, g, other or unknown
  misc_feature (375)..(375): "n" may be a, t, c, g, other or unknown
  misc_feature (536)..(536): "n" may be a, t, c, g, other or unknown
  misc_feature (573)..(573): "n" may be a, t, c, g, other or unknown
  misc_feature (631)..(631): "n" may be a, t, c, g, other or unknown
  misc_feature (635)..(635): "n" may be a, t, c, g, other or unknown
  misc_feature (651)..(651): "n" may be a, t, c, g, other or unknown
  misc_feature (708)..(708): "n" may be a, t, c, g, other or unknown
  misc_feature (710)..(710): "n" may be a, t, c, g, other or unknown
  misc_feature (736)..(737): "n" may be a, t, c, g, other or unknown
aaagctagttgagagagcatactctggtttttcatctctcacagtagtcaaagaagttacatatacaattagaatttgttgtttctgttgccagaaactcaatacaatttgtcacatcaggaaaggttttttgttgttattgttgttgtttttgagacggaatttcacttcactcttgttgcccaggctggagtgcaatggcgcgatctcggctcaccacaacccccacctcccaggttcaagcgattctcctgcctcagcctcccaagtanctggaattacaggctttgtcactacgcctggctaattttgtatttttagtagagatggggtttctccatgttggtcctgctggtgtccaactcccaacctcangtgatccgcctgcctcagcctcccaaagtgctgcgattacaggcgtgagccactgcacctggcccaggaaaagttttttacatacgaattaaagatgcttctttatgcaaatttttaaaccccaggtttgaagtaggataaaaggtaacattaaatctganatcatttctagctctggaattctgtgattgtaatganttttgatttctaaatgttttttcctttcataatttcagggttagtcagcaacataaantccncctaatgacagcaganaacttatccatctgtttttgggccacctttgaagaaaactgattttgaaaaatcganantttctgtctactactaaaaatcctcnntctgttg

SEQ ID NO: 3070 - DNA, 740 bp, Homo sapiens
  misc_feature (378)..(378): "n" may be a, t, c, g, other or unknown
  misc_feature (562)..(562): "n" may be a, t, c, g, other or unknown
  misc_feature (580)..(580): "n" may be a, t, c, g, other or unknown
  misc_feature (648)..(648): "n" may be a, t, c, g, other or unknown
  misc_feature (691)..(691): "n" may be a, t, c, g, other or unknown
  misc_feature (701)..(701): "n" may be a, t, c, g, other or unknown
  misc_feature (704)..(704): "n" may be a, t, c, g, other or unknown
  misc_feature (720)..(720): "n" may be a, t, c, g, other or unknown
gtgcgtacgtgcgtcgtctctatggtggcggcggatttggagggaccctacgaaccaggagtcaggcgagccgatctggggctgcaggatgttccgctgggagcgctccattcccctgcgaggctcggccgccgccctgtgcaacaacctcagtgtgctgcagctgccggctcgcaacctcacgtattttggcgtggttcatggaccaagcgcccagcttctcagcgctgctcctgagggtgtgcccttggcccagcgccagctccacgctaaggagggtgctggagtgagtcccccacttatcactcaggtccactggtgtgtcctccccttccgagtgctgctggtactcacctcacatcgaggaatacagatgtncgagtccaatggctacaccatggtctactggcatgcactggactctggagatgcctccccagtacaggctgtgtttgcccggggaattgctgccagtggccacttcatctgtgtgggaacgtggtcaggccgggtgctggtgtttgacatcccagcaaagggtcccaacattgtactgaacgangaactggctgggcaccanatgccaatcacagacattgccaccgaacctgccccaaggaacaggattgtgtggctgacatggtgacngcaaataactccaggcttgcttttgtttctggcggtccagggncaaaaattcncanttattgaaccccattnccaagaatttgggaatttcc

SEQ ID NO: 3071 - DNA, 725 bp, Homo sapiens
  misc_feature (628)..(628): "n" may be a, t, c, g, other or unknown
  misc_feature (651)..(651): "n" may be a, t, c, g, other or unknown
  misc_feature (667)..(667): "n" may be a, t, c, g, other or unknown
  misc_feature (669)..(669): "n" may be a, t, c, g, other or unknown
  misc_feature (724)..(724): "n" may be a, t, c, g, other or unknown
gaacaagggaaatgagcaaagtaagaagacaccaattgagaaatctgattttgctgctgctacacatcctcgtgctttttacctcagtaaaccagatgaaactccaaatgcttggatgtctgattcaggaacaggattgacttactggaaactagaggaaaaggatatgcaccactctttgcctgaaactttagagaagacgttcatatcattgtcttccacagatgtgtcaccaaaccagtctaatactagtaatgagatgaagctaccgtcactgaaggatatttattataaaaaacaaagggaaaacaagcagttacctgagaggaatctcacttctgcttccaacccaaatcatccaccagaggtcctgactctagatcctacgttacacatgaagccaaagcagcagatttcagggattcaacctcacggccttccgaatgcccttgatgacagaatatccttttccccggactctgttctagagcctagtatgtctagtccctctgacatagactcattttcacaagcaagttatgtcacttctcagttacctggatttccaaaatatccctcacacacaaaagcttctccggtgggactcttgggaaaaatccgacttccnaaacgaaagttggaacagttccncctttccgtccgtttntncccttactagttatgatatctcccgtccaccctgttaattaaaaaaacactgtcnt

SEQ ID NO: 3072 - DNA, 633 bp, Homo sapiens
  misc_feature (625)..(625): "n" may be a, t, c, g, other or unknown
  misc_feature (627)..(628): "n" may be a, t, c, g, other or unknown
agagcggccgcggctcccccgcacctgcggccatggatgaggagcgcgccctctacatcgtccgggccggcgaagcaggggctatcgagcgggtcctgagggattacagcgacaagcatagggctactttcaaatttgaatcaacagatgaagataaaagaaagaaactctgtgaaggcatatttaaagtccttataaaggacatcccaacaacatgtcaagtgtcctgcctggaagtactccgcattctctccagagacaaaaaggttttagttcctgtgacaactaaggaaaatatgcagatactgctgcgactagccaagctaaatgagttagatgattctttggagaaagtatcagagttcccagttattgtggagtcattaaaatgtctgtgtaatatagtgttcaacagtcagatggcacagcagctcagcctggaacttaatcttgctgcaaagctctgtaacctcctgagaaagtgcaaggaccggaaatttatcaatgacattaagtgctttgacttgcgcttgctcttccttctgtcacttttgcacaccgacatcaggtcacaattgcgctatgagctccagggactaccgctgctaacgcgaatcttggaaantnncttta

SEQ ID NO: 3073 - DNA, 717 bp, Homo sapiens
  misc_feature (412)..(412): "n" may be a, t, c, g, other or unknown
  misc_feature (462)..(462): "n" may be a, t, c, g, other or unknown
  misc_feature (497)..(497): "n" may be a, t, c, g, other or unknown
  misc_feature (557)..(557): "n" may be a, t, c, g, other or unknown
  misc_feature (563)..(563): "n" may be a, t, c, g, other or unknown
  misc_feature (648)..(648): "n" may be a, t, c, g, other or unknown
  misc_feature (682)..(682): "n" may be a, t, c, g, other or unknown
  misc_feature (696)..(696): "n" may be a, t, c, g, other or unknown
  misc_feature (706)..(706): "n" may be a, t, c, g, other or unknown
  misc_feature (716)..(716): "n" may be a, t, c, g, other or unknown
cgatgaattcagccgaatcccaagaaccatatcgagccctgctgctacccaagccagtgtccccgacgacagcagttcccggaggtgcagcgcgcctggggcgagcccgaaggagaggcatcctgacagccgccagcgggagagaggtggaggccccaagaagccgtggaaatgcggggactgcgggaaggccttcagctactgttccgcgttcatcttacaccagagaatccacaccggggagaagccatttgcgtgccccgagtgcggcaaggccttcagccagagcgtgcacctgaccctgcaccagcgcacgcacacgggcgagaagccctacgcctgccacgagtgcggcaaggccttcagccagggctcgtacctggcgtcccactggcgcacgcacacgggcganaagccgcaccgctgcgccgactgcggcaaggccttcacgcgcgtcacgcncctgacccagcaccggcgcgttgcacacgggcgancgggcctacgcgtgcgcccagtgcgccaaggcgttccgcaaccgctcgtccctgatagancaccancgcatccacaccggtgagaaccctaccaattgctccgcgtgcgccaaggccttccgcttctcctcagcgctcatccgcccaccancgcatccacacggaaggaaaaaccctaccgcctncggccaatgcgccnagggcttccncgcaaaattnc

SEQ ID NO: 3074 - DNA, 508 bp, Homo sapiens
  misc_feature (173)..(173): "n" may be a, t, c, g, other or unknown
  misc_feature (259)..(259): "n" may be a, t, c, g, other or unknown
  misc_feature (336)..(336): "n" may be a, t, c, g, other or unknown
  misc_feature (354)..(354): "n" may be a, t, c, g, other or unknown
  misc_feature (384)..(384): "n" may be a, t, c, g, other or unknown
  misc_feature (410)..(410): "n" may be a, t, c, g, other or unknown
  misc_feature (470)..(470): "n" may be a, t, c, g, other or unknown
  misc_feature (499)..(499): "n" may be a, t, c, g, other or unknown
  misc_feature (504)..(504): "n" may be a, t, c, g, other or unknown
  misc_feature (506)..(506): "n" may be a, t, c, g, other or unknown
tctcagaaataatctcatccatatccgatgtaaaattcagtcatagtgggcggtacatgatgaccagagactacctgtcggtgaaggtgtgggacctcaacatggagagcaggccggtggagacccaccaggtccacgagtacctgcgcagcaagctctgctctctctatganaacgactgcatctttgacaagtttgagtgttgctggaacggttcggatagcgccatcatgaccgggtcctataacaacttcttcangatgtttgatagagacacgcggagggatgtgaccctggaggcctcgagagagagcagcaaaccgcgcgccagcctcnaaccccggaaagtgtgtncggggggtaagcggaagaaagacgaaatcngtgtggacagtctggacttcaacaanaagatcctgcacacagcctgggcaccccgtggacaatgtcattgccgtggctgccaccantaacttgtacatattccaggacaaaatcngctananac

SEQ ID NO: 3075 - DNA, 486 bp, Homo sapiens
  misc_feature (292)..(292): "n" may be a, t, c, g, other or unknown
  misc_feature (305)..(305): "n" may be a, t, c, g, other or unknown
  misc_feature (315)..(315): "n" may be a, t, c, g, other or unknown
  misc_feature (435)..(435): "n" may be a, t, c, g, other or unknown
  misc_feature (449)..(449): "n" may be a, t, c, g, other or unknown
  misc_feature (465)..(465): "n" may be a, t, c, g, other or unknown
agcggggctgaagccctgggcccggcagaggaaggtcgagatggaccatgttgggccccttctctccccgcccccaggccgcagttcgggggccacgccccggcgtgctcgggtcaccgcgggaagcccttgaaccccctggcgcccggcacccacgtgcggtaaccgcggctcctcgagagctccaggggatgcggatctacagtaagggctgtggccagatgaatgaatgcacattttttagtgggcagaaagatgttagaattcatgaattagaataagcacaaagganggtgagaggggangccgtggaanccgcattcctccccttgacttgggcgcccacccccgaaggggcgcgtcccctccctgctccactgcacgtgggtgtttaaccaggggatatccagtgcctcaagcaccacgacccggganaaaactgggttganaaagtcttctaacaanccttttgcacacctgccatgt

SEQ ID NO: 3076 - DNA, 598 bp, Homo sapiens
  misc_feature (494)..(494): "n" may be a, t, c, g, other or unknown
  misc_feature (566)..(566): "n" may be a, t, c, g, other or unknown
  misc_feature (570)..(570): "n" may be a, t, c, g, other or unknown
  misc_feature (597)..(597): "n" may be a, t, c, g, other or unknown
aggtcgcgcgccccttccggcgcggggagggcgctgaagatcggggccgctcggccgcaggccgcctccagcgccgcgggatgtagcgcgggggaccgcggcccccagcagagcccgcctgcccagcttgtctaccatcagagggagatctctgccccctggggctgagagaccccaacctttccccaagctgaagctgcagggtattgaggtaccagccagatgtcttcccacaaaggatctgtggtggcacaggggaatggggctcctgccagtaacagggaagctgacacggtggaactggctgaactgggacccctgctagaagagaagggcaaacgggtaatcgccaacccacccaaagctgaagaagagcaaacatgcccagtgccccaggaagaagaggaggaggtgcgggtactgacacttcccctgcaagcccaccacgccatggagaagatggaagagtttgtgtacaaggtctgggagggacnttggagggtcatcccatatgatgtgctccctgactggctaaaggacaacgactatctgctacattgtcatanaccncccattccctcctttcgggcttcttcna

SEQ ID NO: 3077 - DNA, 719 bp, Homo sapiens
  misc_feature (24)..(24): "n" may be a, t, c, g, other or unknown
  misc_feature (32)..(32): "n" may be a, t, c, g, other or unknown
  misc_feature (52)..(52): "n" may be a, t, c, g, other or unknown
  misc_feature (96)..(96): "n" may be a, t, c, g, other or unknown
  misc_feature (216)..(216): "n" may be a, t, c, g, other or unknown
  misc_feature (246)..(246): "n" may be a, t, c, g, other or unknown
  misc_feature (351)..(351): "n" may be a, t, c, g, other or unknown
  misc_feature (361)..(361): "n" may be a, t, c, g, other or unknown
  misc_feature (363)..(363): "n" may be a, t, c, g, other or unknown
  misc_feature (397)..(397): "n" may be a, t, c, g, other or unknown
  misc_feature (442)..(442): "n" may be a, t, c, g, other or unknown
  misc_feature (526)..(526): "n" may be a, t, c, g, other or unknown
  misc_feature (532)..(532): "n" may be a, t, c, g, other or unknown
  misc_feature (565)..(565): "n" may be a, t, c, g, other or unknown
  misc_feature (603)..(603): "n" may be a, t, c, g, other or unknown
  misc_feature (608)..(608): "n" may be a, t, c, g, other or unknown
  misc_feature (634)..(634): "n" may be a, t, c, g, other or unknown
  misc_feature (642)..(642): "n" may be a, t, c, g, other or unknown
  misc_feature (704)..(704): "n" may be a, t, c, g, other or unknown
  misc_feature (707)..(707): "n" may be a, t, c, g, other or unknown
  misc_feature (713)..(713): "n" may be a, t, c, g, other or unknown
gggggctgtagggagggggaccantggcaganggaccttaggtgatccttanaaataaaggctagtttctgttcgaccttggagtagggcgaagangtgtagacaggtctggagaagcgaggtaaaaccctgagtaaaagcaagaagttggagaatatgagatacatctcatctctagtaaatacttaaatgacttcccctcctcccggagtcaancacaattcggggatgcagtgacggacgtangtgaagacactgcgagaacttacagacaaaactggtttgtggcctgtttgattcctgtcagaggtttgctgacccaagacagtatcgaaaatgcatattaagtcnattattctananggattcaagtcctatgctcagaagaccgaagtcnatggttttgaccccctcttcaatgctatcactggcttaaatggtngtgggaaatccaacatattggactccatctgctttttgctgggcatctccaacctgtctcaggttcgggcttctaatttacaanatttantttacaaaaatgggcaggctggtattaccaaancctctgtgtcaatcacttttgataattctgacaaaaancaaantcctttaagatttgaagttcatgatnaaatccantaaccaaggcaggttgttattggtggtaaaaataaatttttaatccattggaatccatgccnccnaccccnaatttc

SEQ ID NO: 3078 - DNA, 554 bp, Homo sapiens
  misc_feature (57)..(57): "n" may be a, t, c, g, other or unknown
  misc_feature (483)..(483): "n" may be a, t, c, g, other or unknown
  misc_feature (531)..(531): "n" may be a, t, c, g, other or unknown
  misc_feature (543)..(544): "n" may be a, t, c, g, other or unknown
  misc_feature (547)..(547): "n" may be a, t, c, g, other or unknown
aggtctggacctgaaccgagacaaggaggtaccacactattcactgctgcgtcgcanagcgggctgggcggctgtctggacctcgagaggcctgaggcaaggatcgcgtcagaccccgaaagctggtttgttgattagtgatctaagaccgccggaagcgcttcttctcaatcaagctatgcaacaggaagtcattacgatcccgttgtaacctctaaatatgtccccgttctgcacagcatcccgataaccgttttgtttttctcatattatgaccttctcatgttagcaccacttcgcaacgctccaggtcgtgaaggagcaacttcaccatcgccgcctacagacgccactgggagcttgggagagtgggacgtggacaggaacgtaaagaccgaagggtgggtttcgaaagagcggatttcgaaattgcaccggttgaggatggctgacattctctctcagtcagagaccctggcgtcncaagacctcagtggggacttcaagaaaccagctctgccggtgtcccancggggcggagtnnggnccggcca

SEQ ID NO: 3079 - DNA, 550 bp, Homo sapiens
  misc_feature (61)..(61): "n" may be a, t, c, g, other or unknown
  misc_feature (425)..(425): "n" may be a, t, c, g, other or unknown
  misc_feature (467)..(467): "n" may be a, t, c, g, other or unknown
  misc_feature (499)..(499): "n" may be a, t, c, g, other or unknown
  misc_feature (501)..(501): "n" may be a, t, c, g, other or unknown
  misc_feature (529)..(529): "n" may be a, t, c, g, other or unknown
  misc_feature (543)..(543): "n" may be a, t, c, g, other or unknown
gtcctccggggattagagccggtgggctcgttgtgggcgccatttctcggcgtctcccganggagccgcccctttctcagccttgctcggctcttccccgctctggtcgccggggctgcgccgtccccagctcagtgacaaaaatgctgagtttcttccgtaaaacactagggcgtcggtctatgcgtaaacatgcagagaaggaacgactccgagaagcacaacgcgccgccacacatattcctgcagctggagattctaagtccatcatcacgtgtcgggtgtcccttctggatggtactgatgttagtgtggacttgccaaaaaaagccaaaggacaagagttgtttgatcagattatgtaccacctggacctgattgaaagcgactattttggtctgagatttatggattcagcacaagtngcacattggttggatggtacaaaaagcatcaaaaagcaagtnaaaattggttcaccctattgtctgcatcttcnanttaagttttattcctcaaaaaccaaatnaccttcgtgagganctaaccc

SEQ ID NO: 3080 - DNA, 747 bp, Homo sapiens
  misc_feature (529)..(529): "n" may be a, t, c, g, other or unknown
  misc_feature (582)..(582): "n" may be a, t, c, g, other or unknown
  misc_feature (584)..(584): "n" may be a, t, c, g, other or unknown
  misc_feature (644)..(644): "n" may be a, t, c, g, other or unknown
  misc_feature (658)..(658): "n" may be a, t, c, g, other or unknown
  misc_feature (704)..(704): "n" may be a, t, c, g, other or unknown
  misc_feature (708)..(708): "n" may be a, t, c, g, other or unknown
  misc_feature (712)..(712): "n" may be a, t, c, g, other or unknown
  misc_feature (745)..(745): "n" may be a, t, c, g, other or unknown
tatcacagaaagaaattcgtgtctatagcttttaaggacttgattacatcattttcaagcctgatagttttggaatcaccattagagcttaagacacacctgccttcatttcaaccacctgtcttcataccctgacgaagtgcaccttttaacactcctttgtccttggattacttaagagttcccagaaatacatttgccaccaacagagtagccaaatttataaggaaaaatgattcccaatggatatttgatgtttgaggatgaaaattttattgagtcttctgttgccaaattaaatgccctgaggaaaagtggccagttctgtgatgttcgacttcaggtctgtggccatgaaatgttagcacacagagcagtgctagcttgctgcagtccctatttatttgaaatctttaatagtgatagtgatcctcatggaatttctcacgttaaatttgatgatctcaatccagaagctgttgaagtcttgttgaattatgcctacactgctcagttgaaagcagataanggaattggtaaaagatgtttattctgcagcaaaaaagctgaagatggatcgantnaagcaggtttgtggtgattatttactgtctagaatggatgttacaagctgcatctcttancgaaattttgcaanttgtatgggaaacccccgttggttgaataaaggttgaatgcttatnttcnggancattttgttacaaatttctgaaaaaggaggaantt

SEQ ID NO: 3081 - DNA, 618 bp, Homo sapiens
  misc_feature (377)..(377): "n" may be a, t, c, g, other or unknown
  misc_feature (531)..(531): "n" may be a, t, c, g, other or unknown
  misc_feature (539)..(539): "n" may be a, t, c, g, other or unknown
  misc_feature (576)..(576): "n" may be a, t, c, g, other or unknown
  misc_feature (587)..(587): "n" may be a, t, c, g, other or unknown
  misc_feature (590)..(590): "n" may be a, t, c, g, other or unknown
taagtcagctgcagacttgattagcctgcctaccactgtagagggacttcagaagagtgtagcttccattggcaatactttaaacagcgtccatcttgctgtggaagcactacagaaaactgtggatgaacacaagaaaacgatggaattactgcagagtgatatgaatcagcacttcttgaaggagactcctggaagcaaccagatcattccgtcaccttcagccacatcagaacttgacaataaaacccacagtgagaatttgaaacaggatatcctgtaccttcacaactctttagaggaggtaaacagtgccctagtggggtaccagagacagaatgatcttaaactcgagggaatgaacgagacagtcagtnatcttacccagagagtcaacctgatagaaagcgatgtggttgctatgagcaaggtagaaaagaaagcaaacctgcccttcagcatgatgggtgatagatctgccactctgaaaagacagtctttggatcaagtcccaacagaacagatacagtnaaaatccnaagcataaagaaagaagatagttcaaattctcaggtntccaagctaanaanagaaactccagctgatcagtgctcttac

SEQ ID NO: 3082 - DNA, 609 bp, Homo sapiens
  misc_feature (574)..(574): "n" may be a, t, c, g, other or unknown
  misc_feature (582)..(582): "n" may be a, t, c, g, other or unknown
  misc_feature (585)..(585): "n" may be a, t, c, g, other or unknown
gctgtacggtgcgcgtgacggctgcgtgcggcgggaaccatggctgctcgcagagctctgcacttcgtattcaaagtgggaaaccgcttccagacggcgcgtttctatcgggacgtcctggggatgaaggttctgcggcatgaggaatttgaagaaggctgcaaagctgcctgtaatgggccttatgatgggaaatggagtaaaacaatggtgggatttgggcctgaggatgatcattttgtcgcagaactgacttacaattatggcgtcggagactacaagcttggcaatgactttatgggaatcacgctcgcttctagccaggctgtcagcaacgccaggaagctggagtggccactgacggaagttgcagaatgtgtttttgaaaccgaggccccgggaggatataagttctatttgcagaatcgcagtctgcctcagtcagatcctgtattaaaagtaactctagcagtgtctgatcttcaaaagtccttgaactactggtgtaatctactgggaatgaaaatttatgaaaaagatgaagaaaagcccagggctttgctgggctatgccnataaccangtngagcaatcttggagaagaataacc

SEQ ID NO: 3083 - DNA, 705 bp, Homo sapiens
  misc_feature (251)..(251): "n" may be a, t, c, g, other or unknown
  misc_feature (439)..(439): "n" may be a, t, c, g, other or unknown
  misc_feature (468)..(468): "n" may be a, t, c, g, other or unknown
  misc_feature (470)..(470): "n" may be a, t, c, g, other or unknown
  misc_feature (512)..(512): "n" may be a, t, c, g, other or unknown
  misc_feature (630)..(630): "n" may be a, t, c, g, other or unknown
  misc_feature (655)..(655): "n" may be a, t, c, g, other or unknown
  misc_feature (691)..(691): "n" may be a, t, c, g, other or unknown
  misc_feature (695)..(695): "n" may be a, t, c, g, other or unknown
  misc_feature (705)..(705): "n" may be a, t, c, g, other or unknown
caaaataatgtttataaatttatttgtctatactagtagaagtgatcagtgacatactataaataatcctaaatggttatatttgatagaattcataacacattaaagagaaaatttcacattaaaggaaggtttaaaaatctattttcagattataaaaggtgtctttactggttttcattccttttatctacatgtaattggacatgtaaacttgttaaaaatcaaaatcttactgattgtacaggganaaattaagcattctgttttaaaaattaggcttattgctagactgtaagtttaaaaacaattcatgttcaaaggagcttttcaaattacccagtccaccacagaatcagctaatgtgacagaagtaaatatagtgcgtcataattgctaaaaacagggtgaatttctttcacttaagttggaaaaccancctctaaaaaattaggtgctggtaatganancttaataccatggttccctgcaggtctcaaaaacattaatanttcctttcttggccctcactgtccttccagtgttgggctctggcctcttccctcacatttatgttcattctccgggcttatattcattctctgctgctttctcccttcaccgtgggantctcaccctcttgctcattctccancacccattcctactttaatctcttgaaatctttttngganatttccctcn

SEQ ID NO: 3084 - DNA, 631 bp, Homo sapiens
  misc_feature (25)..(25): "n" may be a, t, c, g, other or unknown
  misc_feature (223)..(223): "n" may be a, t, c, g, other or unknown
  misc_feature (252)..(252): "n" may be a, t, c, g, other or unknown
  misc_feature (343)..(343): "n" may be a, t, c, g, other or unknown
  misc_feature (400)..(400): "n" may be a, t, c, g, other or unknown
  misc_feature (419)..(419): "n" may be a, t, c, g, other or unknown
  misc_feature (425)..(425): "n" may be a, t, c, g, other or unknown
  misc_feature (431)..(431): "n" may be a, t, c, g, other or unknown
  misc_feature (557)..(557): "n" may be a, t, c, g, other or unknown
  misc_feature (559)..(559): "n" may be a, t, c, g, other or unknown
  misc_feature (581)..(581): "n" may be a, t, c, g, other or unknown
  misc_feature (609)..(609): "n" may be a, t, c, g, other or unknown
  misc_feature (620)..(620): "n" may be a, t, c, g, other or unknown
gcagcggcggcccacacagcagcgnagaggcgagaggaggctgcctcgagggatgaagtgcaaacccaaccagacgcggacctacgaccccgaggggttcaagaagcgggcggcgtgcctgtgcttccggagcgaacgcgaggacgaggtcctgttagtgagtagcaaccggtacccggaccgctggatcgtgccgggcgggggcatggagcccgaggagganccgggcggtgcggcggtccgagaggtgtncgaagaagcgggagtcaaggggaagttaggccggctcctgggcgtcttcgaacagaaccaggatcgcaagcacagaacgtacgtgtatgtnctgactgtcacggagctgctggaggattgggaaaattcggttagcattgggaggaancgagagtggttcaaagtcnaaaatnccatcnaggttctccagtgccacaagcccgtgcacgccgaatatctggagaaactaaagctgggcggttccccaaccaatggaaactccatggccccatcctcgccagatagcgatccctaatgaacagcananatgttcagtattgtgctgaaanaaacattgatgttaaccccagtgatcantggaattgtcnagtacaggtga

SEQ ID NO: 3085 - DNA, 545 bp, Homo sapiens
  misc_feature (503)..(503): "n" may be a, t, c, g, other or unknown
  misc_feature (521)..(521): "n" may be a, t, c, g, other or unknown
  misc_feature (532)..(532): "n" may be a, t, c, g, other or unknown
  misc_feature (541)..(541): "n" may be a, t, c, g, other or unknown
  misc_feature (543)..(543): "n" may be a, t, c, g, other or unknown
tgttgcaagtaaagaaggggaaatccgagcgttctcgcgttggatttcctccacgtgtgaagtgggaatggtagtgatatctcgtgctatctctgtcaagggcaagaaggagaaggaatttatttgaggccctacgacgtggtaggttcaccctcagcctttgttcttatttcatcttatttgtggagaaggtcttttcgttcctattttacaggtgagaaaaggggcccaatatatagttatttgcggccataaaatagaagccagttgcctgatactgaagattcaatgaaatcttgtgattgacttccctctttaaattttgtactttgggtaacatcggatccggtagaaacgctcgtcagaaagagtttttaatgtgcattctacaatttccagacatagtttccttcttgaaaaattgggttaatactaccctatagggatcttgtgatgcaccacgtaaacgttgtaagttgtgaaccactatacaaacgtatganactcttcatgttcttgantggaactgtangttaagaananaa

SEQ ID NO: 3086 - DNA, 654 bp, Homo sapiens
  misc_feature (313)..(313): "n" may be a, t, c, g, other or unknown
  misc_feature (349)..(349): "n" may be a, t, c, g, other or unknown
  misc_feature (403)..(403): "n" may be a, t, c, g, other or unknown
  misc_feature (437)..(437): "n" may be a, t, c, g, other or unknown
  misc_feature (528)..(528): "n" may be a, t, c, g, other or unknown
  misc_feature (607)..(607): "n" may be a, t, c, g, other or unknown
  misc_feature (624)..(624): "n" may be a, t, c, g, other or unknown
  misc_feature (630)..(630): "n" may be a, t, c, g, other or unknown
cccccactgcccacacccagagctttaatggacagtccgtaccaagcagagccgaggaggagggaagccaggggtcccagcccgtctacctccccatcccacccaggcccccagctccccgcgggggccaccgcagggcctgtgggctgggtcacgtgggtctcgctgggacctggtccctttgttgcaggcggcttggagaaagggcagtgggacgctggccacggccagggtggtgtcgggagcaggcctcaccccgctggccgtgtctgtgtgtgtgcacgtgtgcttgtgtctgtgcgggcgcgtgcanccctggttctgcagggaaaaggtgctgggggtgcanatccctccctccttgagccagggtggcactgttcactggcgctgggacagtcanggtgaccccaccgcctacctctctacaactaaanaccctctgggcctgtgttgctgttactcctactgatctgttcctctgtttttctttttgatttttgttttttaaaccaaaacagacaatancttattttctttccgccccctccggggctgaaccagggtctgaaaactgaatgtaacaggggccgctggcactcctgcncgtccccggctctggcnctgcangggtttcggcccccacctctccaa

SEQ ID NO: 3087 - DNA, 562 bp, Homo sapiens
  misc_feature (138)..(138): "n" may be a, t, c, g, other or unknown
  misc_feature (192)..(192): "n" may be a, t, c, g, other or unknown
  misc_feature (447)..(447): "n" may be a, t, c, g, other or unknown
  misc_feature (482)..(482): "n" may be a, t, c, g, other or unknown
  misc_feature (499)..(499): "n" may be a, t, c, g, other or unknown
  misc_feature (507)..(507): "n" may be a, t, c, g, other or unknown
  misc_feature (513)..(513): "n" may be a, t, c, g, other or unknown
  misc_feature (548)..(548): "n" may be a, t, c, g, other or unknown
gtcgaatggtttgttggcagggtgtcctggtggattggtttctgtaagttcagattctcataaatcgtgtgagcgtcgccgacacctctgagataaaagggcccctttcgactagcctctgctgaaaggacctaaaanaatcccttaggatgaagctgagtcttaccaaggtagttaatggctgtcgcctangaaaaataaaaaacctgggcaaaacaggggaccacaccatggatattccaggctgccttctgtataccaagactggctccgccccacacctcacccatcacacgctgcataatatccacggggttcctgccatggctcagcttacgctgtcatccctagcagaacatcatgaagtcttgacagaatataaagaaggagttggaaagtttataggcatgccagaatcactcttgtactgctccctgcacgatccantcagcccctgcccggctggttatgtaacaaacaantctgtgtctgtgtggantgttgcangacgantggaaatgactgtttccaagttcatggcaattcanaaggccttcagcca

SEQ ID NO: 3088 - DNA, 587 bp, Homo sapiens
  misc_feature (560)..(560): "n" may be a, t, c, g, other or unknown
  misc_feature (563)..(563): "n" may be a, t, c, g, other or unknown
  misc_feature (578)..(578): "n" may be a, t, c, g, other or unknown
gctccaaaggaggaaatgaccattcagggatcttactccagcttgattacggagactgaaccttcatagggtgcgcacttaccaaggacaggaaggtttctctgtttgaagggctttaaacttataacaaagaaaataaaaatgacgacttcgtctatcagacggcagatgaaaaacatcgtgaacaattactcagaggcagaaatcaaagtccgggaagccacctccaatgacccgtggggcccgtccagttctctgatgaccgagattgccgacctgacctacaacgtggtggccttctcggagatcatgagcatggtgtggaagcggctgaatgaccatggcaagaactggcggcatgtgttcaaggcgctgaccctgctggactacctcatcaagacaggctccgaacgtgtggcccagcagtgccgggagaacatcttcgccatccagaccctgaaggacttccagtacattgaccgagatggcaaggagcagggcatcaatgtgcgtgagaagtcaaagcaactggtggctctcctcaaggacaaagaacgttnaangctgaaaaggcccangctctcaaa

SEQ ID NO: 3089 - DNA, 570 bp, Homo sapiens
  misc_feature (277)..(277): "n" may be a, t, c, g, other or unknown
  misc_feature (336)..(336): "n" may be a, t, c, g, other or unknown
  misc_feature (358)..(358): "n" may be a, t, c, g, other or unknown
  misc_feature (445)..(445): "n" may be a, t, c, g, other or unknown
  misc_feature (450)..(450): "n" may be a, t, c, g, other or unknown
  misc_feature (483)..(483): "n" may be a, t, c, g, other or unknown
  misc_feature (521)..(521): "n" may be a, t, c, g, other or unknown
  misc_feature (530)..(530): "n" may be a, t, c, g, other or unknown
  misc_feature (550)..(550): "n" may be a, t, c, g, other or unknown
  misc_feature (554)..(554): "n" may be a, t, c, g, other or unknown
gtgctaggagatgatcgggggaaagcatagtcccctgtctgtggcaccagacactcccgactgtgcgctgactctccccgcccagccagcagccttttccagagaggctgtggtccatagcctctgttcgttttcactgcaggaccaggcacgaaagttaaaacaaaatgaagattttttctgaatctcataaaacagtgtttgttgtggatcactgcccttatatggcagaatcttgcaggcagcatgtcgagtttgatatgctggtgaagaatanaacccaaggaatcattcctttggcccccatatctaaatcattgtggacttgctcagtanaatcttccatggaatattgtanaataatgtatgatatatttcctttcaaaaagctggtgaattttattgtgagtgactctggagcacatgttttaaattcttggactcnagaanaccaaaatttacaggagctaatggcagcattanccgctgttgggcctcctaatcctcgggcagatccaaantgctgcatnttctgcatggccttgttgcnccantggaaactctctgcca

SEQ ID NO: 3090 - DNA, 499 bp, Homo sapiens
  misc_feature (243)..(243): "n" may be a, t, c, g, other or unknown
  misc_feature (401)..(401): "n" may be a, t, c, g, other or unknown
  misc_feature (427)..(427): "n" may be a, t, c, g, other or unknown
  misc_feature (465)..(465): "n" may be a, t, c, g, other or unknown
  misc_feature (481)..(481): "n" may be a, t, c, g, other or unknown
  misc_feature (483)..(483): "n" may be a, t, c, g, other or unknown
actacctcgctgggacctggtcttgctgtcccccgctggcctcctgcccaagcgactgcggccaggatgggccggaaggtgaccgtggccacctgcgcactcaaccagtgggccctggacttcgagggcaatttgcaaagaattttaaagagtattgaaattgccaaaaacagaggagcaagatacaggcttggaccagagctggaaatatgcggctacggatgttgggatcattattacgantcggacaccctcttgcactcgtttcaagtcctagcggcccttctggagtctcccgtcactcaggacatcatctgcgacgtggggatgcctgtaatgcaccgaaacgtccgctacaactgcagagtgatattcctcaacaggaagatcctgctcatcanacccaagatggccttggccaatgaangcaactaccgcgagctgcgctggttcaccccgtggtcnaagaatccgcacacanangaatactttctgcctc

SEQ ID NO: 3091 - DNA, 598 bp, Homo sapiens
  misc_feature (392)..(392): "n" may be a, t, c, g, other or unknown
  misc_feature (436)..(436): "n" may be a, t, c, g, other or unknown
  misc_feature (526)..(526): "n" may be a, t, c, g, other or unknown
  misc_feature (541)..(541): "n" may be a, t, c, g, other or unknown
  misc_feature (544)..(544): "n" may be a, t, c, g, other or unknown
  misc_feature (567)..(567): "n" may be a, t, c, g, other or unknown
  misc_feature (595)..(595): "n" may be a, t, c, g, other or unknown
aaaccatggccaattctgccctatccccattctctacccctttccatatttttcttctcccatattattttgaagcaaatcccaggcatcacataagatcaaaattttaacatgtttttacctctacttcaggttattgttgaaatgacctgaaattttaaggaagtagctgaaaatagcattaagattggaaagaaaggcagacagattatgagaggcctataatgccagccttgtggaggagccccagagttgtttcagtagacagacaaaatctggtctgtgctttagcaactttgtttcatgaatgaataattaacctagtgagagagagagtttcagaaagttgtaatgaaaggaatggtaatgtgaaagaggccctgaagcagcanaatttttatcactggatgattaattaaatgaggggatgagggangctttgctaacctgaatttcaagcctgaatgaggttgatgatgacattaactaagacagcagacatggaaaagttatgtgtggaacttanggttcttggattccnaancaattgaaagggactttgtctancttaagccagaaggaatttattaaaatntta

SEQ ID NO: 3092 - DNA, 569 bp, Homo sapiens
  misc_feature (535)..(535): "n" may be a, t, c, g, other or unknown
  misc_feature (540)..(540): "n" may be a, t, c, g, other or unknown
  misc_feature (553)..(553): "n" may be a, t, c, g, other or unknown
gtgctcgcttcggcagcacatatactaaaattggaacgatacagagaagattagcatggcccctgcgcaaggatgacacgcaaattcgtgaagcgttccatattttttccccaaccaggatttgaacagagacgtgaatgtctaaccttttgattctattccttttattccagcgagtcccaccactgtcacccagatgagcttgtccaacccgaccatgctgaggactcacagcctctccaatgctgatgggcagtatgatccatacactgacagccgcttccggaatagctccatgtccctggatgagaagagcagaaccatgagccgttcaggctcattccgggatgggtttgaagaagttcatggatcctcactctccttggtttccagcacatcgtcagtttattctacaccagaagaaaaatgccagtcagagattcgcaagctgcggcgggaactggatgcctcccaggagaaagtttcagctttgaccacccagctgacagcaaatgctcaccttgtggctgccttngaacnaatcttggtgacntgacatcaggctccaa

SEQ ID NO: 3093 - DNA, 675 bp, Homo sapiens
  misc_feature (316)..(316): "n" may be a, t, c, g, other or unknown
  misc_feature (406)..(406): "n" may be a, t, c, g, other or unknown
  misc_feature (454)..(454): "n" may be a, t, c, g, other or unknown
  misc_feature (483)..(483): "n" may be a, t, c, g, other or unknown
  misc_feature (492)..(492): "n" may be a, t, c, g, other or unknown
  misc_feature (522)..(522): "n" may be a, t, c, g, other or unknown
  misc_feature (571)..(571): "n" may be a, t, c, g, other or unknown
  misc_feature (583)..(583): "n" may be a, t, c, g, other or unknown
  misc_feature (595)..(595): "n" may be a, t, c, g, other or unknown
  misc_feature (672)..(674): "n" may be a, t, c, g, other or unknown
atatgttacagtttatctggtacttcatttttcttaactaaaattactttttactttaagcttgaataaaaatcttcattggtaactgtatgtaattaagtggcaacttctctttacctcagtatagttaaaaaccattcatattttaagtgattcatgtataccctgaagccgttaatacaccccagtctctatggtaacatcactaaatgtgggcatagaaactccacagctgtttacaaatttggttacagtgtgctatggtgcatttgtaacactcagatttgtgcccattcaggggcaatttggcactcanattctactctacttcacctaaccacccctagatctgagttttcagagtgcttctgaagtacagtttaaaaacactttttaaaaagtggantaaaagtgaggcacattttacaagaacataactcctattaaaacggantaacaactatgcaaaggtttctatagcanctaagtgantttgttttccgggtctgtcttaactggcancttcctgtacatactggtacttatttgctgtaaacgtctgtttcatacntttgccatgcantgactgtgctcnaaaagttaaatccatggtaaaaaaacctaagattttatggtatgaaaaactgatcgcgggatttccgattcataaannnc

SEQ ID NO: 3094 - DNA, 159 bp, Homo sapiens
  misc_feature (116)..(116): "n" may be a, t, c, g, other or unknown
  misc_feature (139)..(140): "n" may be a, t, c, g, other or unknown
gaatggaagcggcggcggcggcgggagcggcctgagctgggcgccggggccagggccgggggctgcccagggcccgcgccgctgcattggggcggtccgcgggccctgagaggaanggcatacaggcgggccgatatannaggggcggggtctggcgga

SEQ ID NO: 3095 - DNA, 501 bp, Homo sapiens
  misc_feature (473)..(473): "n" may be a, t, c, g, other or unknown
  misc_feature (475)..(475): "n" may be a, t, c, g, other or unknown
  misc_feature (486)..(486): "n" may be a, t, c, g, other or unknown
aggccggaaccatggcagtgaccaaggagctcttacagatggacctgtacgcgctgctaggcattgaggagaaggcagcggacaaagaggtaaagaaggcgtataggcagaaggccctctcctgccacccagacaaaaatccagataatcccagagcagctgaactcttccaccagctttctcaggccttggaggtgctgaccgatgctgcagccagggctgcatatgacaaggtcaggaaagccaagaagcaagcagcagagaggacccagaaacttgatgagaaaaggaagaaagtgaagcttgacctggaggcccgggagcggcaggcccaggcccaggagagtgaggaggaagaggagagccggagcaccaggacactagagcaagagatcgaacgcctgagagaagagggtccccggcagctggaggaacagcagaggctcatccgggagcagatacgccaggaaccntnaccaaaggttnaaaaaggaaaagggc

SEQ ID NO: 3096 - DNA, 523 bp, Homo sapiens
  misc_feature (450)..(450): "n" may be a, t, c, g, other or unknown
  misc_feature (452)..(452): "n" may be a, t, c, g, other or unknown
  misc_feature (455)..(455): "n" may be a, t, c, g, other or unknown
  misc_feature (481)..(481): "n" may be a, t, c, g, other or unknown
  misc_feature (495)..(495): "n" may be a, t, c, g, other or unknown
gcggatggatccaacatggcggcgccgagcctgagccgagagaagagacctgggaaattaagtttcttgcggagtacggtggggattgcagctgctgagcagggattctggaaagcattgcgtacctgagcccccagcatggcgggcctaaagcggcgggcaagccaggtgtggccagaagagcatggtgagcaggaacatgggctgtacagcctgcaccgcatgtttgacatcgtgggcactcatctgacacacagagatgtgcgcgtgctttctttcctctttgttgatgtcattgatgaccacgagcgtggactcatccgaaatggacgtgacttcttattggcactggagcgccagggccgctgtgatgaaagtaactttcgccaggtgctgcagctgctgcgcatcatcactcgccacgacctgctgccctacgtcaccctcaananganacgggctgtgtgccctgatcttgtanacaagtatctggangaaacatcaattcgctatgttaccccca

SEQ ID NO: 3097 - DNA, 463 bp, Homo sapiens
  misc_feature (44)..(44): "n" may be a, t, c, g, other or unknown
  misc_feature (330)..(330): "n" may be a, t, c, g, other or unknown
  misc_feature (395)..(395): "n" may be a, t, c, g, other or unknown
  misc_feature (421)..(421): "n" may be a, t, c, g, other or unknown
  misc_feature (427)..(427): "n" may be a, t, c, g, other or unknown
  misc_feature (441)..(441): "n" may be a, t, c, g, other or unknown
  misc_feature (447)..(447): "n" may be a, t, c, g, other or unknown
gaatcagagcgcggctgaagcggcccccgcagccaacccccganggagcggccggctggcgtccgccgcgcccaggagttggggatgtcctacaaacccatcgcccctgctcccagcagcacccctggctccagcacccctgggccgggcaccccggtccctacaggaagcgtcccgtcgccgtcgggctcagtgccaggagccggcgctcctttcagaccgctgtttaacgactttggaccgccttccatgggctacgtgcaggcgatgaagccacccggcgcccagggctcccagagcacctacacggacctgctgtcagtcatagangagatgggcaaagagatccggcctacctatgctggcagcaagagcgccatggagcgcctgaaganaggtatcatccatgcccgggccctantcaganagtgcctggcaganacagancggaacgcccgcacgt

SEQ ID NO: 3098 - DNA, 606 bp, Homo sapiens
  misc_feature (314)..(314): "n" may be a, t, c, g, other or unknown
  misc_feature (404)..(404): "n" may be a, t, c, g, other or unknown
  misc_feature (457)..(457): "n" may be a, t, c, g, other or unknown
  misc_feature (514)..(514): "n" may be a, t, c, g, other or unknown
  misc_feature (520)..(520): "n" may be a, t, c, g, other or unknown
  misc_feature (566)..(566): "n" may be a, t, c, g, other or unknown
  misc_feature (589)..(589): "n" may be a, t, c, g, other or unknown
  misc_feature (592)..(592): "n" may be a, t, c, g, other or unknown
gcgctcctgctcttaggaagcctggggaaggaccggtgtgctagggagatgatcggggaaagcatagtcccctgtctgtggcaccagacactcccgactgtgcgctgactctccccgcccagccagcagccttttccagagaggctgtggtccatagcctctgttcgttttcactgcaggaccaggcacgaaagttaaaacaaaatgaagattttttctgaatctcataaaacagtgtttgttgtggatcactgcccttatatggcagaatcttgcaggcagcatgtcgggtttgatatgctggtgaagaatanaacccaaggaatcattcctttggcccccatatctaaatcattgtggccttgctcagtaaaatcttccatggaatattgtagaataatgtntgatatatttcctttcaaaaagccggtgaattttattgtgagtgactctggancacatgttttaaattcttggactcaagaagaccaaaatttacaggagctaatggcancattanccgctgttgggcctcctaatcctcgggcagatccagaatgctgcantattctgcatggccttgttgcancantggaaactctctgc

SEQ ID NO: 3099 - DNA, 563 bp, Homo sapiens
  misc_feature (417)..(417): "n" may be a, t, c, g, other or unknown
  misc_feature (551)..(551): "n" may be a, t, c, g, other or unknown
  misc_feature (559)..(559): "n" may be a, t, c, g, other or unknown
  misc_feature (562)..(562): "n" may be a, t, c, g, other or unknown
aagatggcagctgcgggagccgtctccgcggcgcgtgggcttcgtgggcgcgggccgcatggcgggggccatcgcgcagggcctcatcagagcaggaaaagtggaagctcagcacatactggccagtgcaccaacagacaggaacctatgtcactttcaagctctgggttgccggaccacgcactccaaccaggaggtgctgcagagctgcctgctcgtcatctttgccaccaagcctcatgtgctgccagctgtcctggacagaggtggctcctgtggtcaccactgaacacatcttggtgtccgtggctgctggggtgtctctgagcaccctggaggagctgctgcccccgaacacacgggtgctgcgggtcttgcccaacctgccctgtgtggtccaggaaggggccatagatnatggcctcggggccgccacgtggggagcaccgagaccaacctcctgcagcatcttctggatgcctgtgggcggtgtgaggaggtgcctaaatcctacgtcgacatccacactggcctcaatggcagtggtcgtngccttccngtnt

SEQ ID NO: 3100 - DNA, 651 bp, Homo sapiens
  misc_feature (73)..(73): "n" may be a, t, c, g, other or unknown
  misc_feature (262)..(262): "n" may be a, t, c, g, other or unknown
  misc_feature (495)..(495): "n" may be a, t, c, g, other or unknown
  misc_feature (499)..(499): "n" may be a, t, c, g, other or unknown
  misc_feature (507)..(507): "n" may be a, t, c, g, other or unknown
  misc_feature (571)..(571): "n" may be a, t, c, g, other or unknown
  misc_feature (615)..(615): "n" may be a, t, c, g, other or unknown
  misc_feature (622)..(622): "n" may be a, t, c, g, other or unknown
  misc_feature (629)..(629): "n" may be a, t, c, g, other or unknown
  misc_feature (631)..(631): "n" may be a, t, c, g, other or unknown
ggacccactgggttgccaagctcgcgccggatgcggagcgcggtgctgccggtggagcttcaggtcttgatanactttctgtaaagaaggaatgatttggtgatggagtgttcccactgaccgatggactcaaagaagagaagctcaacagaggcagaaggatccaaggaaagaggcctggtccatatctggcaggcaggatcctttcccataacaccagagagattgccaggctggggaggaaagactgttttgcaggcanccctcggagtgaaacatggagttcttctgactgaagatggtgaggtctacagctttgggactcttctctggagaagtggaccagtggagatttgtccaagtagccccattctagaaaatgccctggttgggcaatatgttattactgtggcaacaggaagcttccatagtggagcagtgacagacaatggtgtcgcgtacatgtggggagagaattctgctggccagtgtgcngtanccaaccancagtatgtgccggaaccaaatcctgtcagcattgctgattctgaagccagccctttgttagcantcaggattttacagttggcgtgtggccaagaacacactctggcnttgtccntaagcananaaatttgggcatggggttac

SEQ ID NO: 3101 - DNA, 547 bp, Homo sapiens
  misc_feature (428)..(428): "n" may be a, t, c, g, other or unknown
  misc_feature (530)..(530): "n" may be a, t, c, g, other or unknown
  misc_feature (536)..(536): "n" may be a, t, c, g, other or unknown
  misc_feature (539)..(539): "n" may be a, t, c, g, other or unknown
atcggctgtggggagtaccggctgcagtcggctgtgccgggagggtaggatggcgtctggccgatgcggcgatagcaccgaaagcagacggccgccaggcgctccccctaccccccgaagtttctccccagcggcgggggatgggggtaggcggttcctctgttctttctgcgttccccgcggcctcttaccacagagacgcgggcctccaccgtcctagccctcccgccctgttctctagtgcggactagagcgtctcctcgccatttcctgtcgccctggggccccgcggggaaaaagggggagtatcaggacagcggagggaagtcgcgagcttaggtggtgtgtagacgccggaagtgttgggaacgaggccggaagctaggggcggggccaggaagtgaggaggggcgggggtttatgacgantccaagggagcattggggcagacttgcactcagagccacctgacggacttggcggtggcgcccagcactgtcccctcccctcgtagagacacggttgtcgtntgggantanggaacact

SEQ ID NO: 3102 - DNA, 599 bp, Homo sapiens
  misc_feature (373)..(373): "n" may be a, t, c, g, other or unknown
  misc_feature (400)..(400): "n" may be a, t, c, g, other or unknown
  misc_feature (525)..(525): "n" may be a, t, c, g, other or unknown
  misc_feature (531)..(531): "n" may be a, t, c, g, other or unknown
  misc_feature (551)..(551): "n" may be a, t, c, g, other or unknown
  misc_feature (553)..(553): "n" may be a, t, c, g, other or unknown
  misc_feature (579)..(579): "n" may be a, t, c, g, other or unknown
tggcagatcctgacatgcctgagctgcaccttcctgccgagtcgagggattctcaagtatctcaagttccatctgaaaaggatacgggaacagtttccaggaaccgagatggaaaaatacgctctcttcacttacgaatctcttaagaaaaccaaatgccgagagtttgtgccttcccgagatgaaatagaagctctgatccacaggcaggaaatgacatccacggtctattgccatggcggcggctcctgcaagatcaccatcaactcccacaccaccgctggggaggtggtggaaaaactgatccgaggcctggccatggaggacagcaggaacatgtttgctttgtttgaatacaacggccacgtcgacnaagccattgaaagtcgaaccgtcgtanctgatgtcttagccaagtttgaaaagctggctgccacatccgaggttggggacctgccatggaaattctacttcaaactttactgcttcctggacacagacaacgtgccaaaagacagtgtggantttgcntttatgtttgaacaggcccncnaagcggttttccatggcccccatccngccccggaaagaaaacctcc

SEQ ID NO: 3103 - DNA, 612 bp, Homo sapiens
  misc_feature (541)..(541): "n" may be a, t, c, g, other or unknown
  misc_feature (573)..(573): "n" may be a, t, c, g, other or unknown
  misc_feature (598)..(598): "n" may be a, t, c, g, other or unknown
  misc_feature (602)..(602): "n" may be a, t, c, g, other or unknown
  misc_feature (608)..(608): "n" may be a, t, c, g, other or unknown
tatgtcaagaaacttgtggcttccttaggtaaggattacttaaattggatcggagttgttttctgttttaggtagctgacttagaaacctactaactaataagtctttaaaatagagaaaaattaacactaaacaactaatccaagttttttcttaaatccaattctgatgtataaattttgaataatattaggttcttaactggaaattaccatttcagggtttgaaaaggactaggtgcgtataaaaagttcagcccctcatctgttagactgattattggtaagactctttcacttagtcagcaagctgtgcaaagcaaatactggtatgcatcctcagcaattgagatttgaaattgtaagcaaaagctattcttttgcattcctgtgtccaaatgtcatcctaaagaacttgctgacttatgccagtttgggttttagagtaagttaactgcttgttatatggcaggtgattggctgatgctgcatttctcctccccaggcagcaattcccccaggcaagcaaccgtcttcactancttctccaaatcctcccatggcaaaaggctcngaacaaggcttccagtcacctccancaantattanttca

SEQ ID NO: 3104 - DNA, 471 bp, Homo sapiens
  misc_feature (128)..(128): "n" may be a, t, c, g, other or unknown
  misc_feature (157)..(157): "n" may be a, t, c, g, other or unknown
  misc_feature (160)..(160): "n" may be a, t, c, g, other or unknown
  misc_feature (336)..(336): "n" may be a, t, c, g, other or unknown
  misc_feature (399)..(399): "n" may be a, t, c, g, other or unknown
  misc_feature (405)..(405): "n" may be a, t, c, g, other or unknown
  misc_feature (450)..(450): "n" may be a, t, c, g, other or unknown
  misc_feature (465)..(465): "n" may be a, t, c, g, other or unknown
  misc_feature (469)..(469): "n" may be a, t, c, g, other or unknown
ggaggcagcctttgtctggcgggaacacgcattggtagcgggagctgtcggtaggacctggggacaccgcggaagtcgggaaatggcctcagtggctttagaggatgtggctgtgaacttcacccganaagagtgggctttgctgggtccttgtcanaanaatctctacaaagatgtgatgcaggaaaccatcaggaacctggattgtgtaggaatgaaatggaaagaccagaacattgaagatcaatatagatatcccaggaaaaatctaagatgtcgtatgttagagagatttgttgaaagtaaagatggaactcaatgtggagaaacatctanccagattcaagatagtattgtgaccaagaacactcttcctggagtaggtccttgtgaaagcantatganaggagaaatcgtcatgggtcattcatcccttaattgttgcatcanagttggtgctgggcncaancc

SEQ ID NO: 3105 - DNA, 468 bp, Homo sapiens
  misc_feature (33)..(33): "n" may be a, t, c, g, other or unknown
  misc_feature (38)..(38): "n" may be a, t, c, g, other or unknown
  misc_feature (61)..(61): "n" may be a, t, c, g, other or unknown
  misc_feature (103)..(103): "n" may be a, t, c, g, other or unknown
  misc_feature (283)..(283): "n" may be a, t, c, g, other or unknown
  misc_feature (376)..(376): "n" may be a, t, c, g, other or unknown
  misc_feature (428)..(428): "n" may be a, t, c, g, other or unknown
  misc_feature (450)..(450): "n" may be a, t, c, g, other or unknown
  misc_feature (457)..(457): "n" may be a, t, c, g, other or unknown
  misc_feature (462)..(462): "n" may be a, t, c, g, other or unknown
gtgctggccgcggtaaaagtggtagcagcggangcgancggagggtttcccgcggcgggantctcactctgctgcctaggctgagtgcagtggtgtgatcgangcgcactgcagccttgacctcctgagctcaagcgatcctcacctcggcctaccgagtagctgggactacaggcacgcgccactacactcggatttctgacagtcagacttgtccacaagaactcaactggcaaggctgcttttctgtgctaaaactggggagctagtgggcaccatgaanatcttctgcagtcgggccaatccgaccacggggtctgtggagtggctggaggaagatgaacactatgattaccaccaggagattgcaaggtcntcttatgcagatatgctacatgacaaagacagaaatgttaaatactaccaangtatccgggctgccgtgagcanggtgaangacanaagaca

SEQ ID NO: 3106 - DNA, 530 bp, Homo sapiens
  misc_feature (122)..(122): "n" may be a, t, c, g, other or unknown
  misc_feature (254)..(254): "n" may be a, t, c, g, other or unknown
  misc_feature (302)..(302): "n" may be a, t, c, g, other or unknown
  misc_feature (402)..(402): "n" may be a, t, c, g, other or unknown
  misc_feature (474)..(474): "n" may be a, t, c, g, other or unknown
  misc_feature (512)..(512): "n" may be a, t, c, g, other or unknown
  misc_feature (530)..(530): "n" may be a, t, c, g, other or unknown
gcgggtgttcggctacgtcactggggcgctacggttcctggagctgggcagtcttctcgtcagagtggggactggtaagagcgacctccccgccaggtcctgtgtgttgccggctgaagaanggatgatgattattccccaccttctaagagacaaagaccaacgagccaccacagccaccagtcccagaacccgccaatgctggggaatggaaaatgagggagttcaactctggccctcacaatccagtggangagacgaaactcatctgcctctgtccctctgggcacacctcatgccangtgcatctgtggacaggggccatgctcctgggcttccaaagttggagaaagctgccaggctcagacccacctaagctgaagattcccttgagaacaagtnctgtcctgtggtttcatggcctttcttccatttgtggttcttgcgaagtggaatttaaatgacatcttatcnagatggataaaccctggtttcccagtgctggaatatanaaaatggatggacaagtn

SEQ ID NO: 3107 - DNA, 621 bp, Homo sapiens
  misc_feature (603)..(603): "n" may be a, t, c, g, other or unknown
  misc_feature (612)..(612): "n" may be a, t, c, g, other or unknown
  misc_feature (619)..(619): "n" may be a, t, c, g, other or unknown
aaaaaacgaatacaaagagccatacgaccttcggaccctacagcttggggcctgggctcctctgaccatcctcattgagaaaggaaagtgagtccagagaagttgatgcttcctacctgttggagcggcccagcagtgtaagcgtggttgttactgccccatccgccatgtccttcagtgccaccattctcttctcccctcccagtggcagcgaggccagatgctgctgctgcgcctgtaagagtgagactaatggaggcaacacaggctcccagggtgggaatcctcctcccagcacccccatcacagtgactggacatggcttggctgttcagagctcagagcagctcctgcatgttatctaccagcgggtccataaggcagtgggtttggctgaaactgctctgggtcttgccagggccaacaatgagttgttaaaacgtctccaggaagaagtgggtgacctgaggcaagggaaagtgtccatccctgatgaaaatggggaaagccgggcacatagttccccacctgaggacctgggcctctcaaggaaatccggggaacctttaaggctctgtctgccgtggaaaaagaatgtgacancgtgggcancggcgtnca

SEQ ID NO: 3108 - DNA, 512 bp, Homo sapiens
  misc_feature (354)..(354): "n" may be a, t, c, g, other or unknown
  misc_feature (419)..(419): "n" may be a, t, c, g, other or unknown
  misc_feature (444)..(444): "n" may be a, t, c, g, other or unknown
  misc_feature (467)..(467): "n" may be a, t, c, g, other or unknown
  misc_feature (484)..(484): "n" may be a, t, c, g, other or unknown
  misc_feature (493)..(493): "n" may be a, t, c, g, other or unknown
aagagacctccccaatcccggcctgccaccacctggctcgcgcgcagccccggcccagaatgccttaacctgcgccgattgctgccgccgaggtgcccctcccctgtagggaccccgacgccgccagccccttcctcctttcccgcaggttagcctggcaaggaagataaagacatttgcaaccaagatggtaatcactagtgaaaatgatgaagacagaggaggtcaagaaaaagaaagtaaagaggagagtgtcttggcaatgctggggattatcgggaccattctgaacctgattgtgatcatatttgtctacatatacaccaccctgtgaatggcccagagcgtcctcanaggcctcagaatggccaaagacggaagtcctgcgtgtcggcgcatcactgaccagaccctgcganaacaagcaggcttgacccgcacatnccacccaatcaaatgcaccttcnaactttacaaaaggtcncacaaatanaccgatcctgctgcaggga

SEQ ID NO: 3109 - DNA, 662 bp, Homo sapiens
  misc_feature (6)..(6): "n" may be a, t, c, g, other or unknown
  misc_feature (411)..(411): "n" may be a, t, c, g, other or unknown
  misc_feature (492)..(492): "n" may be a, t, c, g, other or unknown
  misc_feature (526)..(526): "n" may be a, t, c, g, other or unknown
  misc_feature (571)..(571): "n" may be a, t, c, g, other or unknown
  misc_feature (583)..(583): "n" may be a, t, c, g, other or unknown
  misc_feature (621)..(621): "n" may be a, t, c, g, other or unknown
  misc_feature (652)..(652): "n" may be a, t, c, g, other or unknown
  misc_feature (661)..(661): "n" may be a, t, c, g, other or unknown
atgtanaaaaacatttaggcataggtcaggccttatgcagcatcagagaacacacaccagagtttaactctgtgggtaagagttgtacaattgtgaaatgcaaggagttcactgtaggggtgagactccacagaaaagaaaagtttcctgagagcagaacttctgtccttccctcccagttcggtactataagaagacatgcacacaaagatgtttgttatgattattgaagtgttaaatggaagaaaaatgttacccaagtcttctccaaaaagaatggtagatatttccttgaaatgcctaacccatttctggatgagactcatcaatatccccttcactccactctctgccaactcagatataatttccattgggcaccttcacagtaatgccaggattggggcaganatcctgaaagagcttcttataagatggcaaatgtgcctggcaagagcatttgtattttgtcaggtggaggcatgtgctganagttattcaactatctgaaatgttgaatttggangttgtgaaaatattgaattatgctattagtttaataatatctgangcagtaaaatantacctgaagaatggtgcctcattctgcccccttgccanttgtctcctcaatcctgaacttcctgctgangttaattcna

SEQ ID NO: 3110 - DNA, 528 bp, Homo sapiens
  misc_feature (203)..(203): "n" may be a, t, c, g, other or unknown
  misc_feature (220)..(220): "n" may be a, t, c, g, other or unknown
  misc_feature (319)..(319): "n" may be a, t, c, g, other or unknown
  misc_feature (330)..(330): "n" may be a, t, c, g, other or unknown
  misc_feature (333)..(333): "n" may be a, t, c, g, other or unknown
  misc_feature (336)..(336): "n" may be a, t, c, g, other or unknown
  misc_feature (380)..(380): "n" may be a, t, c, g, other or unknown
  misc_feature (466)..(466): "n" may be a, t, c, g, other or unknown
  misc_feature (473)..(473): "n" may be a, t, c, g, other or unknown
  misc_feature (504)..(504): "n" may be a, t, c, g, other or unknown
  misc_feature (514)..(514): "n" may be a, t, c, g, other or unknown
  misc_feature (520)..(520): "n" may be a, t, c, g, other or unknown
agtccctcgccgaccagtctgggcagcggaggagggtggttggcagtggctggaagcttcgctatgggaagttgttcctttgctctctcgcgcccagtcctcctccctggttctcctcagccgctgtcggaggagagcacccggagacgcgggctgcagtcgcggcggcttctccccgcctgggcggccgcgccgctgggcangtgctgagcgcccctanagcctcccttgccgcctccctcctctgcccggccgcagcagtgcacatggggtgttggaggtagatgggctcccggcccgggaggcggcggtggatgcngcgctgggcanaancanccgccgattccagctgccccgcgcgccccgggcgcccctgcgantccccggttcagccatggggacctctccgagcagcagcaccgccctcgcctcctgcagccgcatcgcccgccgagccacagccacnatgatcncgggctcccttctcctgcttggattccttancaccaccacngctcanccagaaca

SEQ ID NO: 3111 - DNA, 486 bp, Homo sapiens
  misc_feature (359)..(359): "n" may be a, t, c, g, other or unknown
  misc_feature (382)..(382): "n" may be a, t, c, g, other or unknown
  misc_feature (411)..(411): "n" may be a, t, c, g, other or unknown
  misc_feature (414)..(414): "n" may be a, t, c, g, other or unknown
  misc_feature (452)..(452): "n" may be a, t, c, g, other or unknown
  misc_feature (462)..(462): "n" may be a, t, c, g, other or unknown
  misc_feature (482)..(482): "n" may be a, t, c, g, other or unknown
ctgcttccgcccaaaaagataattgggaaaaactcaagaagcttggtggagaagagggagaaggatctggaggtctacctccagaagctcctggctgccttccctggcgtgacccccagagtactggcccacttcttgcattttcacttctatgagataaatggcatcaccgcggcactggctgaagagctctttgagaaaggagaacagctcctgggggccggcgaggtctttgccattggacccctgcagctgtatgccgtcacggggcagctgcagcagggaaagcccacgtgcgccagtggggatgccaagaccgacctcgggcacatcctggacttcacctgtcgccttaagtnccttaaggtttctggcacagaangaccttttgggaccagcaacattcaggancanctcctgccgttcgacctatcaatattcaagtccctgcntcaggtgganataagtcactgtgatgctangcac

SEQ ID NO: 3112 - DNA, 501 bp, Homo sapiens
  misc_feature (268)..(268): "n" may be a, t, c, g, other or unknown
  misc_feature (415)..(415): "n" may be a, t, c, g, other or unknown
  misc_feature (438)..(438): "n" may be a, t, c, g, other or unknown
  misc_feature (440)..(440): "n" may be a, t, c, g, other or unknown
  misc_feature (494)..(494): "n" may be a, t, c, g, other or unknown
  misc_feature (500)..(500): "n" may be a, t, c, g, other or unknown
atctgacggcgcggctaccatggcggcggcatttgaagcctcgggagccttagcagcagtggcgactgctatgccggctgagcatgtggccgtgcaggtcccggccccagagccaacacccgggcctgtgaggatcctgcggaccgctcaggatctcagcagcccgcggacccgcacgggggatgtgctgttggcggagccggccgacttcgagtcactgctgctttcgcggccggtgctggaggggctgcgggcggccggcttcganaggccctcgccggtgcagctcaaggccatcccgttggggcgctgcgggctcgatttaattgttcaagctaaatctggcaccgggaaaacctgtgtgttctccaccatagctttggactctcttgttcttgaaaacttaagtacccanattttgatcttggctcctacaananaaattgctgtacagatacattctgttattacagccattggaataaaaatggaangcttana

SEQ ID NO: 3113 - DNA, 544 bp, Homo sapiens
  misc_feature (492)..(492): "n" may be a, t, c, g, other or unknown
  misc_feature (506)..(507): "n" may be a, t, c, g, other or unknown
  misc_feature (516)..(516): "n" may be a, t, c, g, other or unknown
  misc_feature (522)..(522): "n" may be a, t, c, g, other or unknown
atgatattgaagagatgggagaagaagatagtgaggtcattgaacctccttctctacctcagcttcagacccccctggccagtgagctggacctcatgccctacacacccccacagtctaccccaaagtctgccaaaggcagtgcaaagaaggaaggctccaaacggaaaatcaacatgagtggctacatcctgttcagcagtgagatgagggctgtgattaaggcccaacacccagactactctttcggggagctcagccgcctggtggggacagaatggagaaatcttgagacagccaagaaagcagaatatgaaggcatgatgggtggctatccgccaggccttccacctttgcagggcccagttgatggccttgttagcatgggcagcatgcagccacttcaccctggggggcctccaccccaccatcttccgccaggtgtgcctggcctcccgggcatcccaccaccgggtgtgatgaaccaaggantggcccctatggtnnggactccancaccangtggaaatccatatggacaaca

SEQ ID NO: 3114 - DNA, 526 bp, Homo sapiens
  misc_feature (150)..(150): "n" may be a, t, c, g, other or unknown
  misc_feature (153)..(153): "n" may be a, t, c, g, other or unknown
  misc_feature (306)..(306): "n" may be a, t, c, g, other or unknown
  misc_feature (317)..(317): "n" may be a, t, c, g, other or unknown
  misc_feature (372)..(372): "n" may be a, t, c, g, other or unknown
  misc_feature (399)..(399): "n" may be a, t, c, g, other or unknown
  misc_feature (434)..(434): "n" may be a, t, c, g, other or unknown
  misc_feature (441)..(441): "n" may be a, t, c, g, other or unknown
  misc_feature (468)..(468): "n" may be a, t, c, g, other or unknown
  misc_feature (512)..(512): "n" may be a, t, c, g, other or unknown
  misc_feature (518)..(518): "n" may be a, t, c, g, other or unknown
atccgccggggggagaatatggttgcaccatcccagaagctgctgttagctcgccggtcctcggcacgccgcccgttcgcccctgcgctgtccgcccttcccctagcgttacttccggtccctcgctgagggggttcgtgcggctcccangangcgtgaaccgcggaccatgagcgtgggcttcatcggggccggccagctggcctatgctctggcgcggggcttcacggccgcaggcatcctgtcggctcacaagataatagccagctccccagaaatgaacctgcccacggtgtccgcgctcanggtaagtgganccgggcggaatgggaagcgggtggaggcccaggaaaaggatgacctgagatgaantgagtctggccggcccctgcgcccaantgctggtctttggccggcggtgacctttactccangaacgtnacaatctttccaccttctcttgggcanctcaatgtggtgggaacacccagggaaacataactgggggtcanatccanacactgga

SEQ ID NO: 3115 - DNA, 776 bp, Homo sapiens
  misc_feature (419)..(419): "n" may be a, t, c, g, other or unknown
  misc_feature (434)..(434): "n" may be a, t, c, g, other or unknown
  misc_feature (469)..(469): "n" may be a, t, c, g, other or unknown
  misc_feature (514)..(514): "n" may be a, t, c, g, other or unknown
  misc_feature (600)..(600): "n" may be a, t, c, g, other or unknown
  misc_feature (620)..(620): "n" may be a, t, c, g, other or unknown
  misc_feature (651)..(651): "n" may be a, t, c, g, other or unknown
  misc_feature (670)..(670): "n" may be a, t, c, g, other or unknown
  misc_feature (688)..(688): "n" may be a, t, c, g, other or unknown
  misc_feature (705)..(705): "n" may be a, t, c, g, other or unknown
  misc_feature (728)..(728): "n" may be a, t, c, g, other or unknown
  misc_feature (753)..(753): "n" may be a, t, c, g, other or unknown
  misc_feature (776)..(776): "n" may be a, t, c, g, other or unknown
aaagaggaaaacaccataattttgcagcagctactcccactgcgaaccaaggtggccaaactactcggttatagcacacatgctgacttcgtccttgaaatgaacactgcaaagagcacaagccgcgtaacagcctttctagatgatttaagccagaagttaaaacccttgggtgaagcagaacgagagtttattttgaatttgaagaaaaaggaatgcaaagacaggggttttgaatatgatgggaaaatcaatgcctgggatctatattactacatgactcagacagaggaactcaagtattccatagaccaagagttcctcaaggaatacttcccaattgaggtggtcactgaaggcttgctgaacacctaccaggagttgttgggactttcatttgaacaaatgacagatgctcntgtttggaacaagantgttacactttatactgtgaaggataaagctacangagaagtattgggacagttctatttggacctctatccaagggaangaaaatacaatcatgcggcctgcttcggtctccagcctggctgccttctgcctgatggaagccggatgatggcagtggctgcctcntggtgaacttctcccagccngtggcaggtcctccctctcctcctgagaccnacaaaactgattttgcccnaattagcggaacaatgtngaaactgactttgtttnaagtgccctccccaaatgccttnaaaaattggggttgtgggaacttcnggtcccccccaaaaaattgtccn

SEQ ID NO: 3116 - DNA, 503 bp, Homo sapiens
  misc_feature (71)..(71): "n" may be a, t, c, g, other or unknown
  misc_feature (73)..(73): "n" may be a, t, c, g, other or unknown
  misc_feature (150)..(150): "n" may be a, t, c, g, other or unknown
  misc_feature (153)..(153): "n" may be a, t, c, g, other or unknown
  misc_feature (199)..(199): "n" may be a, t, c, g, other or unknown
  misc_feature (288)..(288): "n" may be a, t, c, g, other or unknown
  misc_feature (327)..(327): "n" may be a, t, c, g, other or unknown
  misc_feature (389)..(389): "n" may be a, t, c, g, other or unknown
  misc_feature (441)..(441): "n" may be a, t, c, g, other or unknown
  misc_feature (465)..(465): "n" may be a, t, c, g, other or unknown
  misc_feature (484)..(484): "n" may be a, t, c, g, other or unknown
  misc_feature (498)..(498): "n" may be a, t, c, g, other or unknown
  misc_feature (501)..(501): "n" may be a, t, c, g, other or unknown
attcaagcctgggccctggaaagaggggtggacagtcccctcccttccagtccagcatgggtctggggaanangagcagctttgcctggaaggggcctcctaggagggggagcggtggtttctagctcaggctttaggatcagagagcancanattcaaatcctgacggttttggtaaagtcaattcaatctctccaanactccgtttacttgatctgcgaagtggggataatggtatcacgtcgcagggttgtcaggcggagctggtaggggagctgccccccaaancagcatggatgccccgcgaagggacatggagttgctcancaacagcctggctgcctacgcgcacatccgcgccaaccccgaaagctttggcctctacttcntgctgggcgtctgcttcggcctgctgctcaccctctgcctgctcgtcatcancatctcgtgggcgccccgcccgcngccccggggcccggctcancgccgggacccccncanca

SEQ ID NO: 3117 - DNA, 440 bp, Homo sapiens
  misc_feature (420)..(420): "n" may be a, t, c, g, other or unknown
  misc_feature (427)..(427): "n" may be a, t, c, g, other or unknown
  misc_feature (431)..(431): "n" may be a, t, c, g, other or unknown
attgggcggcgtgatctcgccgcggttccgcggccctgccgccgccgccgccagcagagcgcaccgggccgatcgggcgagtggccatggcgggcgccgaggactggccgggccagcagctggagctggacgaggacaaggcgtcttgttgccgctggggcgcgcagcacgccggggcccgcgagctggctgcgctctactcgccaggcaagcgcctccaggagtggtgctctgtgatcctgtgcttcagcctcatcgcccacaacctggtccatctcctgctgctggcccactgggaggacacacccctcgtcatactcggtgttgttgcaggggctctcattgctgacttcttgtctggcctggtacactggggtgctgacacatggggctctgtggagctgcccattgtggggaaangctttcntccnacccttccc

SEQ ID NO: 3118 - DNA, 261 bp, Homo sapiens
  misc_feature (229)..(230): "n" may be a, t, c, g, other or unknown
  misc_feature (261)..(261): "n" may be a, t, c, g, other or unknown
gtcaaaatggcggcgaggggaacctggagcagtcccggagcctgagccactgacaggagatgagagggcggcggcggcggtgggaggaggatggccgggggtgctggcgccggtgcggacggcggtgctggtggcggcggcggcggatgccaccgccgcggtcccagcggcaacagcagcggcgggaggagcctccgggaaatggatgaaaagacgctgctggatccanngttgaaggttcataaaagcctctgggattan

SEQ ID NO: 3119 - DNA, 609 bp, Homo sapiens
  misc_feature (22)..(22): "n" may be a, t, c, g, other or unknown
  misc_feature (109)..(109): "n" may be a, t, c, g, other or unknown
  misc_feature (200)..(200): "n" may be a, t, c, g, other or unknown
  misc_feature (302)..(302): "n" may be a, t, c, g, other or unknown
  misc_feature (453)..(453): "n" may be a, t, c, g, other or unknown
  misc_feature (502)..(502): "n" may be a, t, c, g, other or unknown
  misc_feature (578)..(579): "n" may be a, t, c, g, other or unknown
  misc_feature (584)..(584): "n" may be a, t, c, g, other or unknown
  misc_feature (599)..(599): "n" may be a, t, c, g, other or unknown
  misc_feature (604)..(604): "n" may be a, t, c, g, other or unknown
gttggccgcgggaaaagggganaccgcggcggcccccagtgagagcggctttccaggacggtgcgatgtgctgcgcagcgaaaagcaggaggccggcttcctggggtancggtacaggcgggcgcttactctgtgcgcttgcttccccaaccctgcaccggccatgcgcccggccttggcggtgggcctggtgttcgcangctgctgcagtaacgtgatcttcctagagctcctggcccggaagcatccaggatgtgggaacattgtgacatttgcacaatttttatttattgctgtggaangcttcctctttgaagctgatttgggaaggaagccaccagctatcccaataaggtactatgccataatggtgaccatgttcttcaccgtgagcgtggtgaacaactatgccctgaatctcaacattgccatgcccctgcatatgatatttanatccggttctctaattgccaacatgattctaggaattatcattttgaanaaaaaatacagtatattcaaatatacctccattgccctggttgtctgtggggatatttatttgcacttttatgtcnncaaancaggtgacttcccantccancttga

SEQ ID NO: 3120 - DNA, 564 bp, Homo sapiens
  misc_feature (547)..(547): "n" may be a, t, c, g, other or unknown
  misc_feature (555)..(555): "n" may be a, t, c, g, other or unknown
  misc_feature (558)..(558): "n" may be a, t, c, g, other or unknown
aggcgctggtggggcagaaacgcggcgccctgcgtcttctggttccgaggctggtcctcaccgtttccgctccggcggaagtgaggaggagggtccttcgacccgtgctgagctggatggaccgcgagacgcgcgccctcgccgacagccacttccgaggcctgggggtcgatgtccccggcgtcggccaggctccgggccgggtagccttcgtctcggagccgggcgccttctcctacgccgactttgtgcggggcttcttgctgcccaacctgccctgcgtgttttccagcgccttcacgcagggctggggcagccggcggcgctgggtgacgcccgcggggaggcccgacttcgaccacctgctacggacctacggagacgtggttgtaccagttgcaaactgtggggtccaggaatacaactcgaaccccagagagcacatgactctcagagactacatcacctactggaaagagtacatacaggcgggctactcctctcccaggggctgtctctacctcaaagactggcacttgttgcaggnactttccngtngaaaga

SEQ ID NO: 3121 - DNA, 632 bp, Homo sapiens
  misc_feature (111)..(111): "n" may be a, t, c, g, other or unknown
  misc_feature (282)..(282): "n" may be a, t, c, g, other or unknown
  misc_feature (402)..(403): "n" may be a, t, c, g, other or unknown
  misc_feature (460)..(460): "n" may be a, t, c, g, other or unknown
  misc_feature (509)..(509): "n" may be a, t, c, g, other or unknown
  misc_feature (564)..(564): "n" may be a, t, c, g, other or unknown
  misc_feature (571)..(571): "n" may be a, t, c, g, other or unknown
  misc_feature (574)..(574): "n" may be a, t, c, g, other or unknown
  misc_feature (588)..(588): "n" may be a, t, c, g, other or unknown
  misc_feature (620)..(620): "n" may be a, t, c, g, other or unknown
ggaagatggcggcgggagcgacaggaggcgctgagggagttcgtggcggtgacgggcgccgaggaggaccgggcccgcttctttctcgagtcggccggctgggacttgcanatcgcgctagcgagcttttatgaggacggaggggatgaagacattgtgaccatttcgcaggcaacccccagttcagtgtccagaggcacagcccccagtgataatagagtgacatccttcagagacctcattcatgaccaagatgaagatgaggaggaagaggaaggccanaggttttatgctgggggctcagagagaagtggacagcagattgttggccctcccaggaagaaaagtcccaacgagctggtggatgatctctttaaaggtgccaaagaacatggagctgtnnctgtggagcgagtgaccaagagccctggagagaccagtaaaccgagagttcatgttntattgaaactctggaagaatggattcagcctggataatggagaactcanaagctaccaagacccatccaatgcccagtttctggagtctatccgcagaagggangtgccancanacttccgaagctanctcacggtggacaggtgaacttggatatggangaccatccggac

SEQ ID NO: 3122 - DNA, 640 bp, Homo sapiens
  misc_feature (581)..(581): "n" may be a, t, c, g, other or unknown
  misc_feature (609)..(609): "n" may be a, t, c, g, other or unknown
  misc_feature (619)..(619): "n" may be a, t, c, g, other or unknown
gctgctgatttagttgggagtcttggtaagttgtgggggtacagaatgctaagctgcctttcccactctccactgcttgtcctgctctcacgcttgaacctagtctaatctgaacgagggacattctagggcaatcactgaagaggaagatggtgggcaataggaaggaggaggaggagtagccctgaaacaaagcagtgggggagaggggataggaggagggaaacactagacaaaatctggaaaggcaagaataagggcaagggaccaaggtctgtcaccaggagatcagtttccacattctcctgtttgtttatttgtccataggtctgcctgtagatctgctgtagggcttgtcaccattggaagcaaggtcctacttcagtggcagatctggtggccttggagtggctgaagaccaccaccctccacagggctgggcccatgcacagccatccttccctaccttgagtgagcttcctctgcatgttttctatatcactggcagagcctgtagttggaaaggggacagagtgactactggactttgtgtgaaaacaccaaccgggacaaaacttcantcaaggctgagacgggtgggggtatatnacttgtcctnacgttaacttggaacatggtt

SEQ ID NO: 3123 - DNA, 670 bp, Homo sapiens
  misc_feature (6)..(6): "n" may be a, t, c, g, other or unknown
  misc_feature (411)..(411): "n" may be a, t, c, g, other or unknown
  misc_feature (473)..(473): "n" may be a, t, c, g, other or unknown
  misc_feature (540)..(540): "n" may be a, t, c, g, other or unknown
  misc_feature (565)..(565): "n" may be a, t, c, g, other or unknown
  misc_feature (575)..(575): "n" may be a, t, c, g, other or unknown
  misc_feature (586)..(586): "n" may be a, t, c, g, other or unknown
  misc_feature (594)..(594): "n" may be a, t, c, g, other or unknown
  misc_feature (644)..(644): "n" may be a, t, c, g, other or unknown
  misc_feature (666)..(666): "n" may be a, t, c, g, other or unknown
tagaangatgccatgaaggaaatgactgctttgtaaagcgagggtaaacttctgaaatgctttgattaaaataagctatattaaagaccccaaaaccacttccctcgcagctttcctctgaatgtctttcacatgaaatgggcctgagtcactctaagactcaccttagggtgatcaaagtagcacctttgcaaaacaaagaggtagagactccctcggctggccgtgtggactttgcattcaatcagaatttggaagaaaagacttcatattcactggcaagactgcaggaccagaataaagccttggaagggcagctgccacctttacaagaaaactggtatggaagatattctacagcatccagagacatgtattttgacatcccactggaacacagagaaacaagtnttattaaaaggcatccaccccaaagacttcaaaagcttgaacccattgacttgccacgagtnattacttcaggaagactcctgagccagcgagaaaccaggacaatgcacaaagcaaagcaggttctanaaaagaaaatgcaaactccaatgtntacttctganaacagacaatntttgcatnagatgcaagtgctggaaatgatccgtaaaagacaagaaggccaaatgganttaaagaaaagtcttcatgganaagc

SEQ ID NO: 3124 - DNA, 833 bp, Homo sapiens
  misc_feature (756)..(756): "n" may be a, t, c, g, other or unknown
  misc_feature (786)..(786): "n" may be a, t, c, g, other or unknown
  misc_feature (805)..(805): "n" may be a, t, c, g, other or unknown
  misc_feature (813)..(813): "n" may be a, t, c, g, other or unknown
  misc_feature (819)..(819): "n" may be a, t, c, g, other or unknown
agatttgaatgtccaagttaaggaacttgaagctaatgtacttgctacagcccctgacaaaaaaaagcagaaattgctagaagaaaacgttagtgctttcaaaacagaatatgatgctgtggctgagaaagctggtaaagtagaagctgaggttaaacgcttacacaataccatcgtagaaatcaataatcataaactcaaggcccaacaagacaaacttgataaaataaataagcaattagatgaatgtgcttctgctattactaaagcccaagtagcaatcaagactgctgacagaaaccttcaaaaggcacaagactctgtcttgcgtacagagaaagaaataaaagatactgagaaagaggtggatgacctaacagcagagctgaaaagtcttgaggacaaagcagcagaggtcgtaaagaatacaaatgctgcagaggaatccttaccagagatccagaaagaacatcgcaatctgcttcaagaattaaaagttattcaagaaaatgaacatgctcttcaaaaagatgcacttagtattaagttgaaacttgaacaaatagatggtcacattgctgaacataattctaaaataaaatattggcacaaagagatttcaaaaatatcactgcatcctatagaagataatcctattgaagagatttcggttctaagcccagaggatcttgaagcgatcaagaatccaagattctataacaaatcaaattgcacttttgggagcccggtgtcatngaaatgaaaccaaacctccggtgccatcgnaagagtataaaaaaggaanggaagaanttgtanttgcaaccgggtaa

SEQ ID NO: 3125 - DNA, 780 bp, Homo sapiens
  misc_feature (632)..(632): "n" may be a, t, c, g, other or unknown
  misc_feature (701)..(701): "n" may be a, t, c, g, other or unknown
  misc_feature (715)..(715): "n" may be a, t, c, g, other or unknown
  misc_feature (732)..(733): "n" may be a, t, c, g, other or unknown
  misc_feature (744)..(744): "n" may be a, t, c, g, other or unknown
ccatattgccaaaggagaagcttggggagcgggaagtctacttggcaatcctggctgggatacactccaagtcactggtgcctgtgtatgtgaaggtgaggcctcaggctgagggcacccccgggagcaccggcaagcgagtgtccacctgccccttttgctttggcccctttgtgacaactgaggcctatgagctgcatttgaaggagaggcaccacatcatgcccacagtccacacggtcctgaagtctcccgccttcaagtgcatccactgctgtggggtctacacgggaaatatgaccctggctgccatcgccgtccatttggtgcgctgcagaagtgctcccaaggacagcagctcagacctgcaggcccagccgggttttattcacaacagtgaactgcttttagtcagtggtgaagtgatgcatgattccagtttttctgttaagagaaagctgcctgatggccacttaggggccgaagaccagcggcatggggaggagcagcctcccatcctaaatgccgatgcagccccgggtccagaaaaggtgacgagtgttgtgccttttaaaagacaaaggaatgaaagcagaacagagggacctattgtcaaggaccaggctcttcanattttagcattaagattcctaaaaaatatgaagggcgttcttatgaaagaaaagaagcaatttcttaangattaatttccatnaagaaaccatatcctanntaaaaaagggnaaatagaactggttggtccctcaactcctttttggg

SEQ ID NO: 3126 - DNA, 803 bp, Homo sapiens
  misc_feature (708)..(708): "n" may be a, t, c, g, other or unknown
  misc_feature (713)..(713): "n" may be a, t, c, g, other or unknown
  misc_feature (720)..(720): "n" may be a, t, c, g, other or unknown
  misc_feature (789)..(789): "n" may be a, t, c, g, other or unknown
  misc_feature (797)..(797): "n" may be a, t, c, g, other or unknown
gttcaggctggaaaaggatcttctagccagctgtaccgagagagtgccacgaccatggaaaaactggctgttctcaaagcttgggcagaggtatatgtggtcgctatgaatattaaaaaggaagcagagtcaaaaccaaaaagagcaattaaaaatactgacgatgatgatgacgactgtggtaccatcgatgaactgccaccagatagtttaataacactggtacaacctgaactaccaacactcagtcgcctgtggttagcagcattaaaagattatgcactcttgactttaccagccgaattttctagtcagcttcctccagatggtggagcattttatacccctgaaactattgatacagctagacttcactatcggaattcctgggccccaattctccatgcggtggcactttggttaaatagcacaggatttacgtgctcagagtctacagaagcagcagcaatatctggtttacaaaaacgttctacatctgtcaatttaaaccaggcatcaggagcagtgggtagtgctaaatctttgccagaaattaacaagagacagaatgcatctgattttaggtgtgaagtatacagtttctttgttcccctagacctgaggagcccattgaacatgttacagcatgcctgcaggccttacataccttgctagactccccttatgctccgaagtccatattgcagnaagantcagccngataaggtggttgggttgcctgagtgttttgcaccggcccttctaattgaccctgggaatccaatcatnctgtccangctgtt

SEQ ID NO: 3127 - DNA, 799 bp, Homo sapiens
  misc_feature (750)..(751): "n" may be a, t, c, g, other or unknown
  misc_feature (757)..(757): "n" may be a, t, c, g, other or unknown
  misc_feature (788)..(788): "n" may be a, t, c, g, other or unknown
  misc_feature (795)..(795): "n" may be a, t, c, g, other or unknown
cagttagcttcaaacaaaaacgaaagttagaccaagggaacgtattagatatggaagtaaagaaaaagaaacatgataaacaagaacagaaaggaagtgtgggagctacattcaaattaggtgactctttgtcaaacccaaacgaaagagccattgttaaagaaaagatggtatcaaatactaagtctgtagacacgaaagcgagttcatctaaatttagtagaattctaactcctaaggagtatttacaaaggcagaagcataaagaagctccgagtaataaagcatcgaagaaaatctgtgtgaaaaacgtgccatgtgattctgaacatatgagaccaagtaaacttgccgtgcaggttgaaagttgtgggaaatcaaatgagaaacacagcagcggcgtgcagacctctaaagaatcattaaatggcttgacaagccatggtaaaaacctcaaaatccaccattctcaggagtctaaaacatacaacattctaaggaatgttaaagaaaaagttggtgggaagcagcctgataaaatatggattgataagactaaattagacaaattaaccaatataagcaacgaagctcaattcagccaaatgcctccccaagtaaaggatcaaaagaaattatatctgaatagagttgggtttaaatgcactgaacgttgaaagcatttctctcaccaaatttagaaagttcacccaggaagcttcataaaggataagagacagggaaaattanncattangacctttttttaccgggtgaaaaggtaaccncaagganaaaa

SEQ ID NO: 3128 - DNA, 658 bp, Homo sapiens
  misc_feature (606)..(606): "n" may be a, t, c, g, other or unknown
  misc_feature (628)..(628): "n" may be a, t, c, g, other or unknown
  misc_feature (647)..(647): "n" may be a, t, c, g, other or unknown
  misc_feature (649)..(649): "n" may be a, t, c, g, other or unknown
  misc_feature (653)..(653): "n" may be a, t, c, g, other or unknown
gtatagtatccatgaatgaatttatggaaatagatatttgtgcagctcaatttatgcagagattaaatgacatcataatactggatgaaaacttgcatagaattctgattaaatagtgggtctgtttcacatgtgcagtttgaagtatttaaataaccactcctttcacagtttattttcttctcaagcgttttcaagatctagcatgtggattttaaaagatttgccctcattaacaagaataacatttaaaggagattgtttcaaaatatttttgcaaattgagataaggacagaaagattgagaaacattgtatattttgcaaaaacaagatgtttgtagctgtttcagagagagtacggtatatttatggtaattttatccactagcaaatcttgatttagtttgatagtgtgtggaattttattttgaaggataagaccatgggaaaattgtggtaaagactgtttgtacccttcatgaaataattctgaagttgccatcagttttactaatcttctgtgaaatgcatagatatgcgcatgttcaactttttattgtggtcttataattaaatgtaaaattgaaaattcatttgctgtttnaaagtgtgatatctttcacaanagcctttttatagtcagtnantcangaata

SEQ ID NO: 3129 - DNA, 781 bp, Homo sapiens
  misc_feature (727)..(727): "n" may be a, t, c, g, other or unknown
  misc_feature (731)..(731): "n" may be a, t, c, g, other or unknown
  misc_feature (766)..(766): "n" may be a, t, c, g, other or unknown
  misc_feature (771)..(771): "n" may be a, t, c, g, other or unknown
  misc_feature (778)..(778): "n" may be a, t, c, g, other or unknown
gagctgtcatggctgctcctgtacgtagtcacggtcttgtgctctaaggaaaacgacagcacgtgttctttttcactagtagaagtgacgttggtttcatgttgacaactttgaagccatttggaagtgtttcagtggagagcaaaatgaataacaaagcgggctcctttttctggaaccttagacaattcagtacattagtttcaacaagcagaactatgaggctatgttgtttgggactttgcaaaccaaaaatagttcattcaaactggaacattttaaataactttcataacagaatgcaatcaactgatatcattagatatctctttcaggatgcattcatttttaaatcagatgttggctttcaaacaaagggcataagcactctaacagcccttagaattgaaagactactttatgctaaaagactgttttttgactcaaagcagtctcttgtccctgttgataaatctgatgatgaattgaagaaagtaaaccttaatcatgaagtctccaatgaagatgttcttaccaaggaaacaaaaccaaaccgtatcagcagtagaaaactgtctgaggaatgtaattccctgagtgatgtgttagatgcattttcaaaagcgcccacatttcctagtagcaactatttcacaagcaatgtggacaattgccaaaaggactgtccgatgaccagaaagcgctttgaaaaacgactgatgtttanccancctgcatttaatcaagctctgtgaacaatatgatnagagnagccaangat

SEQ ID NO: 3130 - DNA, 744 bp, Homo sapiens
  misc_feature (574)..(574): "n" may be a, t, c, g, other or unknown
  misc_feature (578)..(578): "n" may be a, t, c, g, other or unknown
  misc_feature (619)..(619): "n" may be a, t, c, g, other or unknown
  misc_feature (674)..(674): "n" may be a, t, c, g, other or unknown
  misc_feature (715)..(715): "n" may be a, t, c, g, other or unknown
  misc_feature (728)..(728): "n" may be a, t, c, g, other or unknown
  misc_feature (731)..(731): "n" may be a, t, c, g, other or unknown
  misc_feature (740)..(740): "n" may be a, t, c, g, other or unknown
ttcttggttgctgtgcatgtgcttaagtgaaatgagactagggttggactatactttaagacaacagggcgtagctgggtgcggtggctcacgcctgtaatcccaggactttgggaggctgaggcgggccgatcgttttaggtcaggagttcgagaccagcctggccaacatggtgaaaccctgtctccactaaaaaaaaacacacacacaagaatcagcctggcacggtggcgggcgcctttaatcccagctatttgggaggctgaggcaggataatcgctggaacctgggaggcagaggttgcagtgagctgagattgccccactgcactccagcctgggcgacagagcaagactgtctcaaaaaacaaaacaaaaaacagggtgtatttttctggtgaccatttaaaaataatttttatgggtacctagtatgtgtaaattagcagcgtaacctttttagtatattttgagcataatagctaaattatcgagcacttgctacatgctagcagcttgacttagatgttttacatagatatttctcatttaattctcacaacaaacctataantcangtgagaaaatggagacacaggtaatttacctaaggccacantgttaaaaaattgttaaagaagctggggatctgatccttgtgtgatcaccaagtnaaaactgacaagcctctgttctcccctaagaagggtccccncttaaaatcaagnatnaaccaatgnaaat

SEQ ID NO: 3131 - DNA, 693 bp, Homo sapiens
  misc_feature (549)..(549): "n" may be a, t, c, g, other or unknown
  misc_feature (614)..(616): "n" may be a, t, c, g, other or unknown
  misc_feature (655)..(655): "n" may be a, t, c, g, other or unknown
  misc_feature (657)..(657): "n" may be a, t, c, g, other or unknown
acttggtctcctgctttcgcgacatggccttcaattttggggctccctcgggcacctccggtaccgctgcagccaccgcggcccccgcgggtgggtttggaggatttgggacaacatctacaactgcaggttctgcattcagcttttctgccccaactaacacaggcactactggactctttggtggtactcagaacaaaggttttggatttggtactggttttggcacaacaacgggaactagtactggtttaggtactggtttgggaactggactgggatttggaggatttaatacacagcagcagcagcaaactacattaggtggtctcttcagtcagcctacacaagctcctacccagtccaaccagctgataaatactgcgagtgctctttctgctccaacgctgttgggagatgagagagatgctattttggcaaaatggaatcaactgcaggccttttggggaacaggaaaagggtatttcaacaataatattccgccagtggaattcacacaagaaaatcccttttgccgatttaaggcantaggttatagttgcatgcccagtaataaagatgaagatgggctagtggttttagttttcaacaannnagaaacaggagattcgaaagccaacaacaacaagttggnanaatcaattgcataaaaggtttttgggaagggaacca

SEQ ID NO: 3132 - DNA, 775 bp, Homo sapiens
  misc_feature (686)..(686): "n" may be a, t, c, g, other or unknown
  misc_feature (745)..(745): "n" may be a, t, c, g, other or unknown
  misc_feature (759)..(759): "n" may be a, t, c, g, other or unknown
  misc_feature (761)..(761): "n" may be a, t, c, g, other or unknown
  misc_feature (774)..(774): "n" may be a, t, c, g, other or unknown
tcttcaaggaaagtcagattggtccaaactacttgagccaccgaatttctttcaaaagtatagacattatatagtattgactgccagcgcatcaacagaagaaaaccatctagagtgggttggattagtagaatctaaaatccgtgtacttgttggaaacttggaacggaatgaatttattactcttgcccatgtgaatccccagtcattcccagggaataaggaacatcataaagacaacaattacgtatcaatgtggttccttgggataatttttcggagagtagaaaatgcagaaagtgtcaacatagacttgacatatgatatacagtcatttactgatacagtgtacagacaggcaaacaatataaatatgctaaaggagggaatgaaaattgaagcaactcatgtaaagaaaaaacaacttcaccactaccttcctgcagaaattcttcaaaagaagaaaaagcaaagtctctctgatgtcaatcgaagctcgggcggacttcaatccaaaagattgtctctggatagcagttgtctggatagctccagagacactgataatggaacaccttttaattctccagcgtccaagtctgatagcccttctgtaggagaaacagaaaggaatagtgctgagcctgctgctgtaattgtggagaagccactgagtgtacaccagnccaaggactttccattccagtgattggcgcaaaagttgactctacagtaaaaactggtntcaccccccacggngngttacaattcccna

SEQ ID NO: 3133 - DNA, 805 bp, Homo sapiens
  misc_feature (400)..(400): "n" may be a, t, c, g, other or unknown
  misc_feature (423)..(423): "n" may be a, t, c, g, other or unknown
  misc_feature (472)..(472): "n" may be a, t, c, g, other or unknown
  misc_feature (480)..(480): "n" may be a, t, c, g, other or unknown
  misc_feature (633)..(633): "n" may be a, t, c, g, other or unknown
  misc_feature (672)..(672): "n" may be a, t, c, g, other or unknown
  misc_feature (690)..(690): "n" may be a, t, c, g, other or unknown
  misc_feature (714)..(714): "n" may be a, t, c, g, other or unknown
  misc_feature (771)..(771): "n" may be a, t, c, g, other or unknown
  misc_feature (773)..(773): "n" may be a, t, c, g, other or unknown
  misc_feature (801)..(801): "n" may be a, t, c, g, other or unknown
  misc_feature (805)..(805): "n" may be a, t, c, g, other or unknown
aaatcttttgtagttatcccacagttcttatatcttgtttttttattcttctctttgcttttcaggtgtggatgtttctgctgatatattctcaagctctttagttggctgtttcttggccaataataagcctaccaaagacattcttcatttctgttacactgtcttcaatttctagcatttctttgtggttcttagaatttccatctctgtgtttacactgcctgtctgttcttggatgctgtctgctttatccagtagaacccatggcatatcaatcataattgttttaaattcccagtctgataatttcagcaatcctgctatatctggttctggttcttactctttctctttaaactaacttttgccttttagtatgcttgtaatttttccttanctggacatggcatactggataanaggaaatgctgtaagcaggcctctagtaatcatgataagctgtgggganaggggcancattctattgtccagggattaaatgtcagtcttgcagtgagtctgtgcttctgcactgcgaacttcagtttttcccaccctttaattgggtcaggatgtataaaattgggtggaattggatatttcccttccccaggtcactgaaactctgantaaaacccaggtgtggtgggcttatgcctgttataccancactttgggaaggccaanggcaggtggatcacctgaaggttnggaattcatgaaacaaccctgaattggcttgaatcccaaaaaggtggaaggtccccntngaacccaaaaatttgtgaatactgcccncccn

SEQ ID NO: 3134 - DNA, 624 bp, Homo sapiens
  misc_feature (330)..(330): "n" may be a, t, c, g, other or unknown
  misc_feature (334)..(334): "n" may be a, t, c, g, other or unknown
  misc_feature (445)..(445): "n" may be a, t, c, g, other or unknown
  misc_feature (475)..(475): "n" may be a, t, c, g, other or unknown
  misc_feature (477)..(477): "n" may be a, t, c, g, other or unknown
  misc_feature (529)..(529): "n" may be a, t, c, g, other or unknown
  misc_feature (577)..(577): "n" may be a, t, c, g, other or unknown
  misc_feature (588)..(588): "n" may be a, t, c, g, other or unknown
  misc_feature (609)..(609): "n" may be a, t, c, g, other or unknown
  misc_feature (614)..(614): "n" may be a, t, c, g, other or unknown
agccggccgctaagaagccgaaagatgtccaggtcgggcgcggcggctgagaagcggactccagacagcgaccccagatgaaggtaaatgaatataaagaaaatcaaaacatcgcttatgtgtctctgagaccagcacagactacagttttaataaaaacagctaaggtctatcttgcccccttttcactcagtaattaccagctagaccagcttatgtgccccaaatccctatcagaaaagaattctaacaatgaagtggcgtgtaagaagactaaaataaagaaaacttgcagaaggattatacctccaaagatgaaaaacacatctnccanggcagaatccacgctgcaaaattcatcctcagctgttcatactgaaagtaacaagctacaacccaagagaacggcagatgcgatgaaatctcagtgttgatgtggaaagtngtcaggatggagacagtgatgaagataccncnccagccctggatttttcgggattgtcaccctacgaaaggaagagactgaagnaacatttcagaaaacgcagacttttttgcttctcttcagttgtctgantctgctgcaanactccgtggaaatgatagaanaaganaccgcctcct

SEQ ID NO: 3135 - DNA, 423 bp, Homo sapiens
  misc_feature (361)..(361): "n" may be a, t, c, g, other or unknown
  misc_feature (413)..(413): "n" may be a, t, c, g, other or unknown
  misc_feature (416)..(416): "n" may be a, t, c, g, other or unknown
atcttgctggtttgcggccggtcttggatgaagcggcggccgtggtgagagcgtggggaagggtggggtgagggggcgaggccgcagctagggcggcgaaactctcctcccctcggccccaccgcgtgggacggcgtgaacgtggtgtcggagggatgtcagccttctctgaggcggcgctggagaagaagctgtcggagttgagcaactcgcagcagagcgtgcagaccttgtccctgtggctcattcaccaccgtaaacactcgcggcccatcgtcaccgtgtgggaccgggagctgcggaaagccaaaccaaacaggaagcttacttttctctacctagccgatgatgtcatacggancagcaagaggaaggggccagagtttacaaaagattttgcaccagtcatagtngangctttta

SEQ ID NO: 3136 - DNA, 484 bp, Homo sapiens
  misc_feature (447)..(447): "n" may be a, t, c, g, other or unknown
  misc_feature (468)..(468): "n" may be a, t, c, g, other or unknown
  misc_feature (477)..(477): "n" may be a, t, c, g, other or unknown
ggacggtggcggcgagcggcgtcagagcttgagggggggttgacggcttctggcgggtggcggtgttgaaggcgagagcttgcttggcccgtgtcgcttctgtcccaagaaccggacggagagtgagggcacgagggtcgctgtcgggggctgtcgtcttccacgtacacgtcgtcgtgaggagcgcagtccggactcttcccgcaacccctccggctccctttccgcacgcctcgaggcggcggcggccaccgagacagcagcgcaccttcccccatcccttccccttatcccccagcccaaaagggcccggtctgcgccccacccccgcccgtccgcccgctacgccgccgccatgtcggcgcaggcccagatgcgcgcgatgctggaccagttgatgggcacctcccgggacggagatacaactctcaacaaatcaaattcagntgatgacagagtatgcaagantcaccttcncaactgt

SEQ ID NO: 3137 - DNA, 774 bp, Homo sapiens
  misc_feature (630)..(630): "n" may be a, t, c, g, other or unknown
  misc_feature (702)..(702): "n" may be a, t, c, g, other or unknown
  misc_feature (732)..(732): "n" may be a, t, c, g, other or unknown
  misc_feature (743)..(743): "n" may be a, t, c, g, other or unknown
  misc_feature (757)..(757): "n" may be a, t, c, g, other or unknown
  misc_feature (765)..(765): "n" may be a, t, c, g, other or unknown
acaaaagagtgctaactactctaggagagattaaagcctgtgaaatagaacttttccagataatggcgagtttttaggcttgctcatgctgaagcttaatataagctaataagtagagaaattaggaggcttggatattgcaaactttattggttggggtgttacccaggctaatagaaaaaaaattatatcctagaaagacagaacaggtgcgacttctgagaagaaaggttagagaagactagaaaggctgggaccaccttgaatttggcacacacacacacacacccacacgcacacacaaaatcaccaaatgatctggaatgtgctatgcgatgagtcagcctccactgctgtacgtccttggctacagactcctggaacagcagctcttctcaaggctagttgtgacagactcctggaacagcagctcttctcaaggctagttgtgacatccaaagtgacaagagcaggcccatattcagccacctcatccaggccttatcaaagaagagtcttatatgagatcaaatggctgcctttccccacaagattatatttttcctggtatgctctactttgacacatgtggctttctcaggaattttcaataaaccgtgacttcactanggtggcctaagccccgatgtaaaatgtatatcccactggaccctgatttacaatgcagactgccccaatgtngacagcacctgtttgtgcctcaaaatgggnacactttccanaaatgagtggtttncttttggngttgaaaca

SEQ ID NO: 3138 - DNA, 890 bp, Homo sapiens
  misc_feature (717)..(717): "n" may be a, t, c, g, other or unknown
  misc_feature (733)..(733): "n" may be a, t, c, g, other or unknown
  misc_feature (796)..(796): "n" may be a, t, c, g, other or unknown
  misc_feature (819)..(819): "n" may be a, t, c, g, other or unknown
  misc_feature (833)..(833): "n" may be a, t, c, g, other or unknown
  misc_feature (877)..(877): "n" may be a, t, c, g, other or unknown
  misc_feature (889)..(889): "n" may be a, t, c, g, other or unknown
gcgcgctctcgccggcccgccccgaaccgccccgcgctgggaatttgcggcggcctccgccggggcagccgagctgaaccggtctcttcctcggaaaggcagggccgaggggcctgcggggcagccatggaggcgacgcggaggcggcagcacctgggagcgacgggcggcccaggcgcgcagctgggcgcctccttcctgcaggccaggcatggctctgtgagcgctgatgaggctgcccgcacggctcccttccacctcgacctctggttctacttcacactgcagaactgggttctggactttgggcgtcccattgccatgctggtattccctctcgagtggtttccactcaacaagcccagtgttggggactacttccacatggcctacaacgtcatcacgccctttctcttgctcaagctcatcgagcggtccccccgcaccctgccacgctccatcacgtacgtgagcatcatcatcttcatcatgggtgccagcatccacctggtgggtgactctgtcaaccaccgcctgctcttcagtggctaccaagcaccacctgtctgtccgtgagaaccccatcatcaagaatctcaagccggagacgctgatcgactcctttgagctgctctactattatgatgagtacctgggtcactggcatgtggtacaatcccccttcttcctcatcctctttcatgtacttcaaccggntgctttactgcctccnaaagctgagagcttgattccagggcctgccctgctcctgggtgggaaccaatgggcctgtacnaactgggtacctggtcaaccgangggccaaaattttnaacctccttaacctttaaccttttttcgccaatgctgggccctncttcctggaacna

SEQ ID NO: 3139 - DNA, 785 bp, Homo sapiens
  misc_feature (484)..(484): "n" may be a, t, c, g, other or unknown
  misc_feature (656)..(656): "n" may be a, t, c, g, other or unknown
  misc_feature (708)..(708): "n" may be a, t, c, g, other or unknown
  misc_feature (720)..(720): "n" may be a, t, c, g, other or unknown
  misc_feature (733)..(733): "n" may be a, t, c, g, other or unknown
  misc_feature (759)..(759): "n" may be a, t, c, g, other or unknown
  misc_feature (773)..(773): "n" may be a, t, c, g, other or unknown
accttccaacccagccctcggctgagccgcgccgcaccatgcccgccgtggacaagctcctgctagaggaggcgttgcaggacagcccccagactcgctctttactgagcgtgtttgaagaagatgctggcaccctcacagactataccaaccagctgctccaggcaatgcagcgcgtctatggagcccagaatgagatgtgcctggccacacaacagctttctaagcaactgctggcatatgaaaaacagaactttgctcttggcaaaggtgatgaagaagtaatttcaacactccactatttttccaaagtggtggatgagcttaatcttctccatacagagctggctaaacagttggcagacacaatggttctacctatcatacaattccgagaaaaggatctcacagaagtaagcactttaaaggatctatttggactcgctagcaatgagcatgacctctcaatggcaaaatacagcangctgcctaagaaaaaggagaatgagaaggtgaagaccgaagtcggaaaagaggtggccgcggcccggcggaagcagcacctctcctcccttcagtactactgtgccctcaacgcgctgcagtacagaaagcaaatgggcatgatggagcccatgataggctttgcccatggncaagattaacttttttaagaagggagcagagatgtttttccaaacgtatggncagcctttttancctcccgttgcanacatgggttcaaagcattcaaggtanaaactgggaaaccnagggcgggaaaa

SEQ ID NO: 3140 - DNA, 809 bp, Homo sapiens
  misc_feature (653)..(653): "n" may be a, t, c, g, other or unknown
  misc_feature (762)..(762): "n" may be a, t, c, g, other or unknown
  misc_feature (778)..(778): "n" may be a, t, c, g, other or unknown
  misc_feature (806)..(806): "n" may be a, t, c, g, other or unknown
tgagaaactggcacttcagatattatatcctttagctataggttcttctctccctaagaacattagatattttagttttccagaacaaaagctttaaacttctgcagtaagttgagagaagggttgagaagaggaaaagaacttctcattttctatcagataagaatcacattagaaactaagtacaagattagacaacaaattatgtggtcaaataatatagtcattagccacctaaacattttaattccagatattatttaattccatataataactgaattcttgtgagtggattacaggtttttgatcccaaaattccagagctttcaactctctgaatttgtagtcctgaatatcccagtggtgggggttcccagcattgtgggtgctacttgcaaggccataggatctagatggccctgtcttgaccctgaaatgaaccttaagccttagaacaaagtcatgcagatgccccatttgataataatcttattcacctgtgctctggtcctcggtttctgcatgtgttagcattgcattgataactcagaatcttgataaacacttaatatttgggcctgaagcattaaactttctttttattgtatatacttaaaaaatagaactcactgccctatcatacattggtngccctccttattctttggtctttcatatgcattaagttaaatccccttaaaggtagacattcataaaaaacttacattggttaattggggtataaaaatattacccaangtttccttcaatgagnttgacaatgaagctggttttaaaatacnggg

SEQ ID NO: 3141 - DNA, 787 bp, Homo sapiens
  misc_feature (668)..(668): "n" may be a, t, c, g, other or unknown
  misc_feature (694)..(694): "n" may be a, t, c, g, other or unknown
  misc_feature (749)..(749): "n" may be a, t, c, g, other or unknown
  misc_feature (755)..(755): "n" may be a, t, c, g, other or unknown
  misc_feature (774)..(774): "n" may be a, t, c, g, other or unknown
  misc_feature (784)..(784): "n" may be a, t, c, g, other or unknown
atttcattgttactattgttgttcttaaaaatgtcctatcttttacaagagcctttgggaaaaacctccaggggcaaacctctgatgtcttctttgcggccggtagcttgactgcagtactgcattcactcaacgaagtgatggaaaatattgaagtttatcatgaattttggtttgaggaagccacaaatttggcaaccaaacttgatattcaaatgaaactccctgggaaattccgcagagctcaccagggtaacttggaatctcagctaacctctgagagttactataaagaaaccctaagtgtcccaacagtggagcacattattcaggaacttaaagatatattctcagaacagcacctcaaagctcttaaatgcttatctctggtaccatcagtcatgggacaactcaaattcaatacgtcggaggaacaccatgctgacatgtatagaagtgacttacccaatcctgacacgctgtcagctgagcttcattgttggagaatcaaatggaaacacagggggaaagatatagagcttccgtccaccatctatgaagccctccacctgcctgacatcaagttttttcctaatgtgtatgcattgctgaaggtcctgtgtattcctcctgtgatgaaggttgagaatgagcggtatgaaaatggncgaaaggcgtcctaaagcatattganggaacactttgacaggaccaaagggtcaagtaacttggctttgcttaacataaanttttgngtattaaaacacgaacctnggattttaanggg

SEQ ID NO: 3142 - DNA, 281 bp, Homo sapiens
  misc_feature (250)..(250): "n" may be a, t, c, g, other or unknown
  misc_feature (277)..(277): "n" may be a, t, c, g, other or unknown
  misc_feature (281)..(281): "n" may be a, t, c, g, other or unknown
agtccatagctgcctttgaggtggtgtagaccttgctaaccaggacggcccagtaggcagagctcatttttattcctgtctgcaatcgtgcaaaaacgcctcttatggaaaagccagagcgccaggagtcagcaaaacacactaaagattgggcagtcactggggagaacactcagcccgccagcacccaggtgaaatatacagccttgttgctcacacaaagcctgtttggtggtttcttcacacggangcatgtgacatttggtgctgaatcacncagn

SEQ ID NO: 3143 - DNA, 784 bp, Homo sapiens
  misc_feature (494)..(494): "n" may be a, t, c, g, other or unknown
  misc_feature (583)..(583): "n" may be a, t, c, g, other or unknown
  misc_feature (588)..(588): "n" may be a, t, c, g, other or unknown
  misc_feature (630)..(630): "n" may be a, t, c, g, other or unknown
  misc_feature (713)..(714): "n" may be a, t, c, g, other or unknown
  misc_feature (733)..(733): "n" may be a, t, c, g, other or unknown
  misc_feature (754)..(754): "n" may be a, t, c, g, other or unknown
  misc_feature (772)..(772): "n" may be a, t, c, g, other or unknown
atggcgccggaggagaactcggggagcgaactcttgctgcagagtttcaagcgccgcttcctggcggcgcgcgccctgcgctccttcccctggcagagcttagaagcaaagttaagagactcatcagattctgagctgctgcgggatattttgcagaagcacgaggctgtccacacagagcctttggatgagctgtacgaggtgctggcggagaccctgatggccaaggagtccacccagggccaccggagctatttgctgacgtgctgtattgcccagaagccatcgtgtcgctggtcggggtcctgcggaggctggctgcctgccgggagcaccagcgggctcctcaattctacatggcccttaccgtctgcaacccagagatgtgccagctgttcaccaccgagctatgctggactgggatcagatgggaagcggaagctcatcatgaccagaaactgtttccctacagagagcacttggagatggcaaanctgaacctcacactgtaggactcacacatgactccaacgggattgtgagaattaagtcactctcgtgggaagaatttttatatgggaangcggntaaaattttcaattggactggaatgttttggagaatgttaanttccaaaatcaggaaccacaaactgcgctctaataaagaacatcgggtatctaagcatgtggggtttccccctttctgccaannagttctgggttcttaaagnaaaatcaccataaatcaagancattgaaaaattctgggntccaaaaaatag

SEQ ID NO: 3144 - DNA, 853 bp, Homo sapiens
  misc_feature (684)..(684): "n" may be a, t, c, g, other or unknown
  misc_feature (732)..(732): "n" may be a, t, c, g, other or unknown
  misc_feature (783)..(783): "n" may be a, t, c, g, other or unknown
  misc_feature (791)..(791): "n" may be a, t, c, g, other or unknown
  misc_feature (808)..(808): "n" may be a, t, c, g, other or unknown
  misc_feature (843)..(843): "n" may be a, t, c, g, other or unknown
  misc_feature (852)..(852): "n" may be a, t, c, g, other or unknown
ccttcctggtctcccttctcccgctgggccggtttatcgggaggagattgtcttccagggctagcaattggacttttgatgatgtttgacccagcggcaggaatagcaggcaacgtgatttcaaagctgggctcagcctctgtttcttctctcgtgtaatcgcaaaacccattttggagcaggaattccaatcatgtctgtgatggtggtgagaaagaaggtgacacggaaatgggagaaactcccaggcaggaacaccttttgctgtgatggccgcgtcatgatggcccggcaaaggggcattttctacctgacccttttcctcatcctggggacatgtacactcctcttcgcctttgagtgccgctacctggctgttcagctgtctcctgccatccctgtatttgctgccatgctcttccttttctccatggctacactgttgaggaccagcttcagtgaccctggagtgattcctcgggcgctaccaagatgaagcagctttcatagaaatggagatagaagctaccaatggtgcggtgccccagggccagcgaccaccgcctcgtatcaagaatttccaagataaacaaccagattgtgaaactgaaatactgttacacatgcaagatcttccggcctccccgggcctcccattgcagcatctgtgacaactgtgtggancgcttcgaccatcactggccctgggtggggaattgtggttggaaaganggaactaccggctacttctaactcctcaaccttttctctctccctcctcanaatcctangtcttcggccttcaaanatccgtccaaaggtgggcccctcaaaaatcctttngaaaaattng

SEQ ID NO: 3145 - DNA, 871 bp, Homo sapiens
  misc_feature (702)..(702): "n" may be a, t, c, g, other or unknown
  misc_feature (711)..(711): "n" may be a, t, c, g, other or unknown
  misc_feature (753)..(753): "n" may be a, t, c, g, other or unknown
  misc_feature (769)..(769): "n" may be a, t, c, g, other or unknown
  misc_feature (856)..(856): "n" may be a, t, c, g, other or unknown
  misc_feature (860)..(860): "n" may be a, t, c, g, other or unknown
  misc_feature (866)..(866): "n" may be a, t, c, g, other or unknown
  misc_feature (868)..(868): "n" may be a, t, c, g, other or unknown
  misc_feature (871)..(871): "n" may be a, t, c, g, other or unknown
acaacttggcaagcctgtccgagctctaaatatcaacaggatgaataatgtcacgactttacatctttggcaatcggctggaaggggtctgtgtacatcagcaactttcaaacccattttatttggagaaaatgtactctctggatgcctgttagaagtcgggattaatgaaaattgtactcagctcagggagaatgctgttgaaagacttgattcattaatacaagcgactcacgttgcaatgagaggcaactccgattacgctgatcttagtgatggctggctcgaaataatacgtgtagatgcccctgatccaggtgcagacccgctggctagcagtgtgaacggcatgtgcctggatattcctgctcacctgagcatccgcatcctcatctcggatgctggcgcggtggaagggattactcagcaggagatactcggtgtagagacaaggttctcctcagtgaactggcagtaccagtgtgggcttacctgtgagcacaaggccgaccttctccctatcagtgcatccgtccagtttattaaaattcctgcacagttaccccaccccctgacaagattccaagatcaattatacagagtatgactggcaacaagaaatgaggtgtgttgggccgcagcttctatatccatggactcagtattatcaagggggagctgcattctcagtgtgttgctaangggcttacnggttgcctgttggttcctcacattgggccttggttcctcaanaaacccctgggaccangaatatgcaaagcctaatagttagacaaccaacctgggctttttaatttttttgagaatgggagttttgccccttgggtggcccaangccngaaatngnttn

SEQ ID NO: 3146 - DNA, 633 bp, Homo sapiens
  misc_feature (474)..(474): "n" may be a, t, c, g, other or unknown
  misc_feature (561)..(561): "n" may be a, t, c, g, other or unknown
  misc_feature (574)..(574): "n" may be a, t, c, g, other or unknown
  misc_feature (582)..(582): "n" may be a, t, c, g, other or unknown
  misc_feature (584)..(584): "n" may be a, t, c, g, other or unknown
  misc_feature (609)..(609): "n" may be a, t, c, g, other or unknown
cccggaacccgcggtcgccaccgcggcggcggccccaggctggaggcgtccgggcgcctctttcctccagcctctgggactgcgctgctcgcagtctcctcgccctgcctgggcttgagaaacctagtgcataccccaaagagggtttttgtgtatgtgtgtgtttttaaagggtggctatgatgactgggccttggagatgtgagactgggaggtaaaatgcacacttgctgccccccagtaactttggaacaggaccttcacagaaaaatgcatagctggatgctgcagactctagcgtttgctgtaacatctctcgtcctttcgtgtgcagaaaccatcgattattatggggaaatctgtgacaatgcatgtccttgtgaggaaaaggacggcattttaactgtgagctgtgaaaaccgggggatcatcagtctctctgaaattaaccctccccgtttcccaatctaccanctcttgttgtccggaaaccttttgaaccgtctctatcccaatgagtttgtcaattacactgggggcttcaattttgcatctaggtancaatgttatccangacattgngnaccggggggctttccatgggctacnggggtttgagggagattgcatcta

SEQ ID NO: 3147 - DNA, 651 bp, Homo sapiens
  misc_feature (609)..(609): "n" may be a, t, c, g, other or unknown
  misc_feature (614)..(614): "n" may be a, t, c, g, other or unknown
  misc_feature (625)..(625): "n" may be a, t, c, g, other or unknown
  misc_feature (640)..(640): "n" may be a, t, c, g, other or unknown
  misc_feature (651)..(651): "n" may be a, t, c, g, other or unknown
gaaacccatgtggagcccggcgatcgttgtgacatcgggaagggaagtccaaagggaggaatcctggagaggaacagggaggagggtgctccaggctgaaccgctgctcgctctccctccaggccagacttctgggagttcccgggcagacggcgtttcggtcgggacctattcctgctagtgcaggcctccaggtgacctcactcggacggaagaatcttcccgaggctgggctgttccctctcctgcccggactgtggcctcgccggggagagcgggcgggggagctcgcgccgaggactggaccatctgtacagaccagcgggagtgcgcgcgcccgcctcgcacagggccggggcctggaccaaaccacatgaactggactgagagggggaagaagcggggaggaagaaatcccgccccaaacgtccgctttccttttctctactttgtaatttattgatcagtttctgttgggagacgggtgtcctttacccgcgggaagggggcggggcttccctcccgggccgcatgcggggagaggctgctccctcccctttttcctgcccagtcgcggggcccaagtcttccttcttcgtccgaaagganggganggggggactcnctgctacaagcctcngccccctgtgn

SEQ ID NO: 3148 - DNA, 753 bp, Homo sapiens
  misc_feature (599)..(599): "n" may be a, t, c, g, other or unknown
  misc_feature (662)..(662): "n" may be a, t, c, g, other or unknown
  misc_feature (723)..(723): "n" may be a, t, c, g, other or unknown
  misc_feature (732)..(732): "n" may be a, t, c, g, other or unknown
  misc_feature (751)..(751): "n" may be a, t, c, g, other or unknown
  misc_feature (753)..(753): "n" may be a, t, c, g, other or unknown
acttacacatttcttcaatgctgaaaagtgcttgtggtgaacctgcttacacaaattatgttggtggctttcatggatgtctagattacattttcattgacttaaatgctttagaggttgaacaggtgattccattacctagtcatgaagaagttaccacccaccaggccttacctagtgtttcccatccctctgatcacatagcacttgtatgtgatttaaaatggaaatagatgtgtgtttaatggaattgaagtctgaaaaggaagtagttattttagcagaaaatttaatatgaatcaaagcttatatgtaaacttcaaggaggaatggtaaaatgttcagccctcctagttatgttcctgatgtcttcgttatgaaactgttgatgtttgcatcatacatcttctctttccttgttttcctctacaattggaggagaaacaaatatatttcttactagcaaaatagaaaactgaattatttttctccaaattgagactctcagaaaaggaagattgaattagcgtgttttttgtttgtttgtttttgtttttgtttttgtttttttgagatggagtttcactcttgttgcccangctggagtgcaatggcacaatctcggctcactgcaacctccggcccccctgggtttaagcgantctcctgcctcaagcttccccgagttagctgggaattacaggcatgcgccaacaatgtccngggctaaantttttggaatttttaagtnan

SEQ ID NO: 3149 - DNA, 759 bp, Homo sapiens
  misc_feature (139)..(139): "n" may be a, t, c, g, other or unknown
  misc_feature (389)..(389): "n" may be a, t, c, g, other or unknown
  misc_feature (547)..(547): "n" may be a, t, c, g, other or unknown
  misc_feature (647)..(648): "n" may be a, t, c, g, other or unknown
  misc_feature (701)..(701): "n" may be a, t, c, g, other or unknown
  misc_feature (709)..(709): "n" may be a, t, c, g, other or unknown
  misc_feature (718)..(718): "n" may be a, t, c, g, other or unknown
  misc_feature (753)..(753): "n" may be a, t, c, g, other or unknown
  misc_feature (758)..(758): "n" may be a, t, c, g, other or unknown
aagcgcctcgcgggggtctggcccggagtggagggcgcgcggtcccagccctcccgctcggccggcgggtgtcgagttcagccctaggggacctctttctcctggacattgaagatatggccctttggaggtgacccangagagaagggatgaaggcctttggtcctccacatgagggccccctccaaggactcgtggcctcccgcattgagacttatgggggccggcatcgagcctctgctcagagcactactggcagactctatccccgaggataccctgtgctggatcccagtcgccgacgcctccagcagtatgtcccctttgccaggggttctggccaggcccgaggcctgtcacccatgagactgcgagatccagagcccganaagaggcacgggggccatgtgggggctggcctgcttcactcccccaaactcaaggaactcaccaaggcccatgagctggaggtgaggctgcacactttcagcatgtttgggatgccccggctgccccctgaggaccggcggcactgggagataggaanagggtgggcgacaagtggcctgaccatcgaagaagtcctggaggggagctggtgcctggggcacaagggagatgagccaggaagctctgccaccaaacanngagggcctggtgggaagctcctgacaaccgaacttgatttacgttgagaaaanctcaaagnttatgaacngatttggtagccgccggccctgctgaacctgcaantgaant

SEQ ID NO: 3150 - DNA, 708 bp, Homo sapiens
  misc_feature (586)..(586): "n" may be a, t, c, g, other or unknown
  misc_feature (601)..(601): "n" may be a, t, c, g, other or unknown
  misc_feature (649)..(649): "n" may be a, t, c, g, other or unknown
  misc_feature (677)..(677): "n" may be a, t, c, g, other or unknown
  misc_feature (694)..(694): "n" may be a, t, c, g, other or unknown
  misc_feature (702)..(703): "n" may be a, t, c, g, other or unknown
atgtcgtgaagctgggggagctcgtcgccgccgccggcggctagcgggcgtccgcgccatggagcgctacgcggccgccttggaggaggtggcggacggtgcccggcagcaggagcgacactaccagttgctgtcggcgctacagagcctggtgaaggagttgcccagctctttccagcagcgcctgtcctacaccacgctcagcgacctggccctggcgcttctcgacggcaccgtgttcgaaatcgtgcaggggctactggagatccagcacctcaccgaaaagagcctgtacaaccggcgcctgcgcctacagaacgagcaccgagtgctcaggcaggcgctgcggcagaagcaccaggaagcccagcaggcctgccggccccacaacctgcctgtggttcaggcggctcagcagcgagaactagaggccgtggaacaccggatccgtgaggagcagcgggcgatggaccagaagatcatcctggagctggaccggaaggtggctgaccagcagagcacactggagaaggcgggggtggctggcttctacgtgaccaccaacccacaggagctgatgctgcanattgaacctgctggnactcatccgaaagcttcaacaaaggggctgccggggcaaggaatgcanccctgggactgggaagtccctgggcaantcccctgctgcccaatnttgaccannaaagg

SEQ ID NO: 3151 - DNA, 844 bp, Homo sapiens
  misc_feature (702)..(702): "n" may be a, t, c, g, other or unknown
  misc_feature (750)..(750): "n" may be a, t, c, g, other or unknown
  misc_feature (763)..(763): "n" may be a, t, c, g, other or unknown
  misc_feature (812)..(812): "n" may be a, t, c, g, other or unknown
  misc_feature (830)..(830): "n" may be a, t, c, g, other or unknown
  misc_feature (842)..(842): "n" may be a, t, c, g, other or unknown
atacacgcttgagcaagctttgctatcagccagccaagagatagaaatgcatgcagataacccagcagccattcagacagtggtgttacaaagggatgatttacaaaatggactgcttagtacgtgtcgagaactttctcgagccactgccgaattggaacgagcatggagagaatatgataagttagaatacgatgtaactgttaccaggaaccagatgcaagagcagctggatcaccttggtgaagttcagacggaatcagcaggaattcagcgtgcacagattcagaaaaagaactttggcgaattcaggatgtcatggaagggctgagtaaacataagcagcaaagaggtactacagaaataggttcccactttcctgttggagtagtccctccaagagcaaaatcaccaacacccgaatcttcgacaatagcttcctatgtaaccttgaggaaaactaagaagatgatggatctaagaacggaaagaccaagaagtgcagtggaacagctctgtttggctgaaagtactcgaccaaggatgactgtggaagagcaaatgggaagaataagaagacatcaacaagcgtgcctgagggagaagaaaaaagggttaaatgttatcggtgcttcagaccagtcacccttacaaaggcccttcaaatttaagggataatccatttaggactactcagactcnaaaggagggatgataagggactgggcactgccattagagaaaaatgangtaaaggtcaggnccatggaaactcccggaacagaaaattgttcaactaaaaggaaaaccgnacccccaaaaatggtggnccttcagcaaangg

SEQ ID NO: 3152 - DNA, 635 bp, Homo sapiens
  misc_feature (542)..(542): "n" may be a, t, c, g, other or unknown
  misc_feature (615)..(615): "n" may be a, t, c, g, other or unknown
  misc_feature (618)..(618): "n" may be a, t, c, g, other or unknown
  misc_feature (627)..(627): "n" may be a, t, c, g, other or unknown
  misc_feature (631)..(631): "n" may be a, t, c, g, other or unknown
caaatgtatcaagtaattctgaaattcttggggtccggccatctaatgtttccagtagttctgggattattgcagcccaaccaccaaatattctaaataactctggaatattgggaatacagccacccagtgtgtcaaatagttctggacttttgggagtgctacccccaaatatacctaacaattctggacttgtaggagtacagccaccaaatgttccaaatactcctggacttctgggaacacagccaccagctggacctcaaaacttaccccctttaagtatccctaatcaaaggatgcccacaatgccaatgttagacattcgtccgggactaataccacaggcacctgggccaagattccctttaatacagcctggaattccaccccaacggggaatcccacccccatcggtacttgattcagctcttcatccaccaccccgtggaccttttcctccaggagatatttttagtcaaccagaaagaccttttttagctcctggaagacaaagcgtgacaatgttactaacccagaanaaaggataccacttgggaatgataacattcaacaggaaggagatagagattaccggtttcctcctaaaggaancangggaaagcnttantaga

SEQ ID NO: 3153 - DNA, 678 bp, Homo sapiens
  misc_feature (557)..(557): "n" may be a, t, c, g, other or unknown
  misc_feature (587)..(587): "n" may be a, t, c, g, other or unknown
  misc_feature (589)..(589): "n" may be a, t, c, g, other or unknown
  misc_feature (614)..(614): "n" may be a, t, c, g, other or unknown
  misc_feature (625)..(625): "n" may be a, t, c, g, other or unknown
  misc_feature (662)..(662): "n" may be a, t, c, g, other or unknown
atcgaggtatacctacataaagtgtactgatattctgtgtatagcccagtggatttgtacatatgtatgcacttgtgtagccaccacccagatgaagatactgagcaggtccagtaccccagagctaccttcatttctatcactttcccaagctgtcatccccgccggctgtcatgggaaccctgtctgtaagatgcgacagtttgggtaaaggagtttggtcattttaaagagtgtgaaaggcagagaacagagaaatcaaaaccttgcagggccaaggtgggtggagagggtgtttttcttttaacatacatgggcggttttaaggagaaattgaagcagcctgttcagacaattgttttggtatctggccccaggtctgtggttcctaacatgacttgtgatattattttaagtgggcagatggctttttgatagcttctttatctttcgatctcaagctcttgcaaaggggaggttggtgctcattgcaagatcagcgataagggtttctttgtaggtcggtggctttcctgggtgagtacatttcaacatantattggttttagaacctgtgtgctgccagntnactttgcaacactgttgaagactanccaccctttgngacctaccctccttgggaaaatggcggaggatctcangggtatatccccttac

SEQ ID NO: 3154 - DNA, 744 bp, Homo sapiens
  misc_feature (502)..(502): "n" may be a, t, c, g, other or unknown
  misc_feature (527)..(527): "n" may be a, t, c, g, other or unknown
  misc_feature (577)..(577): "n" may be a, t, c, g, other or unknown
  misc_feature (602)..(602): "n" may be a, t, c, g, other or unknown
  misc_feature (667)..(667): "n" may be a, t, c, g, other or unknown
  misc_feature (689)..(689): "n" may be a, t, c, g, other or unknown
  misc_feature (713)..(713): "n" may be a, t, c, g, other or unknown
ccctgccccacaaacatgaaagaaaagacaagagaagcaccccagaagaggaggggagaggtgccccagaaaaaatcatccagtctctgaagctttgcccaggtgggcacaggccagccagcctctcctctggttgcccagctggctgcaggctgtcatttaaccttccgcccagcatgcttttgagtgtgcagaagtgctgcatgccctcttctttgaaaacctgttgagcaaatgcctccgcattttatgcaccttcaacctccacagccaaaggcccccaagaccaaacatgctgtgcacacacagcagctctttgtgtcccactcctggccgatctcctgcatcatctcgttgagcttcattgaaccccgcagtctgcatgctctgtggaactcagggtcttcattttgcacgaaactcagggtcttcattttccgtggaactcaaagtcttcttgctctgtggaacttggagtctcaaggcctttgtgctccatggnacttggggtctgtgtgattcatggnactcagaatccttgtgctctgtggtactcaaggtgtgcgtgctctgtggnactccgggtctgcatgctccatggnaagcaacaagggatgcactttgaccccccaaaaccaatacatacatccttcaatttattcctggncctcaaactgtcaaatctggtnagggttcttcaaccccaatctccnttgaggctcaaagcccggggtcttttaagac

SEQ ID NO: 3155 - DNA, 590 bp, Homo sapiens
  misc_feature (422)..(422): "n" may be a, t, c, g, other or unknown
  misc_feature (460)..(460): "n" may be a, t, c, g, other or unknown
  misc_feature (537)..(537): "n" may be a, t, c, g, other or unknown
  misc_feature (544)..(544): "n" may be a, t, c, g, other or unknown
  misc_feature (562)..(562): "n" may be a, t, c, g, other or unknown
  misc_feature (569)..(569): "n" may be a, t, c, g, other or unknown
  misc_feature (574)..(574): "n" may be a, t, c, g, other or unknown
catctcccccaacctgggggtcgtgttcttcaacgcctgcgaggccgcgtcgcggctggcgcgcggcgaggatgaggcggagctggcgctgagcctcctggcgcagctgggcatcacgcctctgccactcagccgcggccccgtgccagccaaacccaccgtgctcttcgagaagatgggcgtgggccggctggacatgtatgtgctgcacccgccctccgccggcgccgagcgcacgctggcctctgtgtgcgccctgctggtgtggcaccccgccggccccggcgagaaggtggtgcgcgtgctgttccccggttgcaccccgcccgcctgcctcctggacggcctggtccgcctgcagcacttgaggttcctgcgagagcccgtggtgacgccccaggacctggaggggccggggcganccgagagcaaagagagcgtgggctcccgggacagctcnaagagagagggcctcctggcacccaccctagacctggccaggagcgccctggggtgggccccaaggagccaagcacnggctgangccccatgcaagactganaaagaanccaanaccccccggggagttt

SEQ ID NO: 3156 - DNA, 750 bp, Homo sapiens
  misc_feature (461)..(461): "n" may be a, t, c, g, other or unknown
  misc_feature (582)..(582): "n" may be a, t, c, g, other or unknown
  misc_feature (721)..(721): "n" may be a, t, c, g, other or unknown
  misc_feature (724)..(724): "n" may be a, t, c, g, other or unknown
  misc_feature (744)..(745): "n" may be a, t, c, g, other or unknown
  misc_feature (748)..(748): "n" may be a, t, c, g, other or unknown
ccggacgcgaggggcggggcgaagcgcgggacaaagggaagcgaagccggagctgcgggcgctttttctgcccgcggtgtctcagattcattcttaaggaactgagaacttaatcttccaaaatgtcaaaaagaccatcttatgccccacctcccaccccagctcctgcaacacaaatgcccagcacaccagggtttgtgggatacaatccatacagtcatctcgcctacaacaactacaggctgggagggaacccgggcaccaacagccgggtcacggcatcctctggtatcacgattccaaaacccccaaagccaccagataagccgctgatgccctacatgaggtacagcagaaaggtctgggaccaagtaaaggcttccaaccctgacctaaagttgtgggagattggcaagattattggtggcatgtggcgagatctcactgatgaagaaaaacangaatattttacgaatacgaagcagaaaagatagagtacaatgaatctatgaaggcctatcataattcccccgcgtaccttgcttacataaatgcaaaaagtcgtgcaaaaagctgctttanaggaagaaagtccacagagacaatctcgcatggagaaaaggagaaccgtacatgagcattcaacctgctgaaagattcaagatgattatgatgatggcttttcaattgaagcatacaagccaccggccccgttttccangangaaaaaccaacggcctccanncangt

SEQ ID NO: 3157 - DNA, 694 bp, Homo sapiens
  misc_feature (637)..(637): "n" may be a, t, c, g, other or unknown
  misc_feature (645)..(645): "n" may be a, t, c, g, other or unknown
  misc_feature (655)..(656): "n" may be a, t, c, g, other or unknown
  misc_feature (690)..(690): "n" may be a, t, c, g, other or unknown
atatgaaaaataattgcatgatttctcattcctgagtcatttctcagagattcctaggaaagctgccttattctctttttgcagtaaagtatgttgttttcattgtaaagatgttgatggtctcaataaaatgctaacttgccagtgattaaatgagtgcccttccaaagtttctttttaccagaaatacagtggattgagactagaacattgctttcatttgggtttgtaggtttaaaaatctgattctaatcagaagtatatttagaacaaaacactttatttataaaagatgactccaaaattcatcttagtatttcaccatgttatatattattatcagcaagtccttctgaatattatcacagattactccatgtctctaaaatatattggcattgagctcatttgttaggtttgcccaccttattgaacagatttattttccttatacatacttgtgttgtccttggttacgtgtgtccccaaatgtaaataccaaatttttataaatcaaaaattttttagtgtgtaagagattttatgtaattttaaggggccttttcagttcatccttttgcaaaaccatcaccacttaattatacttttgcatcagtctagaagactgcatattggnaaagcaangtaaatctannatgatggtgattctgggtgagctggaataagggnatta

SEQ ID NO: 3158 - DNA, 908 bp, Homo sapiens
  misc_feature (536)..(536): "n" may be a, t, c, g, other or unknown
  misc_feature (597)..(597): "n" may be a, t, c, g, other or unknown
  misc_feature (616)..(616): "n" may be a, t, c, g, other or unknown
  misc_feature (668)..(668): "n" may be a, t, c, g, other or unknown
  misc_feature (766)..(766): "n" may be a, t, c, g, other or unknown
  misc_feature (791)..(791): "n" may be a, t, c, g, other or unknown
  misc_feature (870)..(870): "n" may be a, t, c, g, other or unknown
  misc_feature (878)..(878): "n" may be a, t, c, g, other or unknown
  misc_feature (880)..(880): "n" may be a, t, c, g, other or unknown
  misc_feature (882)..(882): "n" may be a, t, c, g, other or unknown
  misc_feature (896)..(896): "n" may be a, t, c, g, other or unknown
atctcactcccgccacagcttgggatcggtctctgctgttttacgtcctccacctcgggagcccccggtgactgtcacagcctcttgccctgtgatctgcaggttctgggagacgcacagctaagatgccaggacatcctggaagctgggaaaagatggagtttcactcttgttgcccaggctggagtgcattatcccaatctcggcttactacaacctccgcctcccaggttctgacaacaaaggagattgtgacatattgctgggcctaacactaaggtgatgttagttatatgctttggctgtgcccttggaaggcattgagacatactgctgtgcccagcaccaagatgatgtaacgtgactcttctgcttcaggcctgccaaaagaaaagattgtgacagatcactggacccagcacctaggtaggattgtgacatatatctggccaagcgcacagatgtaatgatgactgtcataccttgaagaagccaatagcaagagagaatgttgctctcaggcttaggaaaatgangaagtctttctgtacaaaagtcataaagaattactactctctcacatatattacgccctantgtgttacagagaatgtcntaacagggcccagcacacaaagtgaagattggggtttgtcctatgcacactncaccaaaccttttacagttgtcaaccctggaccaattgacaagagtctgctaagtggaagggtcctgaaattacaatgtggaacacaagtcccgcaantttgggaatttgtgacctggtcaanatggtgaaacatcctgggctaacaagtttgggaatgggggactccattttcctaaatccaagcttcaatagggaaaggntgaaaaantncncctaacctgggacncaaatttggtga

SEQ ID NO: 3159 - DNA, 187 bp, Homo sapiens
  misc_feature (119)..(119): "n" may be a, t, c, g, other or unknown
  misc_feature (179)..(179): "n" may be a, t, c, g, other or unknown
  misc_feature (183)..(183): "n" may be a, t, c, g, other or unknown
gtgctggtggctggcccgcgggaggagcgaagcggggctcggtgggctgaaacccgaaacctccagtcccggagcgcggcggggaggaaggaagcggcggcggcggtggccgaggcggngaggcggctgggccggggcctgagctgccgcggcggccgctcctcggtgagcacccggcntggngcgc

SEQ ID NO: 3160 - DNA, 602 bp, Homo sapiens
  misc_feature (330)..(330): "n" may be a, t, c, g, other or unknown
  misc_feature (546)..(546): "n" may be a, t, c, g, other or unknown
  misc_feature (567)..(567): "n" may be a, t, c, g, other or unknown
  misc_feature (573)..(573): "n" may be a, t, c, g, other or unknown
  misc_feature (579)..(579): "n" may be a, t, c, g, other or unknown
  misc_feature (587)..(587): "n" may be a, t, c, g, other or unknown
atctgagcattgataatgttctatctaaatttgtacagtgtgattttttttttagaataaatattttataaaagggtttattgtcccttgtttatgttaaaatgcttgtttccatgaggggtttcttccctctcaatgcccctagccccttgggaaccagaggccccagagacagtgtgggctcctcagcgtagcctcttggtgacagcatgcgctgcctgggcaggcacagtgctgctgtgatcacaggggaggccatgacttggcacctgggaagccagctcagagcatattcagtcaagttgatgaggaatggcggcccgacctcancagcaggtcggcgtgcgggactctcagaatggcggcctgatctcagcagcgggtcggcatgccagactctcggagccctcagctatcttcatgtgtttcaggactgctgccatgtaacgtgtgtgtgtggagagtgtgcggagtgtacacgaagcatgcccggaggctcagcatgaagcactctgtacccagctctacctcctcattgtccttcanccagtgtgtaccttcagccangcctgncctccntgtgggangggcagtccccaagg

SEQ ID NO: 3161 - DNA, 300 bp, Homo sapiens
  misc_feature (292)..(292): "n" may be a, t, c, g, other or unknown
  misc_feature (294)..(294): "n" may be a, t, c, g, other or unknown
  misc_feature (299)..(299): "n" may be a, t, c, g, other or unknown
cccggctctggagcataaacaagagcggggacgggatgaggcggcggttgatcccagggtggcgagtggcggcgaccgaggcggcgagcggggcccggcgccgaccctgagtgcagcctgacccgccctcgcgcgcgcgccctccccggccgggcccactcgccgcgcgcccagccatgaacctggcgagccagagcggggaggccggcaccggtcagctgctcttcgccagcttcagccagaacaacacagaagtgaagggggcatcgagagcagctggacttgggcgtcncnctgtng

SEQ ID NO: 3162 - DNA, 756 bp, Homo sapiens
  misc_feature (636)..(636): "n" may be a, t, c, g, other or unknown
  misc_feature (673)..(673): "n" may be a, t, c, g, other or unknown
  misc_feature (728)..(729): "n" may be a, t, c, g, other or unknown
  misc_feature (735)..(735): "n" may be a, t, c, g, other or unknown
  misc_feature (739)..(739): "n" may be a, t, c, g, other or unknown
agggccccgccctgccttctggggcaaagcggagagtggtcggttctgccccacagtaacgcgaggaaagaaatctcgcgaggctggagttctccgggagcgccggtcggaggcggtcggcggaggtgtctaccccgccggtgatggcgttgaacgccactggcttcccggccttccgtccgctgcctccgtccgattctgcgtctgcttgctgaggaggcggattaggggggcgcggagtctcttcccttgagtgcataggtcccggttggtagagggtttgagtccgcatcgccacagctgaaggctgcgagggactaagagcagaatatatctttagaaatgagttgcacaattgagaaggcacttgccgacgctaaagctcttgttgaaagattaagagatcatgacgatgcagcagaatctctgattgagcaaaccacagctctcaacaagcgagtagaagccatgaaacagtatcaggaagaaattcaagaacttaatgaagtcgcgaagacatcggccacggtccacgttagttatgggaatccagcaagaaaacagacaaatcagagagttgcaacaagaaaacaaagaattacgtacatctctggaagaacatcagtcgggcttggnacttataatgagcaagtacccgagaacaaatgtttanattgctaatggctagcaaaaaagatgatccgggtaaaaataatgaagtttaaagnngcaagnactnccaaggattggcatggg

SEQ ID NO: 3163 - DNA, 155 bp, Homo sapiens
  misc_feature (142)..(142): "n" may be a, t, c, g, other or unknown
  misc_feature (148)..(148): "n" may be a, t, c, g, other or unknown
  misc_feature (154)..(154): "n" may be a, t, c, g, other or unknown
cacattttgtagttattttgatatgaaatattgtcttggaaattgatcaattctctgagaagtacacgttatgatatttgtgctggttcagggggaagaaggagcacaaagtcaaagggcttcctaccagtggccaatgggnttaagnagaagna

SEQ ID NO: 3164 - DNA, 648 bp, Homo sapiens
  misc_feature (339)..(339): "n" may be a, t, c, g, other or unknown
  misc_feature (535)..(535): "n" may be a, t, c, g, other or unknown
  misc_feature (588)..(588): "n" may be a, t, c, g, other or unknown
  misc_feature (591)..(591): "n" may be a, t, c, g, other or unknown
  misc_feature (595)..(595): "n" may be a, t, c, g, other or unknown
  misc_feature (606)..(606): "n" may be a, t, c, g, other or unknown
  misc_feature (638)..(638): "n" may be a, t, c, g, other or unknown
tatatgtgacctttttaaaaaatgagctgtaagcagtctcccagacagtagctcagcctccagaactctctttctgcatagttgaagacccctcttcacacaagatggtagcaacaaatcataggtgcaattgcaccaaattcacagaagatcaattgaaaatcctcatcaataccttcactcaaaaaccttacccaggttatgctaccaaacaaaaacttgctttagcaatcaatgcagaagagtccagaatccagatttggtttcagaatcaaagagctaggcatggattccagaaaacaccagaacctgactttagatttaagccacagccatggncaagattaacctggtgtggagtttcaaaatagagaagccagatggtgttgtaccacctatagcacctttcaattacacacaatcatccatgcatttatgaaaaacccataccctgggattgattccggagaacaacttgctgaagaaattggtgcttcagagtcaagagtccaaatttggggtccaaaatcaaggntttaagatttcatctccagaggaaaaagagaacctggtatggccttagaatgnggnaagnccaagtgaagnccagggggaagggttctgagggacttcaaggnacaggaggat

SEQ ID NO: 3165 - DNA, 741 bp, Homo sapiens
  misc_feature (531)..(531): "n" may be a, t, c, g, other or unknown
  misc_feature (546)..(546): "n" may be a, t, c, g, other or unknown
  misc_feature (557)..(557): "n" may be a, t, c, g, other or unknown
  misc_feature (584)..(584): "n" may be a, t, c, g, other or unknown
  misc_feature (601)..(601): "n" may be a, t, c, g, other or unknown
  misc_feature (659)..(659): "n" may be a, t, c, g, other or unknown
  misc_feature (708)..(708): "n" may be a, t, c, g, other or unknown
  misc_feature (726)..(726): "n" may be a, t, c, g, other or unknown
  misc_feature (733)..(733): "n" may be a, t, c, g, other or unknown
  misc_feature (740)..(740): "n" may be a, t, c, g, other or unknown
ttagaagaatgcataaaacgtagtaaatggggtctgtcattagcaaaggcaaatctaagcaatcatttttccccccagaagttacttagaaggagaactgggaacacttggggtctctctaactgatggcattcacttcacacagtcgtctatgttatccagagatttttatttcattttacattttagggcacagttctttggggctaattaaaatggggtttgcaggctttttatggtgaagaataatatatctctgtctatagctttcccatggtagcctgataaggctgagagagaaaaatatgtgcagtatctcatcctccccctgtaccaggccatagctttgaagtgtattttgtaaattcaactataggttagtcagaatgctgtttttcgttaattaacttagcctgtgttgatatctcctccttcctggtcacattcaaaccttcccagagtacaaaggggtatgtagaaaggattccagaagaagtaatactttattctctaatgttaatagcttttccnggatctcttaagtanggggaaagtanaaaatgatggttaacagtatgtgtggngatgtcattatctccanagagggttcaagaaaatcctttggaaataaaaagttaaatggttgcaattcaaggggnaatttcaagtcctcaaggtctgattaacttacttttttccctttggccnttgggctggattccggcnttggtanataaatna

SEQ ID NO: 3166 - DNA, 763 bp, Homo sapiens
  misc_feature (456)..(456): "n" may be a, t, c, g, other or unknown
  misc_feature (517)..(517): "n" may be a, t, c, g, other or unknown
  misc_feature (521)..(521): "n" may be a, t, c, g, other or unknown
  misc_feature (562)..(562): "n" may be a, t, c, g, other or unknown
  misc_feature (592)..(592): "n" may be a, t, c, g, other or unknown
  misc_feature (623)..(623): "n" may be a, t, c, g, other or unknown
  misc_feature (691)..(691): "n" may be a, t, c, g, other or unknown
  misc_feature (699)..(699): "n" may be a, t, c, g, other or unknown
  misc_feature (729)..(729): "n" may be a, t, c, g, other or unknown
  misc_feature (736)..(736): "n" may be a, t, c, g, other or unknown
  misc_feature (748)..(748): "n" may be a, t, c, g, other or unknown
tttgtattcctagacttgctgatatttacctctctcttgtctcttcagagtaaatggttcccttctttccttcctactttccttcattctctcttccttccctccttcctacttcttttcttccttcctcttcctctcttaaaactatcttagatgtagaatcctggtgtagggttttattttatttttattttttgacccaataaaatgttatatgaaagaatgaaaatattaatttaagagactctgggagtctgaataaagtagctttatattaactacaggataatattagccttattacccccacaagattttttaaaacttgaggtaggtagctacattaaataaatttgctacttatataaaaatttttatcaacactaaacttttaaagtttacaagttttttttttcttttttacagtcttctatagagttaggttaaaaatgtggntctaaccatcaacaattgcatgggtaaatgaccctgaactaaaactggatgggttccctancaanacaaataaaaatatacctttttcagggttcaatctgtgcanggtatatgcaaggttaaatccaccaaggcntaagaacttccacaaaaatatttcaaggganaagggcctgcaatttagacgggaacaagaaatgggtttttcccctcactggtcccggaatgctccaanacttgggntttaaaatttttgctaacctttttttaaanaaatccngattaaggatangaccaatttaaccct

SEQ ID NO: 3167 - DNA, 727 bp, Homo sapiens
  misc_feature (492)..(492): "n" may be a, t, c, g, other or unknown
  misc_feature (668)..(668): "n" may be a, t, c, g, other or unknown
  misc_feature (672)..(672): "n" may be a, t, c, g, other or unknown
  misc_feature (682)..(682): "n" may be a, t, c, g, other or unknown
  misc_feature (718)..(718): "n" may be a, t, c, g, other or unknown
  misc_feature (727)..(727): "n" may be a, t, c, g, other or unknown
aaaatcgcatttccaagcccaatgacatcgagctgtttcagatcgacgacgagacgttctttgtcatcgcagacagctcaaaggctggtctgtccacagtttataaatggaacagcaaaggattctattcttaccagtcactgcacgagtggttcagggacacggatgcggagtttgttgatatcgatggaaaatcgcatctcatcctgtccagccgctcccaggtccccatcatcctccagtggaataaaagctctaagaagtttgtcccccatggtgacatccccaacatggaggacgtactggctgtgaagagcttccgaatgcaaaataccctctacctttcccttacccgcttcatcggggactcccgggtcatgaggtggaacagtaagcagtttgtggagatccaagctcttccatcccggggggccatgaccctgcaagcccttttcttttaaagataatcactacctggccctggggaagtgnctatacattctctcagatataccagtgggataaagagaagcagctattcaaaaagtttaaggagatttacgtgcaggcgcctcgttcaatcacagctgtctccaacggacaggagagatttctttttttgcatccaagtttcaaaggggaaaacaaagattttttgaacatataanttgntgactttaanttttgtgaaaggtgttggtggggtgaaaactaaggngaaatggtn

SEQ ID NO: 3168 - DNA, 712 bp, Homo sapiens
  misc_feature (621)..(621): "n" may be a, t, c, g, other or unknown
  misc_feature (628)..(628): "n" may be a, t, c, g, other or unknown
  misc_feature (633)..(633): "n" may be a, t, c, g, other or unknown
  misc_feature (682)..(682): "n" may be a, t, c, g, other or unknown
  misc_feature (703)..(703): "n" may be a, t, c, g, other or unknown
ctggttctaagtcttctcaaagaggaggaggaagatggtcaagaaggcagcattcacaatctaccacttgtaacatcccaaaggccattttatgatggacccatgccaactccccggcaaaagccatttcagtcaggttctacaccgttgcatctcactcacagattcatgcaagcttcactgcctgcactttagttcttgggattcaagcaaagagtggataatagacttgcctcagaatgaggatattgaagccatatgtctcggtcaaggatgggctgctgccgctactagtgccctgcttcttcgattgtttactattggaggggttcaaaaagaggtattcagccttgctggacctgtggtgtcaatggcaggacatggagaacagcttttcattgtttatcacagaggtacaggatttgatggggatcagtgccttggagttcaactgctagagctggggaaaaagaaaaaacaaattttgcatggtgaccctcttcctcttacaaggaaatcctaccttgcatggattgggttttcaagctgaaggtaccccttgttacgtggattcagaaggaattgttcgaatgcttaacagaggacttggtaatacgtggnctcctanatgtnatacaagagagcactgcaaagggaaaatctgatcactactggggtgggntggtatccatgaaaatcccancaactaagg

SEQ ID NO: 3169 - DNA, 522 bp, Homo sapiens
  misc_feature (447)..(447): "n" may be a, t, c, g, other or unknown
  misc_feature (459)..(459): "n" may be a, t, c, g, other or unknown
  misc_feature (462)..(462): "n" may be a, t, c, g, other or unknown
  misc_feature (465)..(465): "n" may be a, t, c, g, other or unknown
  misc_feature (471)..(471): "n" may be a, t, c, g, other or unknown
gaaacagcacagaacacgaggtggtccccatgtccctggcacactagcattccgggggatgaggaatccccagcccttgaggcagaggtgccgagtgactgccatgcttcgcccgtccgcatgggcgcttctgtccagctgcacccgaggccgggggtttccctcacctcggtcttcccaagatggagatgctaacgaaactgagaagggggcgtatcttgacgaaggtttgtgcaagtcaggcccttctggaacacagcagggcctacaacgaggggcctttgcgatgggctgtgaggatgggggtggtgggaagaattggccacgttagagaccccatgccaccccaccatggtgagtgctctgtgcctcctgctcacctgtggtgagctgggcgagctgggcgagctgggcgagctgggctggggagagcctgtgaggaccganaggagaaatganaanaangaacanaaatattatttctatgtaatttatattttacttatgccaaattatttatga

SEQ ID NO: 3170 - DNA, 641 bp, Homo sapiens
  misc_feature (447)..(448): "n" may be a, t, c, g, other or unknown
  misc_feature (473)..(473): "n" may be a, t, c, g, other or unknown
  misc_feature (529)..(529): "n" may be a, t, c, g, other or unknown
  misc_feature (558)..(558): "n" may be a, t, c, g, other or unknown
  misc_feature (589)..(589): "n" may be a, t, c, g, other or unknown
  misc_feature (611)..(611): "n" may be a, t, c, g, other or unknown
  misc_feature (623)..(623): "n" may be a, t, c, g, other or unknown
  misc_feature (630)..(630): "n" may be a, t, c, g, other or unknown
ttcattttactgggagaattaagaatgagccatatcaggtagtagaatgtgccatgcgagcacttcacttctcttccaggcacaataaagacattgccctggtccacctggcaaacgttctacacagagcacacttctctgctgatgctgctgtcgtggtccatgcagctctggatgacagtgacttcttcaccagctattacactttggggaatatatatgcaatgcttggggaatataaccactcagtgctctgttatgaccatgctttgcaggccagacctgggtttgagcaagctataaagaggaagcatgctgtcctatgtcagcaaaaactggagcagaaattggaggctcagcatagatctctccagcgaacactgaatgagttaaaagagtatcaaaagcagcatgaccactacctgagacagcaggaaatcctagaanngcataaactgattcaggaggagcanatcttaagaaatatcattcatgaggactcagatggcaaaagaggcacaattagganatcatcagatatgccgactgggcaaccancagcatagtttacattgccagtgggaccagnctgtacgcctatcatcgtgggngatatcctttgnaaatgtnggctatggtca

SEQ ID NO: 3171 - DNA, 747 bp, Homo sapiens
  misc_feature (616)..(616): "n" may be a, t, c, g, other or unknown
  misc_feature (631)..(631): "n" may be a, t, c, g, other or unknown
  misc_feature (665)..(665): "n" may be a, t, c, g, other or unknown
  misc_feature (680)..(680): "n" may be a, t, c, g, other or unknown
  misc_feature (689)..(689): "n" may be a, t, c, g, other or unknown
  misc_feature (733)..(733): "n" may be a, t, c, g, other or unknown
  misc_feature (740)..(740): "n" may be a, t, c, g, other or unknown
gtgctaggttttaaataccatccatatgctgaccacccctaaatgtacatctcttgctttaagatctcttcttacaccagacttatttgctcactgctgactttacatttccatttggatgttcgcaagacgtttaaaactcaacccggcccaaaatgaactctttattactctcccaaacctgctcttcccacagttttcaccatcttggctaacagccaatgacccagggctaaaacttaggaaccatttttaacttccctgtttctttcactttctaccatgcatttcatttcttccttcacaatcaagctaggatttgattgcttctcagttcctttattgctgtcaacctggtctcagccaccatctgtctcatgaaatcctgaagtaacctcctgtggctacctttactgttgacagttaattcttcacattgctgccatagttttacttttaatatgccagatcacatgactgcttaaaacgtacgatagcttttcatcttccttgggagtaaaagccaaagccttatcatggcttgtaaaattctgtgtcttctggcctgcagttaacacctttgactctacatcctatttctctctaatattcctcnaaacatgccaagcangcttctacttgggggacctttggcagttgctatnccccctcccagtttncgctttccncctaaaaaaaattacataattttgttccccattcctccttttanggcccanctccaaa

SEQ ID NO: 3172 - DNA, 600 bp, Homo sapiens
  misc_feature (435)..(435): "n" may be a, t, c, g, other or unknown
  misc_feature (513)..(513): "n" may be a, t, c, g, other or unknown
  misc_feature (538)..(538): "n" may be a, t, c, g, other or unknown
  misc_feature (562)..(562): "n" may be a, t, c, g, other or unknown
  misc_feature (567)..(567): "n" may be a, t, c, g, other or unknown
  misc_feature (592)..(592): "n" may be a, t, c, g, other or unknown
gaaataacgaagatccctatgggagatatctggttaacagacaagcaacctgaggaacacaactttagcgataccaaaataatttccctttctcatcttgaaatgacctggactaacagaagaaattttcctgcattgcttgtgaggatcttacataaatcaaaactgcgatactatggaaaacctgataaaaagatgattgaaccatatcagacctttttggaagttgctgacagttcaggcacagtgtcagtgattatgtggaatgccctgtgtcctgagtggtataaaagtttgcgggttggtttagttcttctgcttcaagactattctgttaaaaagagttatccattcagaatacagcctgtccccgtggatccacagatcaaactaatttctacaatggaaatctgcctgaatcttcgagatcccccnacaaatataattatcattccagaaaagcaggtgaaaccagaatggagactgccaaagctaaatcaccgatttaccccnaggtcagaaactggatgatatgccnaaaaattgcatctgtgatgttatnggccntttatttttgttggaaagggtccancgggtcaa

SEQ ID NO: 3173 - DNA, 686 bp, Homo sapiens
  misc_feature (616)..(616): "n" may be a, t, c, g, other or unknown
  misc_feature (666)..(666): "n" may be a, t, c, g, other or unknown
  misc_feature (669)..(669): "n" may be a, t, c, g, other or unknown
  misc_feature (674)..(675): "n" may be a, t, c, g, other or unknown
ttcggatgcttggcttggttttgtgttgattctgcaagagcggttgattttggattgagtatcctgtggttcttgctttttactccttgttcatttgtctgttggtacagaccactttatggagctttcagtggttggatttcatcccttactggtctcaaccaaaatattcctgttggaatcatgatgataatcatagcagcacttttcacagcatcagcagtcatctcactagttatgttcaaaaaagtacatggactatatcgcacaacaggtgctagttttgagaaggcccaacaggagtttgcaacaggtgtgatgtccaacaaaactgtccagaccgcagctgcaaatgcagcttcaactgcagcatctagtgcagctcagaatgctttcaagggtaaccagatttaagaatcttcaaacaatacactgttaccttttgactgtacctttttctccagttactgtattctacaaatatttttatgttcaaaacacacagtacagacagcatggatatttcctgttcacttgtgcatgggctaaaaccaagaaaacttccttgtcttattactttacctaataattcttaatatttcagtgccccctgcanaaaaaatattacatggccaaataaatattcccccatatttttgggggganganattcnntggaattattc

SEQ ID NO: 3174 - DNA, 548 bp, Homo sapiens
  misc_feature (41)..(41): "n" may be a, t, c, g, other or unknown
  misc_feature (239)..(239): "n" may be a, t, c, g, other or unknown
  misc_feature (309)..(309): "n" may be a, t, c, g, other or unknown
  misc_feature (334)..(334): "n" may be a, t, c, g, other or unknown
  misc_feature (348)..(348): "n" may be a, t, c, g, other or unknown
  misc_feature (370)..(370): "n" may be a, t, c, g, other or unknown
  misc_feature (444)..(444): "n" may be a, t, c, g, other or unknown
  misc_feature (487)..(487): "n" may be a, t, c, g, other or unknown
  misc_feature (492)..(492): "n" may be a, t, c, g, other or unknown
  misc_feature (506)..(506): "n" may be a, t, c, g, other or unknown
  misc_feature (517)..(517): "n" may be a, t, c, g, other or unknown
  misc_feature (546)..(546): "n" may be a, t, c, g, other or unknown
aactagcccagccgcgcggaagcgcctggggagaggagaangagccgacctgccgagatggaggcgaccggcacctgggcgctgctgctggcgctggcgctgctcctgctgctgacgctggcgctgtccgggaccagggcccgaggccacctgccccccgggcccacgccgctaccactgctgggaaacctcctgcagctacggcccggggcgctgtattcagggctcatgcggctgantaagaagtacggaccggtgttcaccatctacctgggaccctggcggcctgtggtggtcctggttgggcangaggctgtgcgggaggccctgggangtcaggctgaaganttcagcggccggggaaccgtancgatgctggaagggacttttgatggccatggggttttcttctccaacggggaacggtggaagcagctgaagaantttaccatgcttgctctgcgggacctgggcatggggaagcganaagcnaagaactgatccangcggaagcccngtgtctggtggaaacattccaggggacanaa

SEQ ID NO: 3175 - DNA, 671 bp, Homo sapiens
  misc_feature (425)..(425): "n" may be a, t, c, g, other or unknown
  misc_feature (535)..(535): "n" may be a, t, c, g, other or unknown
  misc_feature (565)..(565): "n" may be a, t, c, g, other or unknown
  misc_feature (595)..(595): "n" may be a, t, c, g, other or unknown
  misc_feature (616)..(616): "n" may be a, t, c, g, other or unknown
  misc_feature (637)..(637): "n" may be a, t, c, g, other or unknown
  misc_feature (640)..(640): "n" may be a, t, c, g, other or unknown
  misc_feature (666)..(666): "n" may be a, t, c, g, other or unknown
gctagccttgcgcggcgcggggagagcgcagtggcgccggcgggaaagggctgcggacctgcggcgccgcgttgtgcgttcgacgacgcggcaccggcttcgacgccctctgcccgctccagaagcagtaagaagacatgttggataacaagaagaggtgtagagtttgcatatatcaactgtggccttaatgagcatgttgacagcatcgatgctagacagacagtctttttactgctggattgtgcaagatatttaaccctattttgtttgaattatgacttaaatgtcaaacatcttaactaagaaaagggaaacattttagttttggaagtcagaatgccaaggagaaggaaaaatcttgggggaaatccttttcggaagactgcaaaccctaaggaagttgtcgtatccagtgttgctantcgtgaggagccaaccactactctaccttccatgggtgagacaaaagttgatcaggaagaactcttcaccagtatctcagaaatattttctgatctgggatcctgatgtntgtatttgatgctttctgaatgtgatttcnaagttgaaaatgctatggattgtctattanaattatctgcccctgataccnagatagaagaatcccttcccnaantttcgttgcttctgaaaacccagttngtgcc

SEQ ID NO: 3176 - DNA, 250 bp, Homo sapiens
  misc_feature (241)..(241): "n" may be a, t, c, g, other or unknown
  misc_feature (245)..(245): "n" may be a, t, c, g, other or unknown
  misc_feature (247)..(247): "n" may be a, t, c, g, other or unknown
aactctccgggaggggcgcttcccgacgccaagtcttactgttgctcaggctggaatgcagtggtgcgctctcggctcactgcaacctctcccttctgggttcaagcgattctcgtgcctcagcctcccaagtagctgggattacagacaaaaggatgccacggagaaagaaaaaagttaaagaagtctccgaatctcggaaccaggagaacaaggatgtggaaactaccagttctgtcantgtnanaag

SEQ ID NO: 3177 - DNA, 740 bp, Homo sapiens
  misc_feature (652)..(652): "n" may be a, t, c, g, other or unknown
  misc_feature (661)..(661): "n" may be a, t, c, g, other or unknown
  misc_feature (729)..(729): "n" may be a, t, c, g, other or unknown
ggatctccagcagtggcgttacttctagcggctggataccgggttctccgcgagatcccgagatattctccccgcacggaagcgacgactggcctggccagaggactcgcgtgggagcgaggtgccggccccgacaggacggtgagcctacccgtatattacaagaaatctcaagtcaaacactggaaaagatgtcagaagattcagaaaaggaagactattcagacagaacaatcagtgatgaagatgaatcggatgaggatatgttcatgaaatttgtaagtgaagatcttcatcggtgtgcacttttaacagctgactcttttggtgatcccttcttcccccggactacacagatactattagaatatcagctagggagatgggtgccacgtcttcgtgaaccaagggatttatatggtgtctcttcttctggtccattgagcccaacacggtggccataccattgtgaagtcatcgatgaaaaagtccagcatattgatggagtctcatgctggagtgagtctcaccaggctggagcgcagtggtgcgatctcggctcactgcaacctccacctcccaggttcaagcgattcgcctgcttcagcctcctgagtagcagagactacaggcgcgtgccaccacgcccagntaatttggnatttttagtaaaaacggggtttcaccatgttggccaggatggtctccgctcttgacctcgtgatccgnctgcctcactt

SEQ ID NO: 3178 - DNA, 638 bp, Homo sapiens
  misc_feature (361)..(361): "n" may be a, t, c, g, other or unknown
  misc_feature (561)..(561): "n" may be a, t, c, g, other or unknown
  misc_feature (615)..(615): "n" may be a, t, c, g, other or unknown
  misc_feature (626)..(626): "n" may be a, t, c, g, other or unknown
aaaaaaaagatgaatcactgcaacttgtgggacagccaccaccctgaggtaccccagcgcatcttgcggatcatgtgccgtctggaggagctgggccttgccgggcgctgcctcaccctgacaccgcgccctgccacagaggctgagctgctcacctgtcacagtgctgagtacgtgggtcatctccgggccacagagaaaatgaaaacccgggagctgcaccgtgagagttccaactttgactccatctatatctgccccagtaccttcgcctgtgcacagcttgccactggcgctgcctgccgcctggtggaggctgtgctctcaggagaggttctgaatggtgctgctgtggtgcgtnccccaggacaccacgcagagcaggatgcagcttgcggtttttgctttttcaactctgtggctgtggctgctcgccatgcccagactatcagtgggcatgccctacggatcctgattgtggattgggatgtccaccacggtaatggaactcagcacatgtttgaggatgaccccagtgtgctatatgtgtccctgcaccgntatgatcatggcaccttcttccccatggggggtgagggtgccagcagccagatnggccgggctgngggcacaggctt

SEQ ID NO: 3179 - DNA, 730 bp, Homo sapiens
  misc_feature (691)..(691): "n" may be a, t, c, g, other or unknown
  misc_feature (695)..(695): "n" may be a, t, c, g, other or unknown
  misc_feature (701)..(701): "n" may be a, t, c, g, other or unknown
cacacaggcaggtcgggcaggcgggtcgcaggttgtaaatccatgtggcgggggctttggaccctggcggcccaagcggcacgtgggcctcgcagattgtgcacgcgccggagcagcggcgcaccagcccccggctccggcgccaccatcttcgcgctaagctctggccaaggccgctgcggcatcgcagtgatccggaccagcggccccgccagcggccacgccctccgaattctcaccgcaccccgagacctgccccttgctcgccacgccagcctgcgcctgctcagcgatccccgctccggggagcctctggaccgcgcactggtgctctggttcccaggtccccagagtttcaccggtgaggactgcgtggagttccacgtgcatggaggcccggcagtggtgagcggcgtcctgcaggccttgggcagcgtgccagggcttcgaccggcggaggcaggcgagttcactagacgggcgttcgccaatgggaagctgaacctgaccgaagtggaggggctggcggaccttatccacgcggaaacagaggcgcagcggcggcaggccctcaggcagctggacggagagctgggccacctctgccgtggctgggcccgagaccctcaccaaagcttttggcccacgtggaggcctatatcgatttcggcgaaggatgacaacctgggangganggggtncctggagcaaggcccgacatcgaaagtac

SEQ ID NO: 3180 - DNA, 819 bp, Homo sapiens
  misc_feature (811)..(811): "n" may be a, t, c, g, other or unknown
atcaatagaaacaagaccggagagataacagcctcctccaacaaatccctcaacttgctaaaaatcaagcatggcgatttgttgttcctgtttccctcgagccttgctgggccctcatctgaaatggagacgtcagttccaccgggcttcaaagtctttggcgctcccaacgtggtggaggatgagattgatcagtacctcagcaaacaggacgggaagatttacagaagccgagacccacagctatgccgccacggccctttggggaaatgcgtgcactgcgtccctctagagccattcgatgaggactatctaaaccatctcgagcctcccgtgaagcacatgtccttccacgcctacatccggaagctgactggaggggctgacaaggggaagtttgttgccctggagaacatcagctgcaagattaagtcagggtgcgaggggcacctcccgtggccgaatggcatctgtactaagtgccagccgagcgccatcacgctgaacagacagaagtacaggcatgtggacaatatcatgtttgagaatcacaccgtcgctgaccgctttcttgacttctggagaaagacagggaaccagcattttgggtacttatacggacggtacacggagcacaaagacattccccttggcatcagggctgaagtggctgcgatttatgagccacctcagattggtacacagaacagcttggagcttcttgaggatccaaaagctgaagtggtcgatgaaattgctgccaaacttggcctgcggaaggttggctggatatttacagacctcgtctcanaagatccc

SEQ ID NO: 3181 - DNA, 703 bp, Homo sapiens
  misc_feature (674)..(674): "n" may be a, t, c, g, other or unknown
  misc_feature (690)..(690): "n" may be a, t, c, g, other or unknown
  misc_feature (694)..(694): "n" may be a, t, c, g, other or unknown
agcatcccaaagaatttcttgtattcctaaaacccatatttctaataagtatgggaataatttcctccaggaagcacacatgagagaaaaatctttccaatgtaatgagagtggcaaagcctttaattgtagctcactgttaaaaaaatgtcagataatccatttaggagagaaaaaatataaatgtgatatatgtggcaaggtctttaatcagaagcgataccttgcataccatcatagatgtcacactggtgagaaaccttacaagtgtaatcagtgtggcaagaccttcagttacaagtcatcccttgtaattcacaaggcaattcatactggagagaaacctcacaagtgtaatgaatgtggcaaggtttttaatcaaaaagcatattttgcaagtcatcatagacttcatactggagagaaaccttacaaatgtgaagaatgtgacaaagtttttagtcgctaatcacaccttgaaagacataggagaattcatactggagagaaaccgtacaaatgtaaggtttgtgacaaggctttcagacgtgattcacacctggcacaacatattgtaattcacactggagagaacccttacaagtgtaatgagtgtggcaagacctttgttcaaaattcatctcttgtaatgcataaggtcattcatactgganagaaatgtccaggtgnaatnaatgggcca

SEQ ID NO: 3182 - DNA, 798 bp, Homo sapiens
  misc_feature (701)..(701): "n" may be a, t, c, g, other or unknown
  misc_feature (770)..(770): "n" may be a, t, c, g, other or unknown
  misc_feature (783)..(783): "n" may be a, t, c, g, other or unknown
tcagctcgcactgcatatgcaacgcaactcaactcatgctgcgtatgcaactcaactcacactgtatgcaactcagctcgctctgcatatgcaattcaactcgcactgcgtatgcaaatcaacttactgcatatgcaactcaactcactgcgtatgcaactcaactcgcactgcgtatgcaactcaactcgcactgcgtatgcaactcaactcgcactgcgtatgcaactcagctcgcactgcgtatgcaactcaactgttgcaagtacttatttccggccacttcctttttctaactaccacaccaagccagtatttctcctccctgaagtcagcccaggatgaggcactagacagcaggacatgctgtatgcccttgggcctgctggaagtatgcagactagccagccccagacttcatcctgccctgtcctgcctttcctgtgaaaaccctgtggcctctgcctcccctggctctgacttctgcctcctgcccagctctgcagctccccttgggccctgcctggagtgatgtgccgccttctcttgacactgtgagtgataaactttccatgtcaggaacctgtgtgtgtcactcactcaccttgacgagtccgcgtctaggccccaccagtggtgtggttttcctcatagtctctctacctaagcacatgtctgtgacaaggtcttacccagcccanggattcttgaactatctgtaggaactgccatgttgactcctggcagttttattctttctctctactcgntcaaccttcttanggagtgacgtttttt

SEQ ID NO: 3183 - DNA, 825 bp, Homo sapiens
  misc_feature (795)..(795): "n" may be a, t, c, g, other or unknown
  misc_feature (798)..(798): "n" may be a, t, c, g, other or unknown
  misc_feature (818)..(818): "n" may be a, t, c, g, other or unknown
agacagatggagaagttagaagttttagaggaatggcagtctcacattgaaggctgggaggggtccaacatcactgacacctgcactgaaatgctaatgtgtggagtcttactgaaaatttcttctggaaatattcaagaacgggtgttttttcttttcgataatcttttggtgtactgcaaaagaaaacacagacggttgaagaacagcaaggcatctacagatggacatcggtacctttttcgtggccggatcaacacggaggtgatggaagtggagaatgtggatgatggcaccgctgatttccatagcagtggacacattgttgttaatggatggaagatacataacacagcaaaaaataaatggtttgtttgtatggcaaaaacacctgaagagaagcatgaatggtttgaagctattttgaaagaaagagaacggcggaaaggtttaaaattaggaatggagcaagatacctgggtcatgatctctgaacagggtgagaaactttataaaatgatgtgcagacaaggaaatctgatcaaagaccgaaagagaaaactgactacgttccctaaatgctttcttggaagcgaatttgtgtcatggctgttggaaattggagagattcacaggcctgaggaaggcgtgcacttgggacaagcattattagaaaatggaatcattcaccatgttactgataaacatcaattcaaaccagaacagatgttatatagatttcctatgatgatggaacattttatccaagaaatgagatgccaggacgtgatttcnaanggtgtaagattatattgccncttcata

SEQ ID NO: 3184 - DNA, 831 bp, Homo sapiens
  misc_feature (728)..(728): "n" may be a, t, c, g, other or unknown
  misc_feature (779)..(779): "n" may be a, t, c, g, other or unknown
  misc_feature (812)..(812): "n" may be a, t, c, g, other or unknown
acgttgcccgggatgcggacaggttccgccgcctccagcgccccatcctgagccgattatctgcaattatgaaatgaagtaactcaagatgagcaagttaaaagtgataccagaaaaaagccttaccaataattctaggatcgtaggactcctggctcaactggagaagatcaatgctgagccttcagaatcagacactgcccgatatgttacatcaaaaattcttcatctggctcagagtcaagaaaaaacaaggagagaaatgacagccaaaggttctacaggaatggaaattctgctgtcaacattagagaacacaaaagatcttcaaactacacttaatatcttaagcattcttgttgagctggtgtcagctggtggaggtcgaagagtgagtttcttagtcaccaaaggtggttcacaaatattgttgcagttacttatgaatgccagcaaagaatctcccccacatgaggacttaatggtacagattcattctattcttgcaaagattggaccaaaagataaaaaatttggagtaaaggctagaattaatggggctctgaatataaccctgaatttggtcaagcagaatttgcagaatcatcgcttggttctaccttgccttcagcttttacgagtatattctgccaactctgtgaattcagtatccttagggaaaaatggagttgtggaactgatgtttaaaatcattggaccatttagtnagaagaattccagtcttataaaggttgctttagacactcttgctgcattgnttaaatcaaaaacaaatgccaggagagctgtanacagaggatttgtccagtg

SEQ ID NO: 3185 - DNA, 824 bp, Homo sapiens
  misc_feature (707)..(707): "n" may be a, t, c, g, other or unknown
  misc_feature (795)..(795): "n" may be a, t, c, g, other or unknown
  misc_feature (800)..(800): "n" may be a, t, c, g, other or unknown
acattaaagctatttaattaattattattattattattttgagacagggtcttgctctgttgcccagactggactgcagtggcgtgatcatggctcactgcagcctcgacctccagggctcaagcgatcctcccacctcagcttcccaagtagcggggactgcaggcacatgccaccacacccagctatttttttttattgtttgttgagacagggtctcactatgttgcccaggctggtcttgaacttctgggctcaagcggtccacttgcctcggcctcccagagtgctaggattacaggcaggaggcactgcacctggccagaaaaaactattcttgacttcacattttccgccagcttcacccctgcccctttgcttctctttgcagcaaaacttcaaaaagcatagtccacgctctcccccaggcattcttgggtctctctacccaggattttgctcccccatcgccacatctccttttgccaagggcaccagaggcctccgtgttgttggatccagcggtcggctctcagcctcctcttaactgctcagtggcactggtgccgccaagcaacccttcctccaagagagccacaggctctgggatacttcactctggggttcctcctacctcacagactctcctggctggtcctcctcttctccccaacatcttatggccaggtcttcaggctcttttctgnctacaggcactcttcatgagtccttattcaagctcctggcctcaaatgccagctgtgctgagacccccttatttgtagcttcagctancctgntcttccctgaacccaaacttatgt

SEQ ID NO: 3186 - DNA, 777 bp, Homo sapiens
  misc_feature (744)..(744): "n" may be a, t, c, g, other or unknown
  misc_feature (754)..(754): "n" may be a, t, c, g, other or unknown
  misc_feature (757)..(757): "n" may be a, t, c, g, other or unknown
aggctcaggctccgacggtggccggcgggggtcacgaggcttcgtagtggaggaacgggtttggcgtgtgggacgcagctgcctctgtactggggagtcacggagtggccgggctccagggacatggcggcggcctctgcggtgtcggtgctgctggtggcggcggagaggaaccggtggcatcgtctcccgagcctgctcctgccgccgaggacatgggtgtggaggcaaagaaccatgaagtacacaacagccacaggaagaaacattaccaaggtcctcattgcaaacagaggagaaattgcctgcagggtgatgcgcacagccaaaaaactgggtgtacagactgtggcggtttatagtgaggctgacagaaattccatgcatgtagatatggcagatgaagcatattccatcggccccgctccctcccagcagagctacctatctatggagaaaatcattcaagtggccaagacctctgctgcacaggctatccatccaggatgcggttttctttcagaaaacatggaatttgctgaactttgtaagcaagaaggaattatttttataggccctcctccatctgcaattagagacatgggtataaagagcacatccaaatccataatggctgctgctggagtacctgttgtggagggttatcatggtgaggaccaatcagaccagtgcctgaaggaacacgccaggagaattggctatcctgtcatgattaaagccgtnccgggtggangangaaaaggaatgaggattggt

SEQ ID NO: 3187 - DNA, 854 bp, Homo sapiens
  misc_feature (835)..(835): "n" may be a, t, c, g, other or unknown
  misc_feature (838)..(838): "n" may be a, t, c, g, other or unknown
  misc_feature (848)..(848): "n" may be a, t, c, g, other or unknown
tgttgcttgagaaatggcgatgatcgaattggggtttggaagacagaattttcatccattaaagaggaagagttcatcgctgttgaaactcatagctgttgtctttactgtgcttctattttgtgaatttttaatctattacttagcgatctttcagtgtaattggcctgaagtgaaaaccacagcctctgatggtgaacagaccacacgtgagcctgtgctcaaagccatgtttttggctgacacccatttgcttggggaattcctaggccactggctggacaaattacgaagggaatggcagatggagagagcgttccagacagctctgtggttgctgcagccggaagtcgtcttcatcctgggggatatctttgatgaagggaagtggagcacccctgaggcctgggcggatgatgtggagcggtttcagaaaatgttcagacacccaagtcatgtacagctgaaggtagttgctggaaaccatgacattggcttccattatgagatgaacacatacaaagtagaacgctttgagaaagtgttcagctctgaaagactgttttcttggaaaggcattaactttgtgatggtcaacagcgtggcgctgaacgggatggctgtggcatctgctctgaaacagaagcagagctcattgaagtttctcacagactgaactgctcccgagaggtaggagagcatctgaatgccacaggtgccttctgtcccgtgttgctccgcttccggttgcttacttcagccccctagccgcttcttgcccttttgatgaagggtcaaggtgtgccggattaatggcctggactttgtaccccancangcaccgtggnttccag

SEQ ID NO: 3188 - DNA, 829 bp, Homo sapiens
  misc_feature (757)..(757): "n" may be a, t, c, g, other or unknown
  misc_feature (828)..(828): "n" may be a, t, c, g, other or unknown
gaaaaacatactattcctttggtagtccagaaagaaacatcatcttcagataataagaaacagatacctaatgaagcttctgctagaagtgaaagagacacatcagacctagagcaaaactggtcattgcaagatcattatagaatgtattcacccataatataccaagccctctgtgagcacgtgcagactcagatgtcactgatgaatgacttgacttcaaagaacatccctaatggaattcctgctgtaccatgccatgctccctctcattctgaatctcaggcaactcctcattctagttatggcttatgtacctccaccccagtctggtcacttcagcggccaccctgccctccaaaggttcattctgaagttcaaactgatggcaacagtcagtttgcatcacaagaggattcagaaattcagaggttgattacagaaatggaggcatgtatatctgtacttccaacagtaagtggaaacacagatattcaagttgagatagcactggccatgcaaccattaagaagtgagaatgctcagttacgaaggcagttgagaattttgaaccagcaactcagagaacaacagaaaactcaaaaaccatctggtgctgtggattgcaaccttgaattgttttctcttcagtcattgaatatgtcactgcaaaatcaattggaggagtcactaaagagccaggaattactgcagagtaaaaatgaagagctgttaaaagtgattgaaaatcaagaangatgaaaaccaaaaatttagtagtatatttaaaggccaaggatcaaactatacttggaaaattaaccgcant

SEQ ID NO: 3189 - DNA, 837 bp, Homo sapiens
  misc_feature (748)..(748): "n" may be a, t, c, g, other or unknown
  misc_feature (802)..(802): "n" may be a, t, c, g, other or unknown
  misc_feature (820)..(820): "n" may be a, t, c, g, other or unknown
gaactcgtcatgctctttgtagcgtggtgcttctgttgctcacaggatgtttgccacacgagtcactcgagagaatctctgagtcctggcgagggctttctgaggcttcgtgtattagcagctgttgtcttccaactcagcggcaggacaacttgcctttgatgattttcaagagagttgtgctatgatgtggcaaaagtatgcaggaagcaggcggtcaatgcctctgggagcaaggatccttttccacggtgtgttctatgccgggggctttgccattgtgtattacctcattcaaaagtttcattccagggctttatattacaagttggcagtggagcagctgcagagccatcccgaggcacaggaagctctgggccctcctctcaacatccattatctcaagctcatcgacagggaaaacttcgtggacattgttgatgccaagttgaagattcctgtctctggatccaaatcagagggccttctctacgtccactcatccagaggtggcccctttcagaggtggcaccttgacgaggtctttttagagctcaaggatggtcagcagattcctgtgttcaagctcagtggggaaaacggtgatgaagtgaaaaaggagtagagacgacccagaagacccagcttgcttctagtccatccttccctcatctctaccatatggccactggggtggtggcccatctcagtgacagacacttctgcaacccaatttttcagcccccantgggatgatgtggtctggaactgaaagtgatgcctatttctgagttatgcctgnatttaagaactgatgaancccaagaagtccatgat

SEQ ID NO: 3190 - DNA, 853 bp, Homo sapiens
  misc_feature (707)..(707): "n" may be a, t, c, g, other or unknown
  misc_feature (733)..(733): "n" may be a, t, c, g, other or unknown
  misc_feature (757)..(757): "n" may be a, t, c, g, other or unknown
  misc_feature (848)..(848): "n" may be a, t, c, g, other or unknown
  misc_feature (852)..(852): "n" may be a, t, c, g, other or unknown
cgatgaagatgaagaggataatctttttgggggtacagctgctaagaagcagacattgtctctacaagctcagagagaagagaaagcaaaagcctccgagctctccaaaaagaaagcatctgccctgttgttcagcagtgatgaggaggaccagtggaatattcctgcttcacagacccacttagcatctgacagcaggtctaaaggagaacccagggattctgggaccctccagagccaggaggccaaggctgtgaaaaagaccagtctctttgaggaagacaaagaagatgatctttttgccattgccaaggacagccaaaagaagacccagagagtgtcactcctctttgaagacgatgttgatagcggaggctctctgtttggctctcctcccacatctgttcctcctgcaacaaagaaaaaagagactgtctctgaggcaccacctttgctgttcagcgatgaagaagagaaggaggcacaacttggagtgaagtctgtggataagaaggttgagagtgccaaggagtcattaaaatttgggagaactgatgtggctgagtcagaaaaggaaggacttttgactagatctgctcaggagacagtcaagcattctgatttattttcttcatcatccccatgggacaaaggaaccaagcctagaaccaaaactgttcttagcttggttgatgaggaagaggatnaaatggaagatcaaaacattatccangcttcacagaaagaagtaggaaanggctgcgatccttgatgcccaccccaagagcccaggtgtctttcaggatgaaaagctgcttttcagccccaagcttcaaaagggcaatgancccnt

SEQ ID NO: 3191 - DNA, 828 bp, Homo sapiens
  misc_feature (743)..(743): "n" may be a, t, c, g, other or unknown
  misc_feature (774)..(774): "n" may be a, t, c, g, other or unknown
  misc_feature (806)..(806): "n" may be a, t, c, g, other or unknown
agactccgtgggcgtaggaccctccgagccaggtgtgggatatagtctcgtggtgcgccgttttttaagccggtctgaaaagcgcaatattcgggtgggagtgacccgattttccaggctgctatccatgtccagggccaaacatgaatcctattgctcttgggagccgctggcttgcttatgcagaaaacaagttgattcgatgtcatcagtcccgtggtggagcctgtggagacaacattcagtcttatactgccacagtcattagtgctgctaaaacattgaaaagtggcctgacaatggtagggaaagtggtgactcagctgacaggcacactgccttcaggtgtgacagaagatgatgttgccatccacagtaattcacggcggagtcctttggtcccaggcatcatcacagttattgacaccgaaaccgttggagagggccaggtgcttgtgagtgaggattctgacagtgatggcattgtggcccacttccccgcccatgagaagccagtgtgctgcatggcttttaatacaagtggaatgcttctagtcacaacagacacccttggccatgactttcatgtcttccaaattctgactcatccttggtcctcatcacaatgtgctgtccaccatctgtatactcttcacaggggagaaactgaagccaaagtacaggacatctgcttcagccatgactgtcgcttgggttgtggtcagtactcttcggggtacttnccacgttttccccatcaacccttatggtggncaaccttgtgttcgtacacatatgtcaccacnagtagtgaatccatgagccgtt

SEQ ID NO: 3192 - DNA, 763 bp, Homo sapiens
  misc_feature (732)..(732): "n" may be a, t, c, g, other or unknown
  misc_feature (750)..(750): "n" may be a, t, c, g, other or unknown
  misc_feature (760)..(760): "n" may be a, t, c, g, other or unknown
aaaaaaaaaaaaaaaattggtgttttgttagataatctgggttcatctttcaaaattcagaaaatacagacctgtaaagaggaaaaggaagactcctataattccatcattcaaaagcaatcactgttaactgaatttattgttttagacttttttcttgcatttatgtaaacctgacttttcagaattaggatttatactgtatacgatgttttgtgactgatatcagcatttagagccatacagagaatgtttttcattatgcttaagaactacataatgttccattgtgtgggtgtacaaagttgatccagttctctacatttgggcatttaggttattttcaatagtttgcattcaatagaacatattcttacaaataaaatctgtccatgtatccaaggatagttccatttgttttaagttttgattttatcactattacatcactataccaaatatcccccaaaagattataccagtaaatgtcttttaaaatataataataaataccagccgggtgcagttgctcacgcctgtgatcccagcactttgggaggccgaggcgggcagatcacttggggtcaggagtttgagaccagccttggtaacatggcaaaacccttctctactgagaatacaaaaattagccggtcatgatggcggccacctgtggtcccagctgctcaggaggctgaggcaggaggatggcttgagccccggagggtggangttgcagtgagctgaggntgcccactgnact

SEQ ID NO: 3193 - DNA, 841 bp, Homo sapiens
  misc_feature (709)..(709): "n" may be a, t, c, g, other or unknown
  misc_feature (787)..(787): "n" may be a, t, c, g, other or unknown
agtaattttcagctcacaaatgatgaagaaatccataacgtcggaacttccttgacctttggatttggcacattgacctgctggatccaggctgcgctgacactcaaggtcaacatcaagaatgaaggacggagagttggaattccacgggttattctgtcggcatctatcactctctgtgtggtcctctacttcatcctcatggcccaaagcatccacatgtatgcagccagggtccagtggggcctggtcatgtgcttcctgtcttattttggcacctttgctgtggagttccggcattaccgctatgagattgtttgctctgagtaccaggagaatttcctaagcttctcagaaagcctgtcagaagcttctgaatatcagactgaccaggtgtaaaccatcagtttttccttgctggtgaggtgggtgtgacagtgggggaggggccagtaggacacactcacaggacttgacatagaacctcatttcacacacacacacacacacacattcatggccacatttgccaaatgagcttttcagggcgagttatttctttaatgaaaaagcacaagcccttatgtgtcgaaatacacgctgttacactgaaaatatatgcacgacagagcaagaagcttgtgcatgatcacttcttatccgtcccctttccagcacttccttctcttccattctcttcacatgtctnaagcaccctaccgagtagggcaggccaaatgttccttgggagtaatgccaacttccgacgttgccttcaggtcccaanggcttggaaccagctcgtgaggaagttctgaatctgcactaatattcttgagtg

SEQ ID NO: 3194 - DNA, 848 bp, Homo sapiens
  misc_feature (766)..(766): "n" may be a, t, c, g, other or unknown
  misc_feature (792)..(792): "n" may be a, t, c, g, other or unknown
  misc_feature (843)..(843): "n" may be a, t, c, g, other or unknown
tggggcagaaaagtaatacagacggagcactgcagaaaccttcaaatgaaggtgtcattgaaataaaagcaactaaggtctgtgaccagaggaccaaatgtaaaagtcgctgtaatgaaatgctgccaggcacgtcaacaggcaataatcaaagcactatcactctatcagttgcttctcagaacttaactttcaccagcagcagctcaccacctaatggtgactcaatcaataaagaccctaaattatgcactaaaagcccaagaaaacgactgtcttctacattgcaagagacccaggtgcctcctgtaaagaaaccaattgtggaacagctttcagcagctaccatagaagggcagaaacaaggcagtgttaagaaggaccaaaaggttccacattcagggaaaacagaaggttcaacagcaggtgctcagattcctagcaaggtatcagtaaatgtcagttcacacataggagcaaatcaacccttgaattcctctgcccttgttatcagtgattcagctttggaacagcaaacaaccccatcatcatctccagatataaaagtaaaacttgaaggaagtgtctttctcttggacagtgattcaaagtcagttggcagctttaatccaaatggatggcaacaaatcactaaagattctgagtttatatctgccagttgtgaacaacagcaagatatcagtgttatgacaattcctgagcactctgatatcaatgacttagagaaatctgtttgggaattagnaaggaatgccacaggacacatatagncagcagctacatagccagatccaggaatcttctttaaatcaaatccaagcncattt

SEQ ID NO: 3195 - DNA, 653 bp, Homo sapiens
  misc_feature (560)..(560): "n" may be a, t, c, g, other or unknown
  misc_feature (583)..(583): "n" may be a, t, c, g, other or unknown
  misc_feature (651)..(651): "n" may be a, t, c, g, other or unknown
aggccatgtaaaaattttccgtggagaagtttgattctaaagtagcttctctaaagtaggctttggtaggtaatcaacttgacagcagtctagatgtctcacaggacaggagggagtgagggaaaggggccatgattggctgctttgtggttttattttggttctttccattctccgccattcattggaggcttcgttccagacctgcctgggaaaacagcttctgagccattttggggagcagttcttcatctgaatggatggacatctgggcttccttcaagggccattgaatgggaactagaaaaccactggaaactagaaatttgagctattgggcccaccagtagcagcatgtgatactagatggttaaaatcatgaaagcagtcactatccaattagaagcagagtcacaacaactgttgggaaatgtgactcttggaggaaggtggggagggagtggccttgccagccctgtgggacgtcccctgaagtttgtaataagaccccttttccaaagggatgtgaattggagtgaaaaggaaatctttcatcttanaaaacttctggtccttaacgcanggtggtatttgggtatgtgcttggaaattgagatctcaagagtgtttgccttggagccagctccccanga

SEQ ID NO: 3196 - DNA, 836 bp, Homo sapiens
  misc_feature (761)..(761): "n" may be a, t, c, g, other or unknown
  misc_feature (805)..(805): "n" may be a, t, c, g, other or unknown
ttgtcttctgcagctgactcaggtcattgatgtttgctccaattttctcataaaacagctccatccttcaaactgcttagggattcgatcatttggagatgcccaaggctgtacagaacttctgaacgtggcacacaaatacactatggaacacttcattgaggtaataaaaaaccaagaattcctcctgcttccagctaatgaaatttcaaaacttctgtgcagtgatgacattaatgtgcctgatgaagagaccatttttcatgctctaatgcagtgggtggggcatgatgtgcagaataggcaaggagaactggggatgctgctttcttacatcagactgccattactcccaccacagttactggcagatcttgaaaccagctccatgtttactggtgatcttgagtgtcagaagctcctgatggaagctatgaagtatcatcttttgcctgagagaagatccatgatgcaaagccctcggacaaagcctagaaaatcaactgtgggggcactttatgctgtaggaggcatggatgctatgaaaggtactactactattgaaaaatatgacctcaggactaacagttggctacatattggcaccatgaatggccgtaggcttcaatttggagtcgcagttattgataataagctctatgtcgtgggaggaagagacggtttaaaaactttgaatacagtggaatggtttaatccagttggcaaaatctggactgtgatgccttccatgtcaacacatnggcacggcttagtgtaccactcttgaaggaccaatgtatgctgnagtggcatgatggatggagctttctaaatct

SEQ ID NO: 3197 - DNA, 789 bp, Homo sapiens
  misc_feature (725)..(725): "n" may be a, t, c, g, other or unknown
  misc_feature (741)..(741): "n" may be a, t, c, g, other or unknown
  misc_feature (769)..(769): "n" may be a, t, c, g, other or unknown
tttcctaaaattctagaatcccttaaaaaaaaaaaaactcatgtaatagtactcataaagtctactcatgattctccaacctccaggctggactggacttagcccagcctaaaagatgaaagtgtgtgtgtgtgttacatatagataacatatgtgttatatataggtattacacataacatctatataaaagtatactttttttggtccacattaaaaggattcaacaatctttttttactaaccccagacatcatacttccaaaagcacatctttaagatcctgctactgaaatttgaatttgttgtctaagctcattagagatgaaaaacaactgctcgtcatttacaattcatcagctggttcggagtaagaaaatctctctctctttctctctgtctctctgtctgtctgtccgtctctctctctctctctcacacacacacacacagagagagagagagagagagagagagtgcgagagagaccattataccccagccttatttctaacttaaattctaacattagatttgatgcagatattttagctgctaacaggaagtgttatctccttttctatgagatgcctgggcttccctaaagtggtgctcatctttttttttttttttttttggctataaatatatgaaagagtctgtcaagagtgcctgcagggaatgaaagtgaaagtgcagtaaagagcaagtttatgagttggcancttgagtgactggctnctaaacaggggcccatctggtctggggntgccttgggaatctctctcg

SEQ ID NO: 3198 - DNA, 803 bp, Homo sapiens
  misc_feature (641)..(641): "n" may be a, t, c, g, other or unknown
  misc_feature (734)..(734): "n" may be a, t, c, g, other or unknown
  misc_feature (736)..(736): "n" may be a, t, c, g, other or unknown
  misc_feature (786)..(786): "n" may be a, t, c, g, other or unknown
tctttatgctttcggatttctaaatgagagagtcatccagaaactcgaggggtggagagcatttgtcagtgactgtcctttggtccccaaggggctcctcagtgggtttctcctgagggtctgtgactactctcctgtcacagaagctgctcctctctggcactgtcttgtccttctccactgacctctgggattgactatccttctcagcaggggtgactgtgacactcctggctgttccttctcagtcttggctggtccttcactcctagctggtccttctccacaactgggacactctgctatgcttggttttgaactagtgacagcctctcccttccttttcggcattgatttccctggatgccctggttagcctccaggtagatcattgtggagccctgatgtcgaagtctatccgtcttccttttctggaccttgttgggttcctcagtcgtatcattctgactctcagcttcagttgcaaattaagagttcatggaattacgagaactatctttggaatcagccttaaagctgcaggcttccttttctagagaagctatttcttctagaaagggattggtaggatgtggaggggttccccctgacgaaaggaatccctgagtgctctgaatcangcagcctttggtggcggccccgcccacacctgtgcccgaggaatgccggggaggaatgtaagagttaaagaaaggaaagaaacaggaaaagcngntcacagtcaaagacaggtttgttttggacaataaacctgaaaaggccttntgggccgaattaggtca

SEQ ID NO: 3199 - DNA, 770 bp, Homo sapiens
  misc_feature (191)..(191): "n" may be a, t, c, g, other or unknown
  misc_feature (448)..(448): "n" may be a, t, c, g, other or unknown
  misc_feature (681)..(681): "n" may be a, t, c, g, other or unknown
  misc_feature (689)..(689): "n" may be a, t, c, g, other or unknown
  misc_feature (700)..(700): "n" may be a, t, c, g, other or unknown
aagcagaatggcagacagaacctcaggagccccccatccctgagtccctggccgctgcagccgctgccgcccaacagctccaagtggctaggaagcaggatactcggcagacggccaccttcaggcagcagcccccacctatgaaggcctgcttgtcatgtcaccagcaaattcaccggaatgcacctatntgccctctttgcaaggccaagagtcggtcccggaaccccaaaaagccgaaacggaagcaggatgaataaagaaagggagagcacatgaagctttgctaattataacccctcaccttgaccagagtcattgatgtcctgatgtgaaacaacccttgcccaaccccacgaagtctcctatttaatgtgatggaagcacaacccctctctcactttgctcctatttctttctgctcttgggatttctggtttaggaaganatgtggttcaggtgctaaacagtgtgtctgatgatcccttctctcccactcacatttcaacccctgcccttgtttggagctaagggaagggcaaaaggctcagatatgattctctatctcttgtgcctgaggcctggagcctaaggagctgtaaggtctgaggggcaggggaggcccatatcttgtttcaggtaaaggacccactatttcccctccttgtacttttgccttangttctcangggacaatagncttcatgttggattcttcaacaggctgggtgcatgtatcccctactcctaccctcatctcatccttaagg

SEQ ID NO: 3200 - DNA, 757 bp, Homo sapiens
  misc_feature (706)..(706): "n" may be a, t, c, g, other or unknown
  misc_feature (727)..(727): "n" may be a, t, c, g, other or unknown
  misc_feature (740)..(740): "n" may be a, t, c, g, other or unknown
gtgcatacggctgccggcatggcacattacaacttcaagaaaattacggtggtgccgtccgccaaggacttcatagacctcacgttgtcgaagactcaacgaaagactccaaccgttattcataaacattaccaaatacatcgcattagacatttttacatgagaaaagtcaaatttactcaacagaattaccatgatagactttcacaaattctaacagatttccccaaattggatgatattcatccgttctatgctgatttgatgaatattctctacgacaaggatcattacaagttggctctggggcaaataaatattgccaaaaatttagtggacaatgttgctaaagattatgtgcgactgatgaagtatggcgactctctctaccgctgcaaacagctgaagcgtgcggccctgggacggatgtgcacagtgatcaagaggcagaagcagagtttggagtatttggagcaagtgcgtcagcatttatcccgtttgccaaccattgatccgaataccaggaccctgcttttgtgtgggtacccaaatgttgggaagtccagcttcatcaacaaggtgacgagagcagacgtggatgtccagccctatgcgttcacaaccaagtctctgtttgttgggcacatggattataagtatctacgttggcaggttgtagacacttctgggatcctggaccaccctntggaggataggaacaccattnagatcaggccatnactgcctggccacttcg

SEQ ID NO: 3201 - DNA, 768 bp, Homo sapiens
  misc_feature (56)..(56): "n" may be a, t, c, g, other or unknown
  misc_feature (635)..(635): "n" may be a, t, c, g, other or unknown
  misc_feature (722)..(722): "n" may be a, t, c, g, other or unknown
  misc_feature (731)..(731): "n" may be a, t, c, g, other or unknown
  misc_feature (763)..(763): "n" may be a, t, c, g, other or unknown
atccaagatggcgtccccaggagctgggagcgggtgaccggcggcggggaagcggnctgggttggccctcagattgcggggtctgggggcatctcgccgggcaaacccttggcccgcctacaaggacttcccccggccagagcaatggccgctgagaacagcaagcagttttggaagaggagcgctaagctgccggggagcattcagcctgtatatggagcacagcatcctcctcttgacccacggctcaccaaaaatttcattaaagaacgatcaaaagtcaacacagttcctctgaagaataagaaggcctccagttttcatgagtttgcacggaataccagtgatgcttgggacattggcgatgatgaggaagaggacttttcctcaccttctttccaaactctgaactcaaaagttgctttggcaactgcagcccaagttctagaaaaccacagcaagctgagagtaaaaccagaacggtcccagtcaacgacatcggacgtccctgccaactacaaggtcataaagtccagcagtgatgcccagctgtccagaaactctagtgatacatgcctgaggaacccactccacaaacagcaatcactccctctccggcccatcatccccctcgntgcccggatctcggatcagaacgcttctggggcccccccaatgactgtccgggagaaaacccgctagaaaaattccgtcagcttctnttcagccanaacactgacttagatgaactgaggaagtgtancttgg

SEQ ID NO: 3202 - DNA, 815 bp, Homo sapiens
  misc_feature (50)..(50): "n" may be a, t, c, g, other or unknown
  misc_feature (661)..(661): "n" may be a, t, c, g, other or unknown
  misc_feature (702)..(702): "n" may be a, t, c, g, other or unknown
  misc_feature (754)..(754): "n" may be a, t, c, g, other or unknown
  misc_feature (792)..(792): "n" may be a, t, c, g, other or unknown
  misc_feature (814)..(814): "n" may be a, t, c, g, other or unknown
aagcgtcgcacagcgactgcatcaccatggagccgagggcagtaggtgtntccaaacaggacatacgtgaacaaatttggggctacatggaatcacaaaatttagctgactttccccgacctgttcatcacaggatacccaactttaaggggtcttatctggcttgccaaaacatcaaagacctagacgtttttgccagagcacaggaagttaaagtggaccctgataaaccactggaaggcgttcggctgctggtgctgcagagcaaaaaaacattgttggttccaacaccacgactgagaacgggattgtttaataagatcacaccaccccctggggcaactaaagacatcttgagaaaatgtgccacctctcagggtgtgaggaactacagtgtccccataggcttggactccagagtcctcgtggatttagttgtggtgggatccgtcgccgcttctgaaaaaggctggagaatcgggaagggagaaggctacgccgatctggaatatgccatgatggtatccatgggcgccgtcagcaaggagacgccggtggtcaccatcgtccacgactgccaggtcgtggacatccctgaagagcttgttgaggagcacgacatcactgtggactacatcctcacttcaaccagagtcatcgncacaggctgcaagcgcccaaagccaatgggaatcacctggntcaagatcagcctggagatgatggagaaaatccccatctgaggagccttcgngcccgaaagcacaggctgggaaggatgtcacccttcanggtgagcaccaacaacctttcng

SEQ ID NO: 3203 - DNA, 512 bp, Homo sapiens
  misc_feature (297)..(297): "n" may be a, t, c, g, other or unknown
  misc_feature (335)..(335): "n" may be a, t, c, g, other or unknown
  misc_feature (419)..(419): "n" may be a, t, c, g, other or unknown
  misc_feature (427)..(427): "n" may be a, t, c, g, other or unknown
  misc_feature (481)..(481): "n" may be a, t, c, g, other or unknown
atgcgcggcgcggctggagcggccggacagtccggcgtccgggaacgctcaggagccggaggagccggaaagcgccgggacccctcgcggggcctctgagcggcgcgggcggacccgagcccccagcccgctggcgccgctgcccgccaggccccgggggcggcggccaagatgtccgtgcctaacgtgctggccaaagcgctctatgacaatgtggccgagtccccggatgagctctccttccgcaagggtgacatcatgacggtgctggagcaggacacgcagggcctggacggntggtggctctgctcgctgcatgggcgccagggcatcgngcctgggaaccgcctcaagatctcggtgggcatgtatgataagaagccagcagggcctggctccggccctcccgccaccccggnccagcctnagcctggcctccatgccccagcgcctccggcctcccagtacacgcccatgctcnccaacacctaccagccccagccagacagcgt

SEQ ID NO: 3204 - DNA, 777 bp, Homo sapiens
  misc_feature (713)..(713): "n" may be a, t, c, g, other or unknown
  misc_feature (730)..(730): "n" may be a, t, c, g, other or unknown
  misc_feature (754)..(754): "n" may be a, t, c, g, other or unknown
attgcttctgggactaaaagataaagaggggtacacatctttctggaatgactgcatatcatcaggcctgcgagggggcatcctgatagagctggccatgcggggtcgaatctatctggaacccccgaccatgcgtaagaagcgactactagacagaaaggtactgctaaagtcagacagcccaacaggtgatgttttactggatgaaactctgaaacacatcaaagcaactgaacccacagaaactgtccaaacatggatagagctactcactggtgagacctggaaccccttcaaattacagtaccagctgagaaatgtacgagagcgcatcgcaaagaacctagtagagaaaggtattctaaccactgagaagcagaatttcctgctatttgacatgactactcatccagtgaccaatacaacagagaaacagcgactagtgaaaaaacttcaagatagtgtactagagcggtgggtaaatgaccctcagcgtatggacaagcgaacactagcactcctggtgctagcccactcctctgatgtgctagagaatgtcttctcctctctgacagatgacaagtatgatgtggcaatgaatcgagccaaggacttagtagaactggaccctgaagtggaagggacaaagcctagtgccacagaaatgatctgggctgtgctggcagccttcaataaatcttaaagcccggcangtggatttcttcttttnccctgctggctggtgactgtcaanagacccccatcactggagttttg

SEQ ID NO: 3205 - DNA, 807 bp, Homo sapiens
  misc_feature (34)..(34): "n" may be a, t, c, g, other or unknown
  misc_feature (702)..(702): "n" may be a, t, c, g, other or unknown
  misc_feature (744)..(744): "n" may be a, t, c, g, other or unknown
  misc_feature (794)..(794): "n" may be a, t, c, g, other or unknown
  misc_feature (802)..(802): "n" may be a, t, c, g, other or unknown
atctaaacaagaaagtagtgagagtttgccaaangaagcctttctggtcctctctgatgaagaggatatttcgggtgaaaaagatgagtctgaagttatatcgcaaaatgaaacgtgctctccagcagaagtagaaagtaatgaaaaggacaacagacctgaggaagaagagcaagtaatacatgaagatgatgaaagaccttctgagaaaaatgaattttctagacgaaaacgttctaaatcagaagacatggacaatgtacagtctaaacgtcgtcgatatatggaagaagaatatgaggcagaatttcaagtaaagattacagccaaaggagacattaaccagaaacttcaaaaggttatacagtggttgctggaagaaaaattgtgtgcgctgcagtgtgctgtatttgataagactttggcagaattgaaaacacgagtggaaaagattgaatgtaacaagaggcataaaacagttctcactgaactacaggccaagatagccaggttaaccaaacgctttgaagcagccaaagaagatcttaagaaaagacatgaacatccacccaacccaccagtatcaccaggaaaaactgtaaatgatgtcaacagcaataataacatgtcttacagaaatgcaggcacagtgagacagatgctggagtccaaaagaaatgtaagcgagagtgcaccaccatnctttcaaactcctgtgaatacagtatcttcaaccaatcttgncacttcttcagcagttggtcagtagtcaacctaaattgccagacttccantggcttcngggtt

SEQ ID NO: 3206 - DNA, 856 bp, Homo sapiens
  misc_feature (764)..(764): "n" may be a, t, c, g, other or unknown
  misc_feature (768)..(768): "n" may be a, t, c, g, other or unknown
  misc_feature (853)..(853): "n" may be a, t, c, g, other or unknown
gaccctgtttctctagccgtgcagctgcaaggtcactagacagaaaaactcaagtcataaacatgttttttcttgaaagggcagtagtcagaaaagaaaggaactgatcttggacttgaagaaacagccccagaggtgaaagagatagtcgttaacctgcacagcctctttccagcctcttcacagataacaagggctttcggaacaagaaacttgtatattctgtgcagctcaaataaaattaagaagctgaacatcagttgacaaagagtaaaaaataactgggagttgacgggaaaataaactgtcgtttatgaaaatgtagcttattccagaacaccagatttcaaaagatacagaatcctgttgctccacaattcaatttgtcctacaaaaagcaaatatagtaaatagaagttgccaacactgaagagaagattaacaaatctgagcatcccaatggagcagacaacatgttcagaccatccaaagatccaaatggcaggtttgatcactccaattgacaccaggtacaagccaggtaatgtagtaatcatgggatcccactttaaaatgaaagaaaatgaagtaaaagcaagaggtaataggaacaagacaggcacaaatatgtcaagcccaagtctcatcttcagcaacaatcagaaattttgagaagttattctatgacaagattaagtaagtccttggcagaacaggattcgtttttcctattttttgcccccggaccaagctttaatgatggntcangtagcagcaaccaattaaacaacaacaacttaaaatctatttctatttttccaagaaatgttctttaaaagcctttattttgatnaat

SEQ ID NO: 3207 - DNA, 857 bp, Homo sapiens
  misc_feature (778)..(778): "n" may be a, t, c, g, other or unknown
  misc_feature (816)..(816): "n" may be a, t, c, g, other or unknown
  misc_feature (835)..(835): "n" may be a, t, c, g, other or unknown
tccgggttcggcaataacctggagccggcggcgtaggttggctctttagggcttcaccccgaagctccaccttcgctcccgtctttctggaaacaccgctttgatctcggcggtgcgggacaggtacctcccggctgctgcgggtgccctggatccagtcggctgcaccaggcgagcgagacccttccctggtggaggctcagagttccggcagggtgcatccggcctgtgtgtggcgcgaggcagggaagccggtacccgggtcctggccccagcgctgacgttttctctcccctttcttctctcttcgcggttgcggcgtcgcagacgctagtgtgagcccccatggcagatacgaccccgaacggcccccaaggggcgggcgctgtgcaattcatgatgaccaataaactggacacggcaatgtggctttctcgcttgttcacagtttactgctctgctctgtttgttctgcctcttcttgggttgcatgaagcagcaagcttttaccaacgtgctttgctggcaaatgctcttaccagtgctctgaggctgcatcaaagattaccacacttccagttaagcagagcattcctggcccaggctttgttagaggacagctgccactacctgttgtattcactcatctttgtaaattcctatccagttacaatgagtatcttccaagtcttggtattctctttgcttcatgctgccacatatacgaaaaaggtccttgacgcaaggggctcaaatagtttacctctgctgaatctgncttggacaaattaagtgctaatcaacaaaatattctgnaattcattgcttgcaatgnaatattcctgatgcctgcaaag

SEQ ID NO: 3208 - DNA, 860 bp, Homo sapiens
  misc_feature (746)..(746): "n" may be a, t, c, g, other or unknown
  misc_feature (820)..(820): "n" may be a, t, c, g, other or unknown
  misc_feature (826)..(826): "n" may be a, t, c, g, other or unknown
ctcccagggcatagaattactgagttagaagaaataactggtttatttttacataggatgtgatgtctaatattgtactaaaaatgaggatgcttatgctatactccactggtactatccactggatttatttattttttttattttttgagacggagtctcgctctgtcgcccaggctggagcacagtggtgcaaacttggctcactgcaagctctgcctcctgggttcacaccattctcctgcctcggcctccagagtagctgggactacaggtgcccgccatcacacctggctaattttttttgtattttttagtagagacgggggtttcaccgtgttggccaggatgccctcgatcttctgacctcatgatccacccgcctcggcctcccaaaatgctgggattgtaggcgtgagctaccgcacctggctgtttttgtatttagatagagtttaagtgcaaagtaatctgctgatttaaggttgttttaaattcatatctgaggaataaaggatggacaggcaatttccatccctttgatgttccataattctagctatttatatcattcatttgccccttcagcatggattggcttacacctgtaatacgttccagaatagctggatttcttttgttttcccatcggtgattttcatagagtagatgctcaatgacatataatgcagaaaggccaaaaatagaggtaagtaaagctatgaaagaaaagaagaacgaaagangaacagagtagtttgattttggttattgctgcttaaaccagagagattgtattcttggaaggggatttgcttgntttacncatttgcagcctgactggtttaggcttggttttt

SEQ ID NO: 3209 - DNA, 863 bp, Homo sapiens
  misc_feature (681)..(681): "n" may be a, t, c, g, other or unknown
  misc_feature (717)..(717): "n" may be a, t, c, g, other or unknown
  misc_feature (791)..(791): "n" may be a, t, c, g, other or unknown
  misc_feature (793)..(793): "n" may be a, t, c, g, other or unknown
  misc_feature (818)..(818): "n" may be a, t, c, g, other or unknown
agctgattttctgacagccccttctcctctcctcactggatatccagtttccagggtctgtgtgtggtgggaagcaaactggcctgaggttccatccactggtagaaatgaccccaaagacttcccatgcagggagggcaaagaagaaagtgctttggaatggagataccccttttcctcctcctgaatgtatcagagttagttatcaatgctgactgagtgtgcactctcctagacaccatggggagaggcagaagaggaaaccagatatggtccttcttcttgggactctcctgacctaggaaaagagacagatgaatgcagataactgagtctatatacagggactgccacaagctcacactttactgaatgttcagacctagtcatacatcctaagggcattgttggaagcttctggaactaagtctctggggatttgaatcaactcagaagactgactcattcacttggctgtggaggctgttccagatattaggagctatgtatgtggagccccggatttgggccaaaagatgcatttgactggagagaagggattgagatttgagcagttgttggacaacacagaaatgaaacagccatagcaaacttgcctgccgtgatttctctgctgagataatgggacttttcagactccctgtaactgagatctagatnaaaagagacgtctggaaaaaaactggtcccaattgncgcttggctttgctttcataactatctgaatgtggcatatgtcagactttgaaatgctgggtctcttggaaatncnaatccatctgggtcttggataattnccagaaacctaggctctcagtaggaaatgaggactggaaacatta

SEQ ID NO: 3210 - DNA, 782 bp, Homo sapiens
  misc_feature (692)..(692): "n" may be a, t, c, g, other or unknown
  misc_feature (762)..(762): "n" may be a, t, c, g, other or unknown
  misc_feature (771)..(771): "n" may be a, t, c, g, other or unknown
aaggaagtcccacctgcgcccgacggcggaagttccgggagtgccaagtacccgcgtgcatacggctgccggcatggcacattacaacttcaagaaaattacggtggtgccgtccgccaaggacttcatagacctcacgttgtcgaagactcaacgaaagactccaaccgttattcataaacattaccaaatacatcgcattagacatttttacatgagaaaagtcaaatttactcaacagaattaccatgatagactttcacaaattctaacagatttccccaaattggatgatattcatccgttctatgctgatttgatgaatattctctacgacaaggatcattacaagttggctctggggcaaataaatattgccaaaaatttagtggacaatgttgctaaagattatgtgcgactgatgaagtatggcgactctctctaccgctgcaaacagctgaagcgtgcggccctgggacggatgtgcacagtgatcaagaggcagaagcagagtttggagtatttggagcaagtgcgtcagcatttatcccgtttgccaaccattgatccgaataccaggaccctgcttttgtgtgggtacccaaatgttgggaagtccagcttcatcaacaaggtgacgagagcagacgtggatgtccagccctatgcgttcacaaccaagtctctgttgntgggcacatggattataagtatctacgttggcaggttgtagaccttcctgggatcctgggaccacccttntggaggatnggaaccccctt

SEQ ID NO: 3211 - DNA, 851 bp, Homo sapiens
  misc_feature (761)..(761): "n" may be a, t, c, g, other or unknown
  misc_feature (797)..(797): "n" may be a, t, c, g, other or unknown
  misc_feature (830)..(830): "n" may be a, t, c, g, other or unknown
acttccgggaacgccggggaaccgcagtagccgcctgctagtggcgctgctagccggccggcgcaggctgccgagcgggtgagcgcgcaggccaggccaaagccctggtacccgcgcggtgcgggcctcagtctgcggccatgggggcgtccgcgcggctgctgcgagcggtgatcatgggggccccgggctcgggcaagggcaccgtgtcgtcgcgcatcactacacacttcgagctgaagcacctctccagcggggacctgctccgggacaacatgctgcggggcacagaaattggcgtgttagccaaggctttcattgaccaagggaaactcatcccagatgatgtcatgactcggctggcccttcatgagctgaaaaatctcacccagtatagctggctgttggatggttttccaaggacacttccacaggcagaagccctagatagagcttatcagatcgacacagtgattaacctgaatgtgccctttgaggtcattaaacaacgccttactgctcgctggattcatcccgccagtggccgagtctataacattgaattcaaccctcccaaaactgtgggcattgatgacctgactggggagcctctcattcagcgtgaggatgataaaccagagacggttatcaagagactaaaggcttatgaagaccaaacaaagccagtcctggaatattaccagaaaaaaggggtgctggaaacattcttcggacagaaaccaacaagatttggcctatgnatatgcttttctacaactaaagtttcacaaaagaancccgaaagctttaagttacttccatgaaggagnaaatgtgtgtaacttttaatt

SEQ ID NO: 3212 - DNA, 847 bp, Homo sapiens
  misc_feature (736)..(736): "n" may be a, t, c, g, other or unknown
  misc_feature (784)..(784): "n" may be a, t, c, g, other or unknown
  misc_feature (823)..(823): "n" may be a, t, c, g, other or unknown
  misc_feature (844)..(844): "n" may be a, t, c, g, other or unknown
ggcgacactttgctacggagtgcatcggacgtcgaagcctagagtctctgcgtctttccctcttccgctgcctcattcctttccttcctagccttggtcgtcgccgccaccatgaacaagaagaagaaaccgttcctagggatgcccgcgcccctcggctacgtgccggggctgggccggggcgccactggcttcaccacgcggtcagacattgggcccgcccgtgatgcaaatgaccctgtggatgatcgccatgcacccccaggcaagagaaccgttggggaccagatgaagaaaaatcaggctgctgacgatgacgacgaggatctaaatgacaccaattacgatgagtttaatggctatgctgggagcctcttctcaagtggaccctacgagaaagatgatgaggaagcagatgctatctatgcagccctggataaaaggatggatgaaagaagaaaagaaagacgggagcaaagggagaaagaagaaatagagaaatatcgtatggaacgccccaaaatccaacagcagttctcagacctcaagaggaagttggcagaagtcacagaagaagagtggctgagcatccccgaggttggcgatgccagaaataaacgtcagcggaacccacgctatgagaagctgacccctgttctgacagtttctttgccaaacatttacagaccggagagaaccataccttaatggatccccgacaaactcaattttgganggcttaacacaccctattcaggtggactaaacacttcatacccaagtnggaatgacgccaggactgatgacacctggcacaaggganctggacattaagaaaaatggncca

SEQ ID NO: 3213 - DNA, 838 bp, Homo sapiens
  misc_feature (682)..(682): "n" may be a, t, c, g, other or unknown
  misc_feature (709)..(709): "n" may be a, t, c, g, other or unknown
  misc_feature (777)..(777): "n" may be a, t, c, g, other or unknown
  misc_feature (809)..(809): "n" may be a, t, c, g, other or unknown
  misc_feature (838)..(838): "n" may be a, t, c, g, other or unknown
ggtcaggatggacgaggacgtgctaaccaccctgaagatcctcatcatcggcgagagtggggtgggcaagtccagcctgctcttgaggttcacagatgatacgtttgatccagaacttgcagcaacaataggtgttgactttaaggtgaaaacaatttcagtggatggaaataaggctaaacttgcaatatgggatactgctggtcaagagaggtttagaacattaactcccagctattatagaggtgcacagggtgttatattagtttatgatgtcacaagaagagatacatttgttaaactggataattggttaaatgaattggaaacatactgtacaagaaatgacatagtaaacatgctagttggaaataaaatcgataaggaaaatcgtgaagtcgatagaaatgaaggcctgaaatttgcacgaaagcattccatgttatttatagaggcaagtgcaaaaacctgtgatggtgtacaatgtgcctttgaagaacttgttgaaaagatcattcagacccctggactgtgggaaagtgagaaccagaataaaggagtcaaactgtcacacagggaagaaggccaaggaggaggagcctgtggtggttattgctctgtgttataaactctgggaaattccatctcttgcatatttgatcagatagtgacatctttctgnatataaactctttaactgctattttanggaccttgcagtttgcacataattggtttatatcatagcagtaaatatttgcaagaaatccccttatngcccccggttaaatggtatggtaagcattgcncagtttgcagtctacagttttttattgtn

SEQ ID NO: 3214 - DNA, 852 bp, Homo sapiens
  misc_feature (557)..(557): "n" may be a, t, c, g, other or unknown
  misc_feature (668)..(668): "n" may be a, t, c, g, other or unknown
  misc_feature (775)..(775): "n" may be a, t, c, g, other or unknown
  misc_feature (801)..(801): "n" may be a, t, c, g, other or unknown
  misc_feature (821)..(821): "n" may be a, t, c, g, other or unknown
gcgtctgcgagaccgacttggacggagccgagctgaggctcggcttcctgctgatggtcagggttttggcaactccccggtgtgagaggggtagggagtgctcccggcggcgacggggccgagttcaccagccgccggggcagtagtcgaaggcccggcgcggcatgtcctgggtgccgcggtgcgggcagtgaacgcgcgccgggcgggatgggccggcgccgggcgccagagctgtaccgggctccgttcccgttgtacgcgcttcaggtcgaccccagcactgggctgctcatcgctgcgggcggaggaggcgccgccaagacaggcataaagaatggcgtgcactttctgcagctagagctgattaatgggcgcttgagtgcctccttgctgcactcccatgacacagagacacgggccaccatgaacttggcactggctggtgacatccttgctgcagggcaggatgcccactgtcagctcctgcgcttccaggcacatcaacagcagggcaacaaggcagagaaggccggttccaaggagcaggggcctcnacaaaggaagggagcagccccagcagagaagaaatgtggagcggaaacccagcacgaggggctagaactcagggtagagaatttgcaggcggtgcagacagactttagctncgatccactgcaagaaagttgtgtgcttcaaccacgataataccctgcttgccacttggaggaacagatggctacgtccgtgtcttggaaggtgcccagccttgganaaggttctggaattcaaaagcccacnaaaggggaagattggaaganccttggcttttaggggccttgatgggcaaag

SEQ ID NO: 3215 - DNA, 836 bp, Homo sapiens
  misc_feature (660)..(660): "n" may be a, t, c, g, other or unknown
  misc_feature (708)..(708): "n" may be a, t, c, g, other or unknown
  misc_feature (767)..(767): "n" may be a, t, c, g, other or unknown
  misc_feature (796)..(796): "n" may be a, t, c, g, other or unknown
  misc_feature (818)..(818): "n" may be a, t, c, g, other or unknown
ctaattttccttactctttttgtttgtttgtttcttagtgtggtttattgacaatcatttacaatgccgaagagtgctgtagtgagccagcacagtgggtaacacagcaacggagaacagatgcaggtttgaggaatttaacttgctaaaaccttgaactgaagtcttagagattggaacatacgggtttgtataaataggcttttaagccctgtttgcaatgggttactgataggagaaacttgcttgtggaatgtcagctgcgtgagctcactgtcagacaagatggaagaagaagggctggagtgtccaaactcttcctctgaaaaacgctattttcctgaatccctggattccagcggtggggatgaggaagaggttttggcctgtgaggatttggaacttaacccctttgatggattgccatattcatcacgttattataaacttctgaaagaaagagaagatcttcctatatggaaagaaaaatactcctttatggagaacctgcttcaaaatcaaatcgtgattgtttcaggagatgctaaatgtggtaagagcgctcaggttcctcagtggtgtgctgaatattgtctttccatccactaccagcacgggggcgtgatatgcacacaggtccacaagcagactgtggtccanctcgccctgcgggtggcggatgaaatggatgttaacattggtcatgangttggctacgtgatccctttcgagaactgctgtccaacgaaacaatcctgaggtattgnactgatgatatgctgcaaagagaaatggnggtccaatccttttttgggtanctatggggcatcatctta

SEQ ID NO: 3216 - DNA, 839 bp, Homo sapiens
  misc_feature (714)..(714): "n" may be a, t, c, g, other or unknown
  misc_feature (742)..(742): "n" may be a, t, c, g, other or unknown
aacgctggtcccggggactgagtaaggtgtctggatcggagggaggttcgggtgggcatcgggcggctggaagagctcgactcgtcccgctgggaaagcgcgagtctgagtggaaccctggacgacttgcagagcggctggcgcagtcatggcggactactggaagtcacagccaaagaaattctgtgattactgcaagtgctggatagcagacaataggcctagtgttgaatttcatgaaagaggaaagaatcataaggaagatgtggcaaaaaggatcagtgagattaaacagaaaagcctggataaggcaaaggaagaagaaaaggcatcaaaggagtttgctgcaatggaggcagctgccctgaaagcataccaagaggatttgaaaagacttggcttagagtcagaaattttggagccaagcataacaccagtaaccagcactatcccacctacctcgacatcaaatcaacagaaagaaaagaaagaaaagaagaaaagaaaaaaagatccttcaaagggcagatgggtagaaggcataacctctgagggttaccattactattatgatcttatctcaggagcatctcagtgggagaaacctgaaggatttcaaggagacttaaaaaagacagcagtgaagaccgtttgggtagaaggtttaagtgaagatggttttacctattactataatccagaaacaggagaatncagatgggagaaacctgatgattcattncacacactatgatctgccttctagtaaggtcaatgaaaattcacttggcaccctaatgaatccaatcatcagattcgcatagtgattctgatgggga

SEQ ID NO: 3217 - DNA, 831 bp, Homo sapiens
  misc_feature (665)..(665): "n" may be a, t, c, g, other or unknown
  misc_feature (724)..(724): "n" may be a, t, c, g, other or unknown
  misc_feature (831)..(831): "n" may be a, t, c, g, other or unknown
aaaatgccaaaatattttaattttcttaatactgtcataaattgaattgttatttacatttttattttctattctttcactatatatagaaatacaattaatttttgtgttttgaacatgtatcctgcaactttactaaattgacttatattaatccttgtaacttttttctggatttcttagagctttgtacatacaaaatcatgtctgcaaataggacagttttacttcttctttccaatttgcctttttctttttcttgccttattcactatctgggtcttacaatacaaatttaaatgcaaatagtgagagtggatatgcctgctttgctttgtttgtgattttaggtagaaaacattaaatcttcaccattgagtttgatgttagctgtagattttttttataaccttaattggatgaggaagacttctattcctagttgttgagagatttagtgatgaaagagtgttgatttttatcaaatgttttttctgcatccatttaaataattatatggttctttttctgttttctattcatagagtagattatattgattgattttctgatgttaagccaaccttgcattctgagataaaccccacttggatatgatagatagtattctttttacatgttattggttcttattgctatatttngtaggaactttttgttctatgctcatgagtaatattgctctgcagttctattatcttgngatgtatttggatttctaataaaggtaatggtagccccataaaacgatctgggaaagctccctcctcttttatattttggaaacctttggtgtaagaatggccgtcn

SEQ ID NO: 3218 - DNA, 786 bp, Homo sapiens
  misc_feature (715)..(715): "n" may be a, t, c, g, other or unknown
  misc_feature (730)..(730): "n" may be a, t, c, g, other or unknown
  misc_feature (734)..(734): "n" may be a, t, c, g, other or unknown
ttgttggatccctagactaagttgaaatgtatttctaatagtaggcaattttaattttcatgtagttgtttaattgttctctaattaatggaccaatgaaaaatgagttcatgtgtgtgtgtgtgtgtgtgtgtgtgtgtgtgtattctacctttttatgggaaaactacttttttgttgtaaagattttcttctgttttctttgctaataaagaattgttattaatttgcatgtatgtgaagtttatatagtctcatgtacattgttattttcattttctttcctttattctgtcatgagtttttgctgttacttgcatagttcacttttttaaaaaatgttatgtttttagagagggtctcactttgtcagctaggctgaagtgtagtggtaataatagtcttagctcactgcagcctcaaattcctgggctcaagtgattctcccaccttagcctcctatgtagctggagctacagacacatgccaccatgctcagctaattatataattttaaaaattttttatagagatgggatctcgctgtattgtctaggctggtattgaattcctggcctcaagctatcctcctgcctcagcctgtctacatgttggggttactgacatgagctaccacacctggcccacttttactttgaattaagaagagagaactgtgattggacagtatgcttggctaatctgcgtgtgaaancttcagctcccatcnaagntattggggattttcataaatattctcaacaggctcaggaagtttcttggggt

SEQ ID NO: 3219 - DNA, 707 bp, Homo sapiens
  misc_feature (618)..(618): "n" may be a, t, c, g, other or unknown
  misc_feature (669)..(669): "n" may be a, t, c, g, other or unknown
  misc_feature (677)..(677): "n" may be a, t, c, g, other or unknown
aagatgatcgtaggcgaagagaagaagttcctgctgcccttctggctgcaggtgatcttcatttcgctgctgctgtgcctgtcgggcatgttcagcggcctcaacctggggctcatggccctggacccgatggagctgcgcatcgtgcagaactgcggcacggagaaggagaagaattacgccaagcgcatcgagccggtgcgcaggcagggcaactacctgctgtgctcactgctgctgggcaacgtgctggtcaacaccacgctcaccatcctgctcgacgacatcgccggctcgggcctcgtggccgtggtagtctccaccatcggtatcgtcgtcttcggagagatcgtgccccaggccatctgctcccggcatggcctggctgtgggggccaacaccatcttcctcaccaagtttttcatgatgatgaccttccccgcttcctacccggtcagcaagctgctggactgcgtcctgggccaggagataggcaccgtctataaccgggaaaaactgctggagatgctccgggtcaccgatccctacaacgacctcgttaaggaggagctgaacatcatccaaggggcgctggagctccgcaccaagacggtggangacgtgatgaccccactccgggactgcttcatgatcaccggcgaagccatnctgacttnaacaccatgtctgagatcatggtgaagcgg

SEQ ID NO: 3220 - DNA, 706 bp, Homo sapiens
  misc_feature (665)..(665): "n" may be a, t, c, g, other or unknown
  misc_feature (670)..(670): "n" may be a, t, c, g, other or unknown
  misc_feature (683)..(683): "n" may be a, t, c, g, other or unknown
gatgcacttttggttctattatgccacccttttacctggcttccaaagaactgtgggtatagcagattccaattataattggttttatggtccagaaagccagctagttttcttggataagttcatcttaaagaatggagctgaaaattggttagctcagcaaattagaaagcaccgacctaaagatggaccgatggttccttcaactgcccaaaggtggagtactcttcacactgaatacatctggtatgatccccagctcacaccacagccacctgctgattatggtactgcaaaaatacacacattccctaactggggtgtggttacttatggggctgggttgccaaacacacagaccaacacctttgtgtcttttaaatctgggaagctggggggacgagctgtgtatgacatagttcattttcagccatattcctggattgatgggtggagaagttttaacccaggacatgagcatccagatcagaactcatttacttttgcccccaatggacaagtatttgtttctgaagctctctatggacccaagttgagccaccttaacaatgtattggtgtttgctccatcaccctcaagccagtgtaataagccctgggaaggtcaactgggagaatgtgcgcagtggcttaagtggactggcnaagangttggtgatgcanctggggaaataatcactggcttt

SEQ ID NO: 3221 - DNA, 744 bp, Homo sapiens
  misc_feature (673)..(673): "n" may be a, t, c, g, other or unknown
  misc_feature (712)..(713): "n" may be a, t, c, g, other or unknown
aatatgctttagatggaactaatgttgctattaatattccaaggctcttacttgacaaaattgagaaacaaatgtttcagttgcacataggaaatgtttatgaggctggaaaactgaacctcttaacagttattcagttattaaatgaagtcttgaaggtgatgaaatatgaacgttgtcaggctgatcaagcaagattgacggtagaccttcactaccttgaaaaagagaccaaatttcagaaggaaagattatcagatctgaaacatatgaggtatagaataaaagatgatctcacaactataagacattctgttgttgaaaagcaaggagaatggcataaaaagtggaaagaatttcttggtttgtctcctttcagtctaattaaaggttggactccatctgtagatcttttaccaccaatgtctccccttttgtttgatcctgcctcagaagaagtgtatgcaaagagtattctttgtcagtatcctgcttcacttccagatgcacataagcaacataaccaagaaaatggttgcagaggagacagtgataccttgggagcgctacatgatctagccaacagccctgcctctttcttgtcgcagtcagtttcatcatcagatagaaacaagtgttacagtacttgaaaaggacacaaagatgggaactnccaaagaaaaaaatggaagcaatttctaagaaaataccnngaatttggaagtgggaaaaattcttccattt

SEQ ID NO: 3222 - DNA, 804 bp, Homo sapiens
  misc_feature (779)..(779): "n" may be a, t, c, g, other or unknown
  misc_feature (794)..(794): "n" may be a, t, c, g, other or unknown
  misc_feature (798)..(798): "n" may be a, t, c, g, other or unknown
attttatcaatttgtaatggctaacaaacttggatagcaagtactagaagattttatgattattcagggacatattttctagcactgaatatgtgccagacattgtcctaggtgctagagctatagtgataaacaaatcagatgaaagtagaaatccatgccctaaagaacttaatgtttcaattgggaaggtcaagtcagataggttaaaaggcaaacacagtagcactgtagacattactatataagctttatggcaactagtgtttgtgcagtgctttacagttagtaaacagtgttcacgtaccttatctcacagtggctttgtgggtttgacaaagtagcaatcctcatctcataggtgaggaaactagggctctttaagattagataatctgtctaatagcatccagccaggtggtcatctgactctaaatcctttgaagtcttacttatgctacagtgcctttctttttcctacagatattgttaggcataattcatcatctagcaagtccagaatcatctttccagagttccagctcattcataataacatgtttcagaaatcagggtcctgtattagttacgtttttcttaaatggagacggaatcaaatgtgactgcatgtagtttttctggtctcatttggcctattttccaagagtaagggtagtagatggctatttggagcagtaactggacagcatctgtccagtgggacagctggagacttggctttagtatttgggaatgctgacttatgggctgcttaatcntttggagtcttgaangganggatta

SEQ ID NO: 3223 - DNA, 704 bp, Homo sapiens
  misc_feature (616)..(616): "n" may be a, t, c, g, other or unknown
  misc_feature (667)..(667): "n" may be a, t, c, g, other or unknown
  misc_feature (682)..(682): "n" may be a, t, c, g, other or unknown
agccggggattgccggcgccaggtgctgggggcgactcggacagcgggagcgtggggtggagtaggatggagtctccctcccgagctgggggtgtgggcctaggaaaggctgcttcgccgctgtgttcggagagctctggatactgcggggcttttccgcggaggagcgcccgccggcatctgcatctgggaccgacctcctgggctggctgatcaaagaggaagcagcagcaatgtctgctgtgggggctgcaactccatacctgcatcatcctggtgatagtcacagtggccgagtgagtttcttgggggcccagcttcctccagaggtggcagcaatggcccggctactaggggacctagacaggagcacgttcagaaagttgctgaagtttgtggtcagcagcctgcagggggaggactgccgagaggctgtgcagcgtcttggggtcagcgccaacctgccggaggagcagctgggtgccctgctggcaggcatgcacacactgctccagcaggccctccgtctgccccccaccagcctgaagcctgacaccttcagggaccagcttcaggagctctgcatcccccaagacctggtcggggacttggccancgtggtatttgggagccagcggcccttcttgattctgtggcccaacagcanggggcctgcttgccncatgttgctgactttcggtggc

SEQ ID NO: 3224 - DNA, 774 bp, Homo sapiens
  misc_feature (700)..(700): "n" may be a, t, c, g, other or unknown
  misc_feature (704)..(704): "n" may be a, t, c, g, other or unknown
  misc_feature (766)..(766): "n" may be a, t, c, g, other or unknown
actcagtgcagagggaaattgacacagccatgatgaggcctggctcacaagagccatagttactgtaggagtttctgtggctaaatatgcttagctattgaggcaaggacatgtgctggatgtgtatgcagtctttgaagctggagaggcctgtgttggaaactgtgctctgtcccatgccagttccctgaccttggaacccctagagcaatcaacagacagacagagccctgcttcatggagcgtctgctctctcctggagctcacacgctgaaacagacaggatgcaacacctcagggttgttggagaaccagaggctgttgcaattaggatggcgaatggtgaaaaacagtgtggttgaattgaacataagctgaagggctagacatcatggcttcaatccttgtggaggagccttcatctaccacataagaattgcagcaaaccctgcagctatcctgaagctgccatgctgaaaaggccaattgggagaccacatagagaccgagagagacttccaaggactccagccaatcctgggccccagcagtttgaatctcccagcaatgccaccatacaggagagggagcaaatctcagaagattcaagtgccactgcatgggttgatacctacataaaaggcattgggtatgtgctcttgggtgattccctaatcatagtggaaagatgggagctganactntaagactggaagtacttggccaaacttatggcttgatacggatcttttaacttaaaatcggnggtcttct

SEQ ID NO: 3225 - DNA, 644 bp, Homo sapiens
  misc_feature (144)..(144): "n" may be a, t, c, g, other or unknown
  misc_feature (205)..(205): "n" may be a, t, c, g, other or unknown
  misc_feature (269)..(269): "n" may be a, t, c, g, other or unknown
  misc_feature (369)..(369): "n" may be a, t, c, g, other or unknown
  misc_feature (375)..(375): "n" may be a, t, c, g, other or unknown
  misc_feature (477)..(477): "n" may be a, t, c, g, other or unknown
  misc_feature (548)..(548): "n" may be a, t, c, g, other or unknown
  misc_feature (608)..(608): "n" may be a, t, c, g, other or unknown
  misc_feature (626)..(626): "n" may be a, t, c, g, other or unknown
tgaccagcgactgagcggcggccggcgcgcttagcgccctgaacatgcggcagtccctgcgggcgaccccgggctccggacaggcggcggcggaggcggcggctcgggagggaaggaggcggcggcgccggcggaggtggcggnggagacggccggcgcccggcgcggagccctagggaggcagttcagcgcggcctcgggcctngtcgagaaggatgctgtcccgaaagaaaaccaaaaacgaagtgtccaagccggccgaggtgcangggaagtacgtgaagaaggagacgtctcctctgcttcggaatcttatgccttcattcatccggcatggtccaacaattccaagacgaactgatatctgtnttccanattcaagccctaatgccttttcaacttctggagatgtagtttcaagaaaccagagtttccttagaactccaattcaaagaacacctcatgaaataatgagangagaaagcaacagattatctgcaccttcttatcttgccagaagtctagcagatgtccctagagagtatggntcttctcagtcatttgtaacggaagttagttttgctgttgaaaatggagactcttggttncccgatattattattcanacaattttttttgatggt

SEQ ID NO: 3226 - DNA, 645 bp, Homo sapiens
  misc_feature (389)..(389): "n" may be a, t, c, g, other or unknown
  misc_feature (410)..(410): "n" may be a, t, c, g, other or unknown
  misc_feature (631)..(631): "n" may be a, t, c, g, other or unknown
  misc_feature (636)..(636): "n" may be a, t, c, g, other or unknown
  misc_feature (641)..(641): "n" may be a, t, c, g, other or unknown
ttttgcattcctccagcttgcagctccggtagttggaggctgggtagggcagggggaaccgacaggccggtgtccccagccgcaaaagagctgctgaactgtccgtttaaatgctgctgggagactcgtaaaaaaatcatcgtggacctggaggatgagaggggcgagctttatttcggtcggattgcggtgtggtggtttagctgcaaggggatgccgcagccccagttgagggggaaaatagttcttaaaaagcatatgcccccctaaggaatgtctctaaagaaccaaatcaaagctgctctttggaaggtatgaatagaatttaaaaaaaaaagatttctatggagcttaaagttcacagccattctgtgtagacaagagctganaaaaatgtgagaattatacanaaaaccattaatcacttcttttctttaaatacgtatcctctctcctttgttattattcaacagcaaatctccttggaccggctgttgggggaaaaaagtgttagccgtctctcccggatctgcaagggggaaaaaatttggaaccataaagttgaaaacttttttctctcagtttggaagaagcccttcgtcatgaatgggatctgcagagttcgggcganaggangcganaggc

SEQ ID NO: 3227 - DNA, 865 bp, Homo sapiens
  misc_feature (812)..(812): "n" may be a, t, c, g, other or unknown
  misc_feature (815)..(815): "n" may be a, t, c, g, other or unknown
  misc_feature (831)..(831): "n" may be a, t, c, g, other or unknown
tgtgatttttatctttatttagctcagactagcttattcggtcagtgagagggagcctcttcagcttggctcttgctttcttttgataagtgtgcacatgtgtgcatacatgtgtgcacagaccacacgcacagtcattgatagctccctgcagcctggcatgtcaagatgctctaggcccaatttatagagcttctgctccaaacctgtcttaaaagaaaaactttagacaagttagcagtttaattgagcagaaaatagtttcttcagctgggtagcactcaggaccaaaagtggttcagaacgttctcctgtgcgttgtgtgcaggctgtatttatttatagccacaggaagggaaagacacatgtacatggccagactgactgcaggtcagcctccacctcacataggcatgttttgggagccttcagcatgtgattggtgagactctgctgcttgttacagaagtgtactctcaagtcaggtcccagtttgcttatacattaagtgaggttataagtcactatgtacagaggcagttttaggccaaacttaattccgtttaacacttggaatccattatttttcccagagtctctggtagagatggtatttcagatccagtttaggatgctcattgctattgcgttggtcattatttctagatctttggacggagctttaaaaaaatacaaacattgcacacacatatttaaaggaagaatattttctgagcctatattgatattcccaatacaaattcaaggtcctggggcctttacatagccctcctctatatgaaggcctgggnctnctggcacttcggaatncctgctttttcaagacacaggaccaatggcatgg

SEQ ID NO: 3228 - DNA, 859 bp, Homo sapiens
  misc_feature (723)..(723): "n" may be a, t, c, g, other or unknown
  misc_feature (748)..(748): "n" may be a, t, c, g, other or unknown
  misc_feature (838)..(838): "n" may be a, t, c, g, other or unknown
  misc_feature (840)..(840): "n" may be a, t, c, g, other or unknown
  misc_feature (854)..(854): "n" may be a, t, c, g, other or unknown
taattttaaagccagtcccagcagatcaaatgatagtttctccgtcaagcaatacttccacttcaacttccactcttcagagccctgtgggagctggcacacacactgtcacaaaaattcagtctggcataactgggacagtcatatcggctccttcaagcactcccatcaccccagccatgcccctagatgaagacccctccaaactgtgtagacatagtctaaaatgtttggagtgtaatgaagtcttccaggacgagacatcactggctacacatttccagcaggctgcagatacgagtggacaaaagacttgcactatctgccagatgctgcttcctaaccagtgcagttatgcatcacaccagagaatccatcagcacaaatctccctacacctgccctgagtgtggggccatctgcaggtcggtgcacttccagacccacgtcaccaagaactgtctgcactacacgaggagagttggttttcgatgtgtgcattgcaatgttgtgtactctgatgtggctgctctgaagtctcacattcaaggttctcactgtgaagtcttctacaagtgtcctatttgtccaatggcgtttaagtctgccccaagcacacattcccacgcctacacacagcatcctggcatcaagataggagaaccaaaaataatatataagtgttccatgtgcgacactgtgttcaccctgcaaaccttgctgnatcgccactttgaccaacacattgnaaaccagaaggtgtctggtttcaagtgtccagactggtctctttatatgcccagaagcacttatgatggaccatatcaagtctatgcatngnacatttgaaaagtnttgaa

SEQ ID NO: 3229 - DNA, 820 bp, Homo sapiens
  misc_feature (1)..(1): "n" may be a, t, c, g, other or unknown
  misc_feature (810)..(810): "n" may be a, t, c, g, other or unknown
  misc_feature (813)..(813): "n" may be a, t, c, g, other or unknown
  misc_feature (817)..(817): "n" may be a, t, c, g, other or unknown
nttctgggagcaagcctgcagcccggctcacctggagaaagggtgaccaagaactccacggagaaccaacccgcatacaggaagatcccaatggtaaaaccttcactgtcagcagctcggtgacattccaggttacccgggaggatgatggggcgagcatcgtgtgctctgtgaaccatgaatctctaaagggagctgacagatccacctctcaacgcattgaagttttatacacaccaactgcgatgattaggccagaccctccccatcctcgtgagggccagaagctgttgctacactgtgagggtcgcggcaatccagtcccccagcagtacctatgggagaaggagggcagtgtgccacccctgaagatgacccaggagagtgccctgatcttccctttcctcaacaagagtgacagtggcacctacggctgcacagccaccagcaacatgggcagctacaaggcctactacaccctcaatgttaatgaccccagtccggtgccctcctcctccagcacctaccacgccatcatcggtgggatcgtggctttcattgtcttcctgctgctcatcatgctcatcttcctcggccactacttgatccggcacaaaggaacctacctgacacatgaggcaaaaggctccgacgatgcttcagacgcggacacgggcatcatcaatgcagaaggcgggcagtcaggaagggacgacaagaaggaatatttcatctagaggcgcctgccactttctgcgcccccaagggccctgtggggactgctggggcccgtaccaacccggacttgtncanggangca

SEQ ID NO: 3230 - DNA, 860 bp, Homo sapiens
  misc_feature (764)..(764): "n" may be a, t, c, g, other or unknown
  misc_feature (788)..(788): "n" may be a, t, c, g, other or unknown
tacaggctctgtgctgattgcaaggcactcttgagagaaattcattcttattttgcagaagaagaactgaaacttcattaagtcattaagcaacttgctcaggtggtggaactgagctttaaatatggactttttccagtctcaattcagcattatactaggctgcctccatgtgtttttcaaagccccattcaagttttacttctatggtaaactaattttacatacacaaatcttttcattttctgaacttcctttatggctttactgtcaccccactagtatttgatgtcttagctattaactaattcctgattatttcacttgtcacatcaggaaccctatcctcttagttctcccattgagatttcactgctggactaagattattcttgattcgtagtcattggtttctgtttccattcattttcagcactgattatgttaatcgtattgcttgagttttttctttgttcaatgttgtttattacattcattttgtttcatatacacacattttttttttttaactggcattttgaggacattggtttaatggaaggaaaaaggaatggtgcaaagcacatggtatttgaattccaaagaccttgaccctcagcattagcaagtcacttgttttctgagcctcagttttcttactctcaaatgaggtaatatccgaaagtctttgacaacacactaaagcctgatgcagatttcctttttgaagtaattgggctggttctattcatattggatatggnattctatggtattggctatagatnctacattttaaaatgtatttaacagcatgtaaatgtcattcatgcctgtgacatgttccctttatgaatttt

SEQ ID NO: 3231 - DNA, 886 bp, Homo sapiens
  misc_feature (796)..(796): "n" may be a, t, c, g, other or unknown
  misc_feature (823)..(823): "n" may be a, t, c, g, other or unknown
  misc_feature (886)..(886): "n" may be a, t, c, g, other or unknown
atgatttacatttcaagatttcagttacattttttaaggaattcaacaattctgcatcatgaagtattctttcacacaaatgttccatagtcattagtttttacagaacccttttcttatattctgcatttcatctggaatactataagcacaagttcagtttggcattctgttctccactagtgattgagtttgaagcccaaggtcaggatattgattgatgacatttccctttaaagtatttgtatccatttgcaatttggggacagagtgattcccagtatggtgcaggaaataactaaactggaagtcagcctgactcagttttgtagttaattttctttgtgaccttgggcatgtcacttaaccttccaataactgagggagttggcccagaactagcacagtcttctaatgcagacattccacgattctctagggaggattcacttccatagaggtttaaaagtggatacatttttaggttaaatggctttgttcatttagtttttttctccttaacccattttggagcaataagactgtcatggagtaaaaccaaattacctggaactctcaaaaggctgcagttcttatcctattttttttatttttaagggaagggaaaaaaatggcaacaaacaaatttatatccatgagtcaggacaaatccatcccagttttctaacatacacagtgtcataaacatattcaatgaagcactgcagattcttaacccgaaaatggaatatttgggttggacttaccattcctaaaatggtgggaaagaactggnctttggaaatatacctttttggagtantttttagccaaaaaattggttttaaagccagttggccttgggtttggccaagggaccttgtgn

SEQ ID NO: 3232 - DNA, 599 bp, Homo sapiens
  misc_feature (535)..(535): "n" may be a, t, c, g, other or unknown
  misc_feature (568)..(568): "n" may be a, t, c, g, other or unknown
  misc_feature (586)..(586): "n" may be a, t, c, g, other or unknown
aaatgaaaccagacccagatcaatattttaggatactagatgttttaatgggttcagaatccagtttgtaggaagattttttaatggttttggttgctcctcccccagctgccaccccccaccttacccttattcctctctgtccacattttctgccccaccttacttctcctccctgacagacatccagcccctagtaatacttaaggcactatggcacttagctttgaagtgacactaccctgtcttccttccgcccgctggtgggtaaccagtgccttccctgtaacggtaatgctgcagaactgcaaccttttgtacctttctttggggaatggggtgggggtgggagaggaggtagatggggaagaaataccccagacccaacaaacctccagccagaaagccagctattttgcatttgaaggaattgacttcctcattcattgagctttttaaaagatcacaacctcaagatggttaaaatccattgacatttgcactttcaaacatgacaagtctcggagctgctganatgacaggcccctggcctttccacttatgcctncttttctccttattcctnctacctccgcccg

SEQ ID NO: 3233 - DNA, 868 bp, Homo sapiens
  misc_feature (755)..(755): "n" may be a, t, c, g, other or unknown
  misc_feature (834)..(834): "n" may be a, t, c, g, other or unknown
  misc_feature (867)..(867): "n" may be a, t, c, g, other or unknown
aggaacgacaatcgagtggttagaaccaaagatatctttatcaaaccactataaaaatggagctgaccagccctttgcaactgatcagagtaagccggtggcagtcccagaagagcagcctgttgcagaatctggactattagcgagggagcctaaagaaataaatgcagatgatgagatagaggatacatgtgaccacaaagaggatgacctgggagctgtagaagaacaacgtagtgtcatcctacatctcttgtcacagcttaagctgggcatggatttaacaagagtggtgcttcctacatttatcctagagaagcgttccttgctggaaatgtatgcagactttatgtctcatccagacctatttatagccatcactaatggagccacagctgaggacagaatgattcgctttgttgagtactaccttacctcatttcatgaaggccgtaagggagccattgctaaaaaaccatacaatcctatcattggagaaacatttcactgttcctggaagatgccaaaaagcgaggtagcatccagtgtttttagcagttcttccacccagggagtcacaaatcatgctcctttatcgggggagtctttgacccaggtgggatcagactgttacacagtcagatttgttgctgagcaggtttctcatcatcctccagtctcaggattttatgcagaatgtacagagaggaagatgtgtgtaaatgcgcatgtctggactaagagcaagttcttangcatgtcaataggcgtgacaatggttggagaaggtatccttagtctgttggagcatggagaagagtccccattttcttntaccctggggcatatgctcggcaaatttgctgnt

SEQ ID NO: 3234 - DNA, 867 bp, Homo sapiens
  misc_feature (777)..(777): "n" may be a, t, c, g, other or unknown
  misc_feature (826)..(826): "n" may be a, t, c, g, other or unknown
  misc_feature (859)..(859): "n" may be a, t, c, g, other or unknown
aaatgatgttaaagtaagaattgcactcctgtccctctggccttccatctctcccgcccttgtgccccacaacctggccaacagtactggaagaaactggacacagtcaccagcatccccggggagggcaaaacagccatgtcgtgccctgatgaagagcaattctgatcacagctgttactcactgagcaccagccaggcaccaggcaccccataacacggcttcctgtgctctccctccagagcctgtcgcagctctaggagggagctatacaatgatgtctttattagtgtcatcatgagaagcccaataagcagtatgccctaacagttagtaggccaggctctggagctaagctgcatgggttcaaatcccagctccaccattcagcctgcagagaccatgagcgagttacttaagccaggctctggagctaagctgcatgggttcaaatcccagctccagcattcagcctacagagaccatgggtgagttacttaagccaggctctggagctaagctgcatgggttcaaatcccagctccaccattcagcctgcagagactgtgggtgagttacttgagctctctgtgccaatattttctcacctataaggtggaggtgaaaataaactctataacatgacaagaactacttcacagtagttgcagtgaggattcaacgagatgaacatttagtacttgggacacagcagtggcccaatgtaaatgggctacttgtcataagccctaagtcacaggtcaacaaactgagangcaaaaagcccttgggttgagcttgggtatctagtgagtatggattcanggaccagattccagcccacgaactggtaacaancccacctt

SEQ ID NO: 3235 - DNA, 839 bp, Homo sapiens
  misc_feature (719)..(719): "n" may be a, t, c, g, other or unknown
  misc_feature (780)..(780): "n" may be a, t, c, g, other or unknown
  misc_feature (797)..(797): "n" may be a, t, c, g, other or unknown
  misc_feature (831)..(831): "n" may be a, t, c, g, other or unknown
gctctgctgcggaggccgtagccgcgggtagttgggaggaaccgagatttacgcttggtaaggcaagttgcgagctgtccggcgccggtcgagttcctgccgccgtcgtcgtcaggcaggggagaagggggcccaacccctctagtgacagctgtttgctacctaatagggcttttcatcccaccgggccccagggccttcgttaggagcccagcaggctcaacttcttgctgtggttctggaaaagggagtgaccacctggctcaacacctctctctgtgatgtgtttgggagttttgggaaatgagacggctccgagggaagagcttgagggagcggcgtcgcactcgttcgaccttcccgggcctgggctttgtttctaggcattttaggttgaacgctctacatcttaactgagggcaggggaggtggccagagcatcccgctgagcgttttccgattccccagatggccaggcacctggtcctggtggctggacagtgaccccgtggacgcacatttacagctatagccattcagtgccgcggggaggtgaggatagtgatcctgggacctgctcgaggattcacccttgccccaagaacctgttccattcccaggaatgaaggcggtcaggcaggggaggagaagggggcctcaactcttctagtgacagcagtttgccacctaatagagcttttcagattttgtcttctcangccattttactcagcctcggactatcaaaggatggtcacatttgaaactggttttctgcantcaggaaccaaaaagtnccggcttgttgaaggaagaaacttgaatcttggntcaggagt

SEQ ID NO: 3236 - DNA, 864 bp, Homo sapiens
  misc_feature (813)..(813): "n" may be a, t, c, g, other or unknown
  misc_feature (845)..(845): "n" may be a, t, c, g, other or unknown
agcgcggggaatttcgagtggtgttggagcgccggaggctagtgggtggctgacccccagcatcctcgagagcgaccatggactccctggccgagtctcggtggcctccgggcctggcagtcatgaagacaatagatgatttgctgcggtgtggaatttgcttcgagtatttcaacattgcaatgataatacctcagtgttcacataactactgctctctctgtataagaaaatttctgtcctataaaactcagtgtccaacttgctgtgtgactgtcacagagccggatctgaaaaataaccgcatattagatgaactggtaaaaagcttgaattttgcacggaatcatctgctgcagtttgctttagagtcaccagccaaatctcctgcttcttcctcttcaaagaatcttgctgtcaaagtatatactcctgtagcctccagacagtctttaaagcaggggagcaggttaatggataatttcttgatcagagaaatgagtggttctacatcagagttgttgataaaagaaaataaaagcaaattcagccctcaaaaagaggcgagccctgctgcaaagaccaaagagacacgttctgtagaagagatcgctccagatccctcagaggctaagcgtcctgagccaccctcgacatccactttgaaacaagttactaaagtggattgtctgtttgcggggttaacattccagaaagtcacattaataagcatttagacagtggttatcacgccaagagaagaaggaaagccttagaagttctgtcacaaaaggaaccgctgcccaaaactgnatataatttgctctctgatcgtgatttaaagnaaaaagcttaaaggacctg

SEQ ID NO: 3237 - DNA, 811 bp, Homo sapiens
  misc_feature (756)..(757): "n" may be a, t, c, g, other or unknown
  misc_feature (762)..(762): "n" may be a, t, c, g, other or unknown
accagcgccatgctgggctcgcgagccgcggggttcgcgcggggcctgcgggctttggcactggcgtggctgccgggctggcggggccgctccttcgccctggcgcgtgcggcaggcgcgccccacggtggtgacttgcagccccccgcctgtcccgagccgcgcgggcgccagctcagtttgtccgcggcggcggtggtggactctgcgccccgccccctgcagccgtacttgcgcctcatgcggttggacaagcccattggtgagtgcgggcgggcgggcagcccgggaatttgcaagtagcagccgccgagtcggctccgcggagctgtccgcggcggccggccggggcgtgatggaaatgagaacctgaaagcttgggcttggctgccgggtgccgtgcgccctggggcgaatcacctcgggacactttgaaatgagagcctgaaagcttgagcttggctgccggctgccgtgcgccctggggcgagtcacctcaggacacgcagtcgggacagtctcctaaaggacccgccagtttcacgtctgtctgcatcctgagcacctgaagcgggcaagataattctcattccacaaacacttgtttaaatggtgactcaagcggaaggttccgttctcgtggccctccttcatttattagaatgtttgattcttcccgcaatcttgtaaggcccacaaagacaatccttaagacagttaagacgcttggggaaactaaggttctcgtcagagccnngaccngaagaacttttgggttttgatgctgaattcggactcttttaccctgcat

SEQ ID NO: 3238 - DNA, 857 bp, Homo sapiens
  misc_feature (692)..(692): "n" may be a, t, c, g, other or unknown
  misc_feature (706)..(706): "n" may be a, t, c, g, other or unknown
  misc_feature (718)..(718): "n" may be a, t, c, g, other or unknown
  misc_feature (793)..(793): "n" may be a, t, c, g, other or unknown
  misc_feature (818)..(818): "n" may be a, t, c, g, other or unknown
  misc_feature (841)..(841): "n" may be a, t, c, g, other or unknown
gatgaagatgatgaatctgatgacagccaatcagaatcagatagtaattcagaatcagatacagaaggatcagaagaagaagatgatgatgataaagaccaagatgaatcagatagtgatactgaaggagagaaaacttcaatgaaactgaataaaacaacttcctctgtcaaaagcccttccatgagtctcacaggtcactcaacacctcgtaacctccacatagcaaaagccccaggctctgctcctgctgccttatgttctgaatcccagtcacctgcttttcttggtacatcttcttccacacttacttcaagcccacactctggcacttccaaaagaagaagagtaacagatgaacgtgaactgcgtattccattggaatatggctggcagagagagacaagaataagaaactttggagggcgccttcaaggagaagtagcatattatgctccatgtggaaagaaacttaggcagtaccctgaagtaataaagggaatgcagtggtgtcttttgaaagaagaggatgtcattcctcgtatcagggcaatggaaggtcgtagaggaagaccaccaaatccagatagacaacgagcaagagaggaatccaggatgagacgtcggaaaggtcgacctccaaatgttggcaatgctgaattcctagataacgcagatgcaaagttgcttanaaaactggcagctnaagaaatagccnggcaagcagcacaaataaagcttttgagaaaacttcaaaagcaggaacaggctcgggttgctaaagaagccaaanaacaacagcaataatggctgctgangagaagcggaagccaaaagaacnggttaaggatatgaac

SEQ ID NO: 3239 - DNA, 864 bp, Homo sapiens
  misc_feature (791)..(791): "n" may be a, t, c, g, other or unknown
  misc_feature (811)..(811): "n" may be a, t, c, g, other or unknown
gacgggccgtctcgagagccggcatctcctaggagctagtcctggtcctcggctaggcggcttggggtcgcggcgtaactggggagccagcctgacgccggcggaccccgcctgtgatcctggcaacgatggatgatgacttgatgttggcactgcggcttcaggaggagtggaacttgcaggaggcggagcgcgatcatgcccaggagtccctgtcgctagtggacgcgtcgtgggagttggtggaccccacaccggacttgcaggcactgtttgttcagtttaacgaccaattcttctggggccagctggaggccgtcgaggtgaagtggagcgtgcgaatgaccctgtgtgctgggatatgcagctatgaagggaagggtggaatgtgttccatccgtctcagcgaaccccttttgaagttgaggccaagaaaggatcttgtagagaccctcctgcatgaaatgatacatgcctatttatttgtcactaataacgacaaagaccgagaagggcatggtccagaattttgtaaacatatgcatcgcatcaacagcctgactggagccaatataacggtataccatacttttcacgatgaggtggatgagtatcggcgacactggtggcgctgcaatgggccgtgccagcacaggccaccgtattacggctatgtcaaacgagctactaacagggaaccctctgctcatgactattggtgggctgagcaccagaaaacctgtggaggcacttacataaaaatcaaggaaccagagaattctcaaaaaaangcaaaggaaaggcaaaactnggaaaggaaccatattggccgcagagaattaaggataacccaacagaggtgag

SEQ ID NO: 3240 - DNA, 559 bp, Homo sapiens
  misc_feature (530)..(530): "n" may be a, t, c, g, other or unknown
  misc_feature (535)..(535): "n" may be a, t, c, g, other or unknown
  misc_feature (546)..(546): "n" may be a, t, c, g, other or unknown
atgacactctgagcgctccgggaacggacagcccggcggcttcccgaagccggcggcgcagctgcccggggcgagggggagaaagggagagagggagggggagggcgggcgaagcgggagagccagagactcctcggcgctgagcgcggcggcggcccgggcagccccacgcccctgcctcgcgcgccgcccgcgccatgaagcacatcccggtcctcgaggacgggccgtggaagaccgtgtgcgtgaaggagctgaacggccttaagaagctcaagcggaaaggcaaggagccggcgcggcgcgcgaacggctataaaactttccgactggacttggaagcgcccgagccccgcgccgtagccaccaacgggctgcgggacaggacccatcggctgcagccggtcccggtaccggtgccggtgccagtcccagtggcgccggccgttcccccaagagggggcacggacacagccggggagcgcgggggctctcgggcgcccgaggtctccgacgcgcggaaacgctgnttcgncctaggcgcantggggccaggact

SEQ ID NO: 3241 - DNA, 871 bp, Homo sapiens
  misc_feature (701)..(701): "n" may be a, t, c, g, other or unknown
  misc_feature (742)..(742): "n" may be a, t, c, g, other or unknown
  misc_feature (824)..(824): "n" may be a, t, c, g, other or unknown
  misc_feature (853)..(853): "n" may be a, t, c, g, other or unknown
  misc_feature (859)..(859): "n" may be a, t, c, g, other or unknown
ccttggccaagaagttgccaccaccaccgggcagccccctgggccactcaccaactgcctctcctcctcctacggcccgaaagatgttcccaggcctggctgcaccctccttgcccaagaagctgaagcctgaacaaatacgggtggagatcaagcgggagatgctgccgggggcccttcatggggaactgcacccatctgagggtccctggggggcaccacgggaagacatgacacccctgaacctgtcgtcccgggcagagccggtgcgcgacatccgctgtgagttctgcggcgagttcttcgagaaccgcaagggcctgtcgagtcacgcgcgctcacacctgcggcagatgggtgtgaccgagtggtccgtcaatggttcgcccatcgacacactgcgagagatcctcaagaagaagtccaagccgtgcctcatcaagaaggagccaccggctggagacctggcccctgccctggctgaggacgggcctcccaccgtggcccctgggcccgtgcagtccccactgccgctgtcgcccctggctggccggccaggcaaaccaggtgcagggccggcccaggttcctcgtgagctcagcctgacgcccatcactggggccaagccctcagccactggctacctgggctcagtggcagccaagcggcccctgcaggaggaccggcttcttccagcagangtcaaggccaagacctacattcagacttgaactggcctttnaagggcaaagaaccctttcattgaagaaagacccttccaacttccttccaaccgaaggccctggcttgcaaaacttgtggtngggcccttttacttttggaaaaacccgcnaagggnccttgggccaag

SEQ ID NO: 3242 - DNA, 811 bp, Homo sapiens
  misc_feature (717)..(717): "n" may be a, t, c, g, other or unknown
  misc_feature (787)..(787): "n" may be a, t, c, g, other or unknown
  misc_feature (803)..(803): "n" may be a, t, c, g, other or unknown
atgctattgaagacagcagacaggcccggactgagaccgtggttgatgactgggacgaagagtttgaccgagggaaggaaaagaaaattaaaaaatttaagagagagaagaggagaaacttcaacgccttccagaaacttcagactcgacggaacttctggtctgtgactcacccagcaaaggctgccagcctcagctatcgccgctgactgtgcccctgtggaaggaggactaccgtggtttgttctgcagcctcctggagacaaggcgtcccttcccgggagctgtcggtctggatctgagggagctctctgtgtgggctctgctgtgctgggagcctgtcacggtaggagctctcccggtaccagtgtccacagaccgcccaacatagaggctttgaggcttctctagatcggaacctctttggtgacattcccgaccagccctgcaagagaaacgacagtgtgtgtgtgagcagaggtggctgcacacctgctggacatctttgccaggctgtgccttctcatgtttcatagacagtggtctgtgctggcagaggctgctgcccctggttggggctatcaggagagtgggggatggtggccacatgtcctccaggtggtctcccggtgcatagctggtggctctgggcaagccatcccttgcttctcggggctgacgccaccgttgtgtccgagcccgcctccctgcttcctnacgggaccccttcatctggtggccttacctgtcctcaaaaaggaaaagtgaccccacccagccacctttnccttttatggaactcnaaaggtgg

SEQ ID NO: 3243 - DNA, 806 bp, Homo sapiens
  misc_feature (748)..(748): "n" may be a, t, c, g, other or unknown
  misc_feature (794)..(794): "n" may be a, t, c, g, other or unknown
  misc_feature (803)..(803): "n" may be a, t, c, g, other or unknown
catcaaaatatgaagtcctgacagttcaagagcctccaaggattgaagatgccgaggaatttcccaacctggcagttgcatctgaaagaagagacagaatagagacaccgaaatttcaatctaagcagcagccacaggataattttaaaaataatgtaaagaagagccagcttccagtgcagttggacttggggggcatgctgacagccctggagaagaagcagcactctcagcatgcaaagcagtcctccaaaccagtggtagtctcagttggagcagtgccagtcctttccaaagaatgtgcatcaggggagagaggccgccgcatgagtcaaatgaagaccccgcacaatcccttggactccagcgccccactgatgaagaaagggaagcagagggagatccccaaggccaagaagccaacctcactgaagaagattattttgaaagaacggcaagagagaaagcagcgtctccaagaaaatgctgtgagtccagcttttaccagtgatgacacacaagatggagagagtggtggtgatgaccagtttcccgagcaggcagagctgtcagggccagaggggatggacgaactgatctccactccttcggttgaggacaagtctgaagagccaccaggcacagagctccagagggacacagaggccttccaccttgctcccaatcacaccaccttcctaagatccacagccgcagattcagggattctgcagccagatgcttagtnaagaaatggatgcttgggtacccgcctactcaaagaactggtccgntttcaagancgt

SEQ ID NO: 3244 - DNA, 796 bp, Homo sapiens
  misc_feature (791)..(793): "n" may be a, t, c, g, other or unknown
aaatgctcggtgctttaaatttgcaattaccatatttgcagaaacttgaaaaatcatcccaattaaatgacaaaatgtataggaggattatctttcttttgcccttacaactcaaattatattcgaagtaacatttttacagcagtcaaaacttttaaccaaaactcacacctgcagtctcataagtttaacaaaatggccacattccacgctttattttcttaacaaccctgactgtttaaatgactcccattgaaccaacagcttacagttgctgggcaataaaaaagcgagcaaaaggacctccagccctgctgttttagctattacccagcactctcagagtttgctctagtctggctgttcaatcaaattcattttccagtagcttctggcctttgtctcctctttctggccacgcatttcattgcctcctgaatttgatgacaacattttctttcttcactttgaatcttggcccagaatctcactctcccagccccatggaaagatggggaaaagatttcattctgctgatcaaatttgttagaagacattctttagagtctgaaaaaatatatttcattagcagttctctaggtagtggaatttttagtgatgtttactcttttttccttgttctaattttcctctaataaacagaaaaaaagcaagagtaacccaccaaatttggataaagggcttctgcttttcatattctcttcaaccagaacagcttaacttttctccatttatttatttaagtatttattcatatttgaaaacaaggnnnttg

SEQ ID NO: 3245 - DNA, 714 bp, Homo sapiens
  misc_feature (654)..(654): "n" may be a, t, c, g, other or unknown
  misc_feature (669)..(669): "n" may be a, t, c, g, other or unknown
  misc_feature (688)..(688): "n" may be a, t, c, g, other or unknown
gtggcccctgagtgctgggtgggaccgcggtgactgaacctagaaggtggagaggaatcgtcctcggtgcccagaggcggctctgcagccccgtgacggcgaccactgctcccgggccgtgcttccccaagtagtccgatggcagcggctgtgccgaggcgcccaactcagcagggcactgtgacctttgaagatgtggctgtgaacttttcccaggaggagtggtgtcttcttagtgaggctcagaggtgcttgtaccgtgatgtgatgctagagaacctggctctcatatcctcgctgggttgttggtgtggatcaaaagatgaggaggcaccttgtaagcagagaatttctgtacaaagagagtctcagagcaggactcctagggcaggtgtttctcctaagaaggctcacccctgtgaaatgtgtggcctcatcttggaggatgtttttcactttgctgaccaccaggaaactcatcacaagcagaagctgaacaggagtggagcatgtggaaaaaacttggatgacactgcataccttcatcagcaccagaagcagcatattggagagaaattctacagaaagagtgtcagagaagcatcgtttgtaaagaaacgtaagctcaaggtgtcacaggagccatttgtcttncgcgagtttgggaangacgttctgcccagttcangattgtgccaagaagaagctgctgta

SEQ ID NO: 3246 - DNA, 763 bp, Homo sapiens
  misc_feature (1)..(1): "n" may be a, t, c, g, other or unknown
  misc_feature (55)..(55): "n" may be a, t, c, g, other or unknown
  misc_feature (227)..(227): "n" may be a, t, c, g, other or unknown
  misc_feature (490)..(490): "n" may be a, t, c, g, other or unknown
  misc_feature (609)..(609): "n" may be a, t, c, g, other or unknown
  misc_feature (667)..(667): "n" may be a, t, c, g, other or unknown
  misc_feature (698)..(698): "n" may be a, t, c, g, other or unknown
  misc_feature (746)..(746): "n" may be a, t, c, g, other or unknown
ntgaagcaatgtgggttaaagttagaccctggggaaaccttgcaggggtctgtangcctgtgaagaactggactaggtgagaagaagaagcttttgacccatgtcactccctggcccagaactatatcctacccacaggtgggttgagttcaggactgctgcttccagcccccagcagcaaggttcaagtgagagctgactcacctagggccccttgttagagcctnagagccaggtgaaaagccacacacaggctgggcgcgatggctcacgcctgtaatcccagcactttgggaggccgaggcaggtggatcacctgaggtcaggagttcaagaccatcctggccaacatggcaaaatcccgtctctactaaaaatacataaattagtcctgcctggtggcacatgcctgtagtcccagctactcgggaggctgaggcaggagaatcgcttgaacccgggaggcggaggctgcagtgagccgagatcntgccactgcactccagcctgggtgacagagcgggactctgtctccaaaaaaagaaaagccacacaggtgtgtgtgtaggggcaagggagtttcctactgtcttcctagcagaaaatggngagaaactgttaaagccagaatgagggatggctgtgtgtggcctgggactggcaacanaagtgtcaagctgccaggtttcaagccagtncagagcacgggtctacctgggttatgtgttgcccggactaatggttanagacatctgtcactggt

SEQ ID NO: 3247 - DNA, 861 bp, Homo sapiens
  misc_feature (215)..(215): "n" may be a, t, c, g, other or unknown
  misc_feature (799)..(799): "n" may be a, t, c, g, other or unknown
  misc_feature (836)..(836): "n" may be a, t, c, g, other or unknown
  misc_feature (842)..(842): "n" may be a, t, c, g, other or unknown
ttgaattcagatgtgcctcagcaacgcccaagtgtagttgtctcaccacattctacaacctctgttatacagggacatcaaatcatagcagttcccgactcaggatcaaaagtatcccattctcctgccccatcatctgacgttcggtctacaaatggcacagcagaatgcaaaactgtaaagaggccagcagaggatactgatagggaaacagncgcaggaattccgaataaagtaggagttagaattgttacaatcagtgaccccaacaatgctggctgcagcgcaacaatggttgctgtgccagcaggagcagatccaagcactgtagctaaagtagcaatagaaagtgctgttcagcaaaagcaacagcatccaccaacatatgtacagaatgtggtcccgcagaacactcctatgccaccttcaccagctgtacaagtgcagggccagcctaacagttctcagccttctccattcagtggatccagtcagcctggagatccaatgagaaaacctggacagaacttcatgtgtctgtggcagtcttgtaaaaagtggtttcagacaccctcacaggttttctaccatgcagcaactgaacatggaggaaaagatgtatatccagggcagtgtctttgggaaggttgtgagccttttcagcgacagcggttttcttttattacccacttgcaggataagcactgttcaaaggatgccctacttgcaggattaaaacaggatgaaccaggacaagccgggaagtcaagaagtcttctaccaaagcagccaactgtangggggcacaaagctcaacttctagagcccaaaaaggncattgngaatcattcccagtggctg

SEQ ID NO: 3248 - DNA, 721 bp, Homo sapiens
  misc_feature (645)..(645): "n" may be a, t, c, g, other or unknown
  misc_feature (712)..(712): "n" may be a, t, c, g, other or unknown
  misc_feature (718)..(718): "n" may be a, t, c, g, other or unknown
agtccccacagctgcgccggtgactgaggggccgggcagtggagaagtggtggcggcgggcggcgggcggcaaaggagcagccatgagggccgggcccagtcaccgaccgtgctgaggagtcatggaagagtttttaaaccagtgtgagccactgccccatgttgtgttgatgccaatctgccatgctagcctgtctaccagggccaggtgacctgtcctttcagcctctttctcacacgcagatgaacactggacttcagaaatgggacactacacagaaaatgagaactgctcactatcctaccccagccgaattggatgcgtatgctaagaaggtcgcaaacaacccactgactataaaaatcttccccaacagtgtgaaggttccccagcggaaacacgttcgtcgtactgtgaacggcctcgacacatcagcccagcgctacagcccctacccgacacaggctgccaccaaggcaggcctgcttgccattgtcaaagtgccagccaaaagcatactcaaggactttgacggcacccgagcccggttgctccctgaggccatcatgaaccccccagtggcaccctatgctactgtggcacccagcactttagcccacccccaggcccaggctctggcccgncagcaggccctgcagcatgcacagaccctggcccatgccccttcccagacgcttgcagcacccttanggtatnccg

SEQ ID NO: 3249 - DNA, 841 bp, Homo sapiens
  misc_feature (689)..(689): "n" may be a, t, c, g, other or unknown
  misc_feature (776)..(776): "n" may be a, t, c, g, other or unknown
  misc_feature (827)..(827): "n" may be a, t, c, g, other or unknown
  misc_feature (829)..(829): "n" may be a, t, c, g, other or unknown
agacgcgcaagggcgccgatggaggcagactcgccagcgggccccggcgccccagagcccctcgcggagggagcggcggccgagttctccagcctgctgcgcaggataaaaggcaaactcttcacctggaatattttgaaaacaattgccctgggtcagacgttgtccttgtgtatatgtgggacagccatcaccagccagtatttggcagaaagatacaaagtgaacacccccatgcttcagagctttatcaattattgcttgctgttcctaatttatacagtgatgctggcatttcgatcaggcagtgataaccttttagtaatcttgaaaagaaaatggtggaagtacatcctgctgggactagcagatgtggaagctaattatgtgatcgtcagagcctaccagtacacaactctaaccagtgtccagcttttggattgctttgggattcctgtgttgatggctctgtcatggtttattcttcatgcaagatacagagtgatccacttcatcgccgtggctgtctgtctgttgggtgtaggaaccatggttggtgcagacatactagcagggagggaagacaattcagggagtgatgtattgattggtgacatcttggtccttcttggggcttccctctatgccatttcaaatgtttgtgaggaatacatcgtgaagaagctgancagacaggagtttttaggaatggtgggcctgtttggaacaattatcagtggtatacagctattgattgtggaatataaggatattgncagcattcattgggacttggaaaattgcctgctgtcgtggcatttgcctgngnatgtttggctgt

SEQ ID NO: 3250 - DNA, 857 bp, Homo sapiens
  misc_feature (755)..(755): "n" may be a, t, c, g, other or unknown
  misc_feature (797)..(797): "n" may be a, t, c, g, other or unknown
  misc_feature (827)..(827): "n" may be a, t, c, g, other or unknown
  misc_feature (855)..(855): "n" may be a, t, c, g, other or unknown
aatagaagatcgctcgggaattcttactctcgataaagattataacaacataggaaaattcttaaatagaattttaggcatggaggtgcatcagcagaatgcgttatttcagtattttgcggacacacttactgcagttgttcaaaatgccaaaaaaaatggaagatatgatatgggaatcttagatcttggttctggagatgaaaaagtgcggaaaagtgatgttaaaaagtttctgactccaggatattcaacctctggccacgtagaattatacacaattagtgtagagaggggaatgtcatgggaggaagctaccaagatttgggctgagctgacaggaccagacgatggcttttacttgtcattgcaaataaggaacaacaagaaaactgccatcttagttaaagaagtgaatcctaaaaagaaacttttcttagtttatcgaccaaatactgggaagcagctcaaattagaaatttatgctgatctaaaaaagaaatataagaaggtcgtctcagatgatgccctgatgcactggttagatcagtataattcatctgcagatacttgtactcatgcttattggcgcggcaattgcaaaaaagcaagcttggggctagtttgtgaaataggtcttcgttgccgtacatattatgtattatgtggttcagtgctgagtgtctggacaaaagttgagggtgtctagcatctgtcagtggcacaaacgtgaagatcagatcgtgcggcttaanaacggaagatgggccaccggattgtagggtttggatcatttnccggcaaaattgggggggctccctcttggnaaatcttcctatcaactttagacccagnct

SEQ ID NO: 3251 - DNA, 754 bp, Homo sapiens
  misc_feature (657)..(657): "n" may be a, t, c, g, other or unknown
  misc_feature (724)..(724): "n" may be a, t, c, g, other or unknown
  misc_feature (742)..(742): "n" may be a, t, c, g, other or unknown
agcattgggatgctgtctatgagagagaactgcaaactttccgagaatatggagatacaggtgaaatctggtttggagaagagagtatgaatcgactaataaggtggatgcagaaacacaagattccactggatgcttcagtgcttgatattggaactggaaatggtgttttcctggttgaacttgcaaaatttggtttctctaatattactggaattgattactctccttctgcaattcagctttctggaagtattatagaaaaagaaggtttatctaacattaagttaaaggtagaagactttttgaatctctccacacagctgtctggatttcatatttgtattgacaaagggacttttgatgccataagccttaatcctgacaatgcaattgagaagaggaagcaatatgtgaaatctctctccagggtgttgaaagtaaaaggcttttttctaataacgtcatgtaattggaccaaggaagagttgctaaatgaattcagtgaaggatttgaacttctcgaagagctaccaacacccaagttcagctttggaggcagatctggaaacagtgtagcagcattggttttccaaaaaatgtgagactttttcttggacgaattcagggagttgaccacatttggccatttcccanaagggccccaccccaagggtgagtggccaatggggagctgtttctgctgacatcaattccccaggangtctcaccccaagtctgnccaagtgaagat

SEQ ID NO: 3252 - DNA, 736 bp, Homo sapiens
  misc_feature (649)..(649): "n" may be a, t, c, g, other or unknown
  misc_feature (653)..(653): "n" may be a, t, c, g, other or unknown
  misc_feature (711)..(711): "n" may be a, t, c, g, other or unknown
agtgctacgcggaggattagagcaggcggtgcgctgggggcgggagcagcgcggagcccggctcggccacaccgatcgcccgccgccatgggctcctcgcaaagcgtcgagatcccgggcgggggcaccgagggctaccacgttctgcgggtacaagaaaattccccaggacacagagctggtttggggcctttctttgattttattgtttctattaatggttcaagattaaataaagacaatgacactcttaaggatctgctgaaagcaaacgttgaaaagcctgtaaagatgcttatctatagcagcaaaacattggaactgcgagagacctcagtcacaccaagtaacctgtggggcggccagggcttattgggagtgagcattcgtttctgcagctttgatggggcaaatgaaaatgtttggcatgtgctggaggtggaatcaaattctcctgcagcactggcaggtcttagaccacacagtgattatataattggagcagatacagtcatgaatgagtctgaagatctattcagccttatcgaaacacatgaagcaaaaccattgaaactgtatgtgtacaacacagacactgataactgtcgagaagtgattattacaccaaattctgcatggggtggagaangcancctaggatgtggcattggatatgggtatttgcatcgaatacctacacgcccatttganggaaggaaagaaaaattctctttca

SEQ ID NO: 3253 - DNA, 655 bp, Homo sapiens
  misc_feature (589)..(589): "n" may be a, t, c, g, other or unknown
  misc_feature (593)..(593): "n" may be a, t, c, g, other or unknown
  misc_feature (621)..(621): "n" may be a, t, c, g, other or unknown
gctgtagaagaggggaggaaacaagccagtgcaaggggagcaaaagagaaaaggagccaggctgggcttcctgatcccacagcatcgcagagctcgggaggcacagctcacagacacaggaaacacaggactgctattctgctctcctgcccacggtgatctggtgccagctggtggaacagtgggtgatggcgtccctgctgcaagaccagctgaccactgatcaggacttgctgctgatgcaggaaggcatgccgatgcgcaagtctcaatctctgatgtggagacaatacgtaatggccatgattccgagttgctgcgtagcctggcagaggagctccccctggagcagggcttcaccattgtcttccatggccgccgctccaacctggacctgatggccaacagtgttgaggaggcccagatatggatgcgagggctccagctgttggtggatcttgtcaccagcatggaccatcaggagcgcctggaccagtatcggcaggatggagtcagggtgggggtgagggatcacgctatccctgaaggagccagatgcaacaggtttaggaaaggcagcagacacgtnccantctggaaccctggaaggagaagaattcntacagttctataaggcattgactaaacgtgctga

SEQ ID NO: 3254 - DNA, 755 bp, Homo sapiens
  misc_feature (665)..(665): "n" may be a, t, c, g, other or unknown
  misc_feature (694)..(694): "n" may be a, t, c, g, other or unknown
  misc_feature (733)..(733): "n" may be a, t, c, g, other or unknown
ccttacaattccagcccctagacatacagtagatgtgcagcttcccagagaagacaaccctgaagaacctagcaaggaaatcacctctcacgaggaaggaggtggagacgtttcacctcgaaaagaacctcaagagcctgaggtttgccccacaaagattaagccgaacctgagcagctcccctaggtcagaggaaacgacagcctccagcctggtgtggcctctccctgctcaccttcctgaagaggacctgccagaaggtggctccacagtctcagctcccacagcaagtgggatgtcttctcctgaacacaaccaaccaccagttgcactgttggatacggaggagatgagtgtaccccaggactgtcacctccttccctccactgaaagcttttccgggggagtcagtgaagatgtcatttctaggcctcattctcctcctgaaatagtcagtagagaagaaagtcctcagtgctcagaaaatcagagttccccaatgggcttggagccccccatgagtctgggaaaggctgaggacaaccaaagcatcagtgctgaggttgagtctggagacacccaggagctaaatgtcgacccactcttgaaggaaagcagcacttttactgatgaaaaccccagtgaaactgaggaaagtgaggcancaggtggtataggaaaattagagggagangaccgtgatgtaaaatgcctgtcagaaaaaagacacctntgatacaagcattgcttactcc

SEQ ID NO: 3255 - DNA, 834 bp, Homo sapiens
  misc_feature (710)..(710): "n" may be a, t, c, g, other or unknown
  misc_feature (771)..(771): "n" may be a, t, c, g, other or unknown
atatgatccgctcggcttcctgggtctggctgctgccgcccgccggtgtccgcccgtgtcgcgccggggcaccaaggagccgttggagggtccgggcggaggcccgctcgtgtggaagtcgtcgacgccgccgctcgtccgtcctcccgtccgttctcgctcccggccgccatcatgctggcgctcatctcccgcctgctggactggttccgttcgctcttctggaaggaagagatggagctgacgctcgtggggctgcagtactcgggcaagaccaccttcgtcaatgtcatcgcgtcaggtcaattcagtgaagatatgatacccacagtgggcttcaacatgaggaaggtaactaaaggtaacgtcacaataaagatctgggacataggaggacaaccccgatttcgaagcatgtgggagcggtattgcagaggagtcaatgctattgtttacatgatagatgctgcagatcgtgaaaagatagaagcttcccgaaatgagctacataatcttctagataaaccacagttacaaggaattccagtgctagtgcttggaaacaagagagatcttcctaatgccttggatgagaaacagctaattgaaaaaatgaatctgtctgctattcaggatagagaaatttgctgctattcaatttcttgcaaagaaaaggataatatagatatacacttcagtggcttattcancattcaaaatctagaagaactgaacatctttgaatcttcagtccttcttgctataatctanatattgccgttctctaataatccaaatacggccttctaacccaaaaatgcttttaggctattt

SEQ ID NO: 3256 - DNA, 658 bp, Homo sapiens
  misc_feature (628)..(628): "n" may be a, t, c, g, other or unknown
  misc_feature (641)..(641): "n" may be a, t, c, g, other or unknown
  misc_feature (657)..(657): "n" may be a, t, c, g, other or unknown
gtttggcgttgcagctgtgtgggcgctggtgcgtgcgagtagcgctcgaagaaacccaaaggcgtcgtggggctgccgtgtgccccagagagcactgcaggccgggtaggggctaaggctccccgcagtcttctgtgtgtcgtccagtacgcagttgaaatcgttctccaacctggccagtcctccgaggcccttctcaggcgaccagactctgttaacagagtccattgctaaaactcctcgttagtatttaccactcctccagtctgtgttttgaagcagtggttttcaaccactgcccgttttcagaagaaatcatctcaagcgtccgtgtgctgctagaagccgggccgggaggtcttggtgccggactccaccctgcagcccttccctttcgccaccgccctgtgcttagagaaaccttagagtggagcaatgagtcgcccttgactgagtaactcttcggggtcaacttctccttccacgccaaggaaaggattccagggcgatgtttctggaaatagagatctgaccaagccactgctctggtgaaaattcagtgggtccctagcacctagtgcagcggctcctagcctgagtattgccgtctttcggtggggaggggttngggttttttgtancatctgttgatctgant

SEQ ID NO: 3257 - DNA, 710 bp, Homo sapiens
  misc_feature (681)..(681): "n" may be a, t, c, g, other or unknown
  misc_feature (702)..(702): "n" may be a, t, c, g, other or unknown
  misc_feature (707)..(707): "n" may be a, t, c, g, other or unknown
ggacagtgtttctcgatcagaaattgccttgggttgcaaagacctcaatcatgtcagcttatcttctttgataccagaactagatgtcacctccgaatatattaattcagacactcttgtcagagagataaacaagcatacatctccagaagaatataatctaaatttatttctgcaagaaaaaaaacacataaacctgactaaactcggcttaaatgtacaaaaacatcctggaaatgagaaagaagattcactacaatatttggccaataagaaatatacacaaggccggggaagccacagccaagaaatgaggtacaatcgacaaaacagatggaaacggcagaactttcatgagtttcctcctttgtttgctttcccgagtctcagccaaacggatctggaagaacttacttattttttcccagaggaccatgctgaggatgtacagcaagagtttttcccctcttggcccactccctctggcctcaccgagtatagcaccttgaccctctgtcaggagactctagccaactccagcataggaaggctgtgtcttgcttttcttggcaagagattagacagtgttatagagatgtgtgtgaaggatgttctgttaaaagatgatcttagttgggcagaaacaggtgtggcccttttagaaaatgaatgtgaaaagangattgtggaggaagggaaatntaacncaa

SEQ ID NO: 3258 - DNA, 826 bp, Homo sapiens
  misc_feature (777)..(777): "n" may be a, t, c, g, other or unknown
  misc_feature (804)..(804): "n" may be a, t, c, g, other or unknown
  misc_feature (817)..(817): "n" may be a, t, c, g, other or unknown
gttgggggtcaggtgccggaagaggaaacctctcgctggggctaggagttcggcggggcgcgcgccggcggctgcggagctggcaggtgcgaagcgtctgcacctggcgggcgatggcgcccgatgcgggcgccccgggatagcgtgggcgaggctgcggggccccggcgcgcacgcccgcacctctccccagccctggcgtgggcccagcccggcccaggcagcaatggggttcctgcagctgctggttgtagcggtgctggcatccgaacaccgggtggctggtgcagccgaggtcttcgggaattccagcgagggtcttattgaattttctgtggggaaatttagatacttcgagctcaataggccctttccagaggaagctattttgcatgatatttcaagcaatgtgacttttcttattttccaaatacactcacagtatcagaatacaactgtttccttttctccgactctcctttccaattcctcggaaacaggcactgccagtggactggttttcatccttagaccagagcagagtacatgcacttggtacttggggacttcaggcatacagcctgtccagaatatggctatcctactctcctactcagaaagagatcctgtccctggaggctgtaatttggagttcgatttagatattgatcccaacatttacttggagtataatttctttgaaacgactatcaagtttgccccagcaaacctaggctatgccaaaaggcgtagaatcccccaccatgtgaacgcttnggacaagacccaaggactttccaggtnggaaggttgccantattgaagg

SEQ ID NO: 3259 - DNA, 842 bp, Homo sapiens
  misc_feature (795)..(795): "n" may be a, t, c, g, other or unknown
  misc_feature (819)..(819): "n" may be a, t, c, g, other or unknown
  misc_feature (832)..(832): "n" may be a, t, c, g, other or unknown
aatgcctcatgccccagttcagcaaaaggaggaaaatgtgcctgcctcacagtcatcagtctttttaaatcttttttgttgttgttcttaagggtttgaatttgtctgcattccttgtctttaggggaaattcccttttcatattgtgtgcttcccaaagctatagtcatagatttcttccagaaactattgtcataattgtcactggagtgcttaaatatacgtactatactgacaaaatacatggaagtgagttataatgaggcagaaacaaaatcctcggtaacattgatgatactctaccgatcaccgtggttttggaaagtcagtcaacagttgtattattgcactcaatttcattgtgacattttatttaacttcttcatcttggtggtccttgcccagttattttgcctcattagacatcaagaaatggagaaagactgaaagttaatatcttaagtgcttgttcttcatgtttccttcttgttatttatgctattctctttgtggctccattcttctttcaatcttctcagcttataaccgtctttcccttatgctaaggatagcccttacactcatcccatctatgctgtcaagggctgctggttggtgctggtacaaggagcccactcagcagttttcttacctttgcctgccctgcctttcatggaataagaaaggcaacgttttgcagcttccaaatttctgaagaaactaatctcagattggcagttaaagtcaaaatgttgccaaatatttattccttttgcctaagtttggctacccggntcaattgctttttatttttaatgncttgactcttcanagttcgtacc

SEQ ID NO: 3260 - DNA, 843 bp, Homo sapiens
  misc_feature (843)..(843): "n" may be a, t, c, g, other or unknown
agaagcgggcggcgcgggggagatgcataagcttaaatcgtctcagaaggacaaggtccgccagtttatggcgtgcactcaggctggcgagagaactgctatctactgcttaacgcagaatgagtggagactagacgaggccacggacagcttcttccaaaacccagactcgctccacagggagtccatgcggaacgctgtggacaagaagaagctggagcggctgtacggcaggtacaaagatccacaagatgaaaacaaaattggagtcgatgggattcaacagttttgtgatgatctgagcctggatcctgccagtatcagtgtattggtcatagcgtggaagttcagggcagcaactcagtgtgaatttagcagaaaggaatttctagatggcatgacagaacttgggtgtgacagcatggagaagctaaaggctcttctgccaagactggagcaggagctgaaggacacagccaagtttaaagatttttatcagtttaccttcaccttcgctaagaacccagggcagaaaggtttaggttcacctccatttctcaatgtgaaagctttacatcattaagatgagttgaatatagatttcaattaatgttcttcctaagtgataaggatgtagacttataagcaggacaagactaatcatcttcttagcattttactgcgggtcccatcgacttagaaatggctgttgcgtattggaaattagtgttatctggaaggtttaaatttttagatctctggacacattcttaatggaacatccaaaagatcaatttcaagggacacctggaaccttctgctggactttggaaacatgattgn

SEQ ID NO: 3261 - DNA, 761 bp, Homo sapiens
  misc_feature (687)..(687): "n" may be a, t, c, g, other or unknown
  misc_feature (702)..(702): "n" may be a, t, c, g, other or unknown
  misc_feature (735)..(735): "n" may be a, t, c, g, other or unknown
ccatatgccgccccggagctgtttcagggcaagaagtacgacgggccggaggtggacatctggagcctgggagtcatcctgtacaccctcgtcagcggctccctgcccttcgacgggcacaacctcaaggagctgcgggagcgagtactcagagggaagtaccgggtccctttctacatgtcaacagactgtgagagcatcctgcggagatttttggtgctgaacccagctaaacgctgtactctcgagcaaatcatgaaagacaaatggatcaacatcggctatgagggtgaggagttgaagccatacacagagcccgaggaggacttcggggacaccaagagaattgaggtgatggtgggtatgggctacacacgggaagaaatcaaagagtccttgaccagccagaagtacaacgaagtgaccgccacctacctcctgctgggcaggaagactgaggagggtggggaccggggcgccccagggctggccctggcacgggtgcgggcgcccagcgacaccaccaacggaacaagttccagcaaaggcaccagccacagcaaagggcagcggagttcctcttccacctaccaccgtcagcgcaggcatagcgatttctgtggcccatcccctgcacccctgcaccccaaacgcagcccgacgagcacgggggaagcggagctgaangaagaaccggcttgncaggcccggaaaggcgaacttgcaacacccgcnggggagttgggaagtcgaagggcttg

SEQ ID NO: 3262 - DNA, 776 bp, Homo sapiens
  misc_feature (680)..(680): "n" may be a, t, c, g, other or unknown
  misc_feature (740)..(740): "n" may be a, t, c, g, other or unknown
  misc_feature (769)..(769): "n" may be a, t, c, g, other or unknown
cattataaatcccagtagcagtctgctggccagccaagatgagacaaagttgcctaaaatagacttttttgactattctaaattgacccctcttgaccagcgctgcttcatccaagctgctgacctcctcatggccgacttcaaagtgctcagtagtcaggacatcaagtgggccctgcacgagctcaaaggacactatgcaatcacccgaaaggccttgtctgatgccattaaaaaatggcaggagctgtcaccagaaaccagtggaaaaaggaagaagagaaaacaaatgaaccagtattcttacattgattccaagtttgaacaaggtgacataaaaatagaaaagaggatgttctttcttgaaaataagcgacgacattgtaggtcctatgaccgacgtgctctccttccagctgtgcaacaagagcaggagttctatgagcagaaaatcaaagagatggcagagcatgaagactttttgcttgccctacagatgaatgaagaacagtatcaaaaggatggccagctgattgagtgtcgctgctgctatggggaatttccattcgaggagctgacgcagtgcgcagatgctcacttgttctgcaaagagtgtctcatcagatatgcccaagaggcagtctttggatctggaaagttggagctcagctgcatggaangcagcttgccgttgttcgttcccaaccagtgagctggaaaaggtgctcccccagaccatnctgtataagtactatgagccaaaaagccnaggaaga

SEQ ID NO: 3263 - DNA, 768 bp, Homo sapiens
  misc_feature (704)..(704): "n" may be a, t, c, g, other or unknown
  misc_feature (714)..(714): "n" may be a, t, c, g, other or unknown
  misc_feature (766)..(766): "n" may be a, t, c, g, other or unknown
caaagaatgctaatgcttagcacttgctgttgagcatgctctaacttttaaagccctggcctcctgtctccttagctgcttagctacgcggcctagcagatcatcacccatcagtaatcctgtggctagatccaggggaaaattgtttatgtccaggccccacccctgtcactcataaataccccttgtgggggtggaattttagtgttttcagctaagaaaaccacattttctctttccttgcctctctgctaggactgtgagcatctcatagtccactccctaaacactttctggtaacacctagttttccgcctgagggtcagaggctagaatcattgcctgcacagcaggactaccttggttcttaaaacttggatcacccaggcaaggcgtggtggctcacgcctgtcatctcagcactttgggagactgaggctggtggatcacttgaggccacgagtttgagaccagcctgaccaacgtggtgaaaccccatctctactaaaaatacaaaaattagccaggcgtggtggtgggcacctgtaatcccagctacttgggaggctgaggcaggagaatcccttgaacccaggaggcggaggttgcagtgagcagagatggtgccgctgcagtccagcctgggtgacagagcgagactctgtctcaaaacaaaacaaaaaccacacacacatacagaaatnaagagaaatnatcaactagaaaaaaaacaaaacttggatcacccagaaagagcgtcacagangc

SEQ ID NO: 3264 - DNA, 840 bp, Homo sapiens
  misc_feature (44)..(44): "n" may be a, t, c, g, other or unknown
  misc_feature (581)..(581): "n" may be a, t, c, g, other or unknown
  misc_feature (639)..(639): "n" may be a, t, c, g, other or unknown
  misc_feature (661)..(661): "n" may be a, t, c, g, other or unknown
  misc_feature (764)..(764): "n" may be a, t, c, g, other or unknown
  misc_feature (819)..(819): "n" may be a, t, c, g, other or unknown
  misc_feature (828)..(828): "n" may be a, t, c, g, other or unknown
gaagctctcctgtttgacgaaagtatgtctcaggaaggtgcggncccagctagcgcggttcccctggaagaattaagtagctggccagaggagctatgccgccgggaactgccgtccgtcctgccccgactcctctcattgtctcaacattctgaaagttggattgagcatattcactgtgaaattattcgatgacatgatgtatgaattaaccagtcaagccagaggactgtcaagccaaaatttggaaatccagaccactctaaggaatattttacaaacaatggtgcagctcttaggagctctcacaggatgtgttcagcatatctgtgccacacaggaatccatcattttggaaaatattcagagtctcccctcctcagtccttcatataattaaaagcacatttgtgcattgtaagtttcagaccttctccaggctcttttcaaggaggcctattctcttcaaaagcagttaatggaactgctggacatggtttgcatggaccctttagtagatgacaatgatgatattttgaatatggtaatagttattcattctttattggatatctgctctgntatttccagtatggaccatgcatttcatgccaatacttggaagtttataattaagcanagccttaagcaccagtccatantaaaaagccagttgaaacacaaagatataattactagcttgtgtgaagacattcttttctacttccattcttgttacagttagctgagcagatgacacagtcngatgcacaggataatgctgctacagattatttcagaaaacactcaaattgggtcntttttttgncaactccctttg

SEQ ID NO: 3265 - DNA, 846 bp, Homo sapiens
  misc_feature (779)..(779): "n" may be a, t, c, g, other or unknown
  misc_feature (803)..(803): "n" may be a, t, c, g, other or unknown
  misc_feature (846)..(846): "n" may be a, t, c, g, other or unknown
atgaggcttcagaggagaataatgaccagcaatcacaagaagttccagaaaaagtaactgtatccagtgatcatgaggaagtagacaatccagaagaaaaaccagaagaagagaaagaagaggttatagatgaccaggagaacctagctcatagcaggaggaccagggaagatagaaaggtagaagccatcatgcatgcttttgaaaacttagagaaaagaaagaagcggcgggatcagcccttggaacagagcaactctgatgtagagattactacaaccacctcagagactcctgttggtgaagagacaaaaactgaagcccctgaatctgaagttagcaactctgtttcaaatgttaccatcccaagcaccccacagagtgttggtgtgaatacccggaggtcttcccaagcaggggatattgctgcagaaaaactagtccccaagccacctccagcaaagccttctaggccccggccgaagagtcgaatttctcggtacaggaccagttcagcccaaagactaaagcgtcagaagcaggccaatgcacagcaggcagaattgtcacaagctgccttggaagagggaggaagtaacagtttagtaactcctactgaagctggaagtctagacagttcaggagaaaacaggccattaacagggtctgacccaactgtggtgtcaattactggatcccatgtcaacccgtgctgcatctaaatccccaaaaccaaaaagtatctagttacagaatggttgaatgacaaagcagagaancaggaatgccctgttgagtgcccnttacgtatcacaacggatccaactgtctgcaacgacccttaan

SEQ ID NO: 3266 - DNA, 872 bp, Homo sapiens
  misc_feature (756)..(756): "n" may be a, t, c, g, other or unknown
  misc_feature (768)..(768): "n" may be a, t, c, g, other or unknown
tgcattttataaattagtgattattgttagttgaatgatctataagtaaaatccttgcacatgcattcaacagaatacactaggatagaaaatttctgaaaggtataccagaagctatacatggtggtccctagagagtgcagctaggtgtggggaggaagcagacttattttactttatgccagttagtgccctttgaaatggtcttaaacagaaatagtgtattactgtaataattatagtgaagtactgcacttgggcaggatattcccttccagggctcctaccctctcctgattttgcatccagggacgtcctctgtgcttttgaatgtattaaggagtgacgtacggctggattcactctgatctcattcactgacagtggtgggagagcccagagctgagtagaaactggttctggggcatcgtgtggctagggtgccaaagccgagaaaggtcccgtagtccctgtgtggtcagcagggaaggcagcagtgctctgtcagtattgattcttcaggggcaggctgcccacttaccaaagttatgcttagcagaggggctctggctcactccccgtccctcatcctaccaggtgtgaggctgccaggagcccgatcgcacaaggcttggcaaggcagatgctccccagctcctgacatcagagagaagggctgggattgtggcctgccggttggtgggcaaggagagcctggtctgatgacagcaaccaccctttgactaccttctctgnggctggtactgnctgattccaacctttcactgttgaacagaccttctaccacttttcctactacttcccctaatgataacatactgaactcacttttatgaatttggtgagacctt

SEQ ID NO: 3267 - DNA, 844 bp, Homo sapiens
  misc_feature (2)..(2): "n" may be a, t, c, g, other or unknown
  misc_feature (654)..(654): "n" may be a, t, c, g, other or unknown
  misc_feature (793)..(793): "n" may be a, t, c, g, other or unknown
  misc_feature (800)..(800): "n" may be a, t, c, g, other or unknown
  misc_feature (836)..(836): "n" may be a, t, c, g, other or unknown
gnaagtaagaaacttttaaaactaaaatctgaaatggaggaaaaagtatacaacttgacaagagaaagagatgagttgataggcaaattgaaaagtgaagaagaaaaatcctctgaattaagctgcagtgttgacttactaaagaagagacttgatggtatagaggaagtggaaagagaaataacaagaggaaggtcacgaaaagggtctgagctcacctgcccggaagataataagattaaggaactaacacttgaaattgagagactgaagaaacgtctccaacaattggaagtggtcgaaggggatttgatgaagacagaagatgagtatgatcagctggaacagaaatttagaactgagcaggataaggctaacttcctctctcaacaactagaggagatcaagcaccaaattgccaagaataaagcaatagagaagggtgaggttgtgagccaggaagctgaactgagacacagatttcggttggaagaagctaaaagtcgagacttaaaagccgaagtacaagctcttaaagagaagattcacgaattaatgaacaaagaagatcagctttctcagctccaggtagattattctgtacttcaacaaagatttatggaagaagaaaataagaacaaaaacatggggcangaggttctcaatctgaccaaagagttggagctttccaagcgctacagcagagctcttagcccagtgtgaatggaagaagaatggtggatgttcctgtgacgtcaactggagtccaaactgatgcagtccagcggtgaancacagangaagaaacgccagctgtattcatacggaaatccttncaggaaga

SEQ ID NO: 3268 - DNA, 726 bp, Homo sapiens
  misc_feature (670)..(670): "n" may be a, t, c, g, other or unknown
  misc_feature (721)..(721): "n" may be a, t, c, g, other or unknown
  misc_feature (725)..(725): "n" may be a, t, c, g, other or unknown
aaaaaaaaaaaaaaaaccggctcgcggcgcgtggaggctgctcccagccgcgcgcgagtcagactcgggtgggggtcccggcggcggtagcggcggcggcggtgcgagcatgtcgtggctcttcggcattaacaagggccccaagggtgaaggcgcggggccgccgccgcctttgccgcccgcgcagcccggggccgagggcggcggggaccgcggcttgggagaccggccggcgcccaaggacaaatggagcaacttcgaccccaccggcctggagcgcgccgccaaggcggcgcgcgagctggagcactcgcgttatgccaaggacgccctgaatctggcacagatgcaggagcagacgctgcagttggagcaacagtccaagctcaaagagtatgaggccgccgtggagcagctcaagagcgagcagatccgggcgcaggctgaggagaggaggaagaccctgagcgaggagacccggcagcaccaggccagggcccagtatcaagacaagctggcccggcagcgctcgaggaccaactgaagcagcagcaacttctcaatgaggagaatttacggaagcaggaggagtccgtgcagaacaggaagccatgcggcgagccaccgtggagcgggagatggagctgcggcacaagaatgagatgctgcnagtggaagccgaagcccgggcgcgcgccaaaggccaaacgggagaatgccngacnt

SEQ ID NO: 3269 - DNA, 704 bp, Homo sapiens
  misc_feature (656)..(656): "n" may be a, t, c, g, other or unknown
  misc_feature (672)..(672): "n" may be a, t, c, g, other or unknown
  misc_feature (677)..(677): "n" may be a, t, c, g, other or unknown
atgttcatcttttgtaaagttaaaaaaaaaaaaaaaagccagcctccaaggctgagaatcgatattaatttcatgggcttatgggcagtgagataaagcaggtttctggcagccctttccagccctattggattttacaatcttgaactgtgaagacagcgaataaaggtatcaagggctctgcccgtctccagctgtctcgggccagagctcatccaaatcccccaccttccatcccagcctgcagccctctgaaaggcaggttggatggcaagaaatgtcagcttgagccctcgaagacggctcactacaaggacagttgggattgtggctttaggagggatttatgcagctcctctggggcaggtgaggaccacggggtcatgctagagagtcagctcaacgtggctgcctgggacacgtctatgtgccagagggcagccaaggggatgactgactctacatctggttttagaccagggctgctcgtccgggcaccattgaggtagggcaagaatgggctcagcgtgctggggaccatcctcctctgcaaccctgccctccctgcatttacgagcccgtgcgtggcactgcccgcaccagctagcctgggcatcttccctctgtgtgatccatttcagggcctgttgcttggnctttctgaaactccancttcntgggggtgacccacacaagtgaacctt

SEQ ID NO: 3270 - DNA, 741 bp, Homo sapiens
  misc_feature (15)..(15): "n" may be a, t, c, g, other or unknown
  misc_feature (52)..(52): "n" may be a, t, c, g, other or unknown
  misc_feature (104)..(104): "n" may be a, t, c, g, other or unknown
  misc_feature (492)..(492): "n" may be a, t, c, g, other or unknown
  misc_feature (658)..(658): "n" may be a, t, c, g, other or unknown
  misc_feature (669)..(669): "n" may be a, t, c, g, other or unknown
  misc_feature (709)..(709): "n" may be a, t, c, g, other or unknown
gttaaaagagcccgnctctccctcggccggtcactctttcgccacgggcggnagttgcaccatccggcagggcggggcccggccatggcgaccgcggagcccancgggcgcgcgttgcggttgtctaccccgggaccccggcccagcggggctcgggaccgcgcgccgggagctgcggggccaccctccgggcagatcggtaatagagccctccgtctgggggagcgcacccccgcggccgtggaaaagcgggggccatacatggtgacgcgcgcaccctccattcaagccaagctgcgtcagtgaagtttaacaagggctatactgctcttagccagagtccagatgaaaacctggtgtccctcgactctgacagtgatggggagctgggatccagatactcctccgggtattcatctgcagaggtgaaccaggatgtgagccggcagctgcttcaggatgggtatcacctggatgagattccagatgacnaggacttggacctcatcccccctaagcccatggcctcttcaacatgctcctgctgctggtgctgtcttggggactcttcttcctgtacccttcagtagacattacccttcaaggtgggccctgctcaccatgaggcctacagagccctgttggccactcatagctnacacagtgcantgagcactgaagtcactgacccctagaaagtgacctgcangtagccccttacctggtgcttctcaggccaga

SEQ ID NO: 3271 - DNA, 855 bp, Homo sapiens
  misc_feature (772)..(772): "n" may be a, t, c, g, other or unknown
  misc_feature (816)..(816): "n" may be a, t, c, g, other or unknown
  misc_feature (850)..(850): "n" may be a, t, c, g, other or unknown
cttcaggctgaggaggacttgctcaggccgattccaaacattgtgctcgttcaatgcgtagaaatgatttgcatgatggcatgccgtgatcagaagtcatgcatgagatccatacaccacaggacactactaatctagtcccttgcactgggtcagcctttggacaggacccagccctgcaccgttcactgtatttggagaaaatggtaagagttccataccggctacaattctttgagttcttaatagtccttcatacaccttctgggtagggaaacaaccaactaattgactaacaccaccaacaacaaaaaacaaacccaatccaacaagcagatggatccgttgcgtgtatatgtttaacagacatctctaacatacagccattgttgcacattttgcaagatgaactatttaatgctgctctgtgtccagtacatgggggagactttgatcccaaatggcttgtactatttatgtcactgtaaaaccaaatcctagggctaaaaaaaaaattcatttgtatcttgcaatatttatgacgatcgtttagccttcatactggagaattgacacttatttggggtagagataaaagtgcttttcaaagtagcaccagttatctctaggggtaatttggggaacttaaaatgacctttcattgggagttatggggtgctcatttcatttcgtatcatgtcctctgcattgtggctttctccaggcatgggtcgataccgcgaggggttcaaatattctgaactaacctctntcttctgcaaaagggtcattcgcatacttacacacttgcatggnttcccctgcttccatacatttcttcactgagcanggctt

SEQ ID NO: 3272 - DNA, 774 bp, Homo sapiens
  misc_feature (248)..(248): "n" may be a, t, c, g, other or unknown
  misc_feature (272)..(272): "n" may be a, t, c, g, other or unknown
  misc_feature (293)..(293): "n" may be a, t, c, g, other or unknown
  misc_feature (530)..(530): "n" may be a, t, c, g, other or unknown
  misc_feature (558)..(558): "n" may be a, t, c, g, other or unknown
  misc_feature (599)..(599): "n" may be a, t, c, g, other or unknown
  misc_feature (694)..(694): "n" may be a, t, c, g, other or unknown
  misc_feature (705)..(705): "n" may be a, t, c, g, other or unknown
  misc_feature (728)..(728): "n" may be a, t, c, g, other or unknown
aagtgctggtgccctctgccgctgctcccgtctctttggctacgctcgtcagccggtcggccggcgcctccagccgtgtgccgctatgggagtcccggcgttcttccgctggctcagccgcaagtacccgtccatcatagtcaactgcgtggaagagaagccaaacgaatgcaatggtgtaaagattccagttgatgccagtaaacctaatccaaatgatgtggagtttgataatctgtatttggatntgaatggaatcatccatccctgtnctcatcctgaagacaaaccancaccaaaaaatgaagatgaaatgatggttgcaatttttgagtacattgacagacttttcagtattgtaagaccaagaagacttctctacatggcaatagatggagtggcaccacgtgctaaaatgaaccagcagcgttcaaggaggttcagggcatcaaaagaaggaatggaagcagcagtcgagaagcagcgagtcagggaagaaatattggcaaaaggtggctttcttcctccanaagaaataaaagaaagatttgacagcanctgtattacaccaggaactgaattcatggacaatcttgctnaatgccttcgctattacatagctgatcgtttaaataatgaccctgggtggaaaaatttgacagttattttatctgatgctagtgctctggtgaangagaacataanatcatggattcatttgaaggcanagagcccacctaaccatgacccaaatactcatcattggttaatgtg

SEQ ID NO: 3273 - DNA, 728 bp, Homo sapiens
  misc_feature (656)..(656): "n" may be a, t, c, g, other or unknown
  misc_feature (688)..(688): "n" may be a, t, c, g, other or unknown
  misc_feature (690)..(690): "n" may be a, t, c, g, other or unknown
aatcgagcgccgagagagcgagtcggtgctactggcgtcgggtcggtccgggtaggcgcagcgggactggacctgggtgccgagcggagccgctgccatgggcctgggcgtcagcgctgagcagcccgcaggcggcgccgagggcttccacctccacggggtgcaggagaactccccagcccagcaggcgggcctggagccctactttgacttcatcatcaccattgggcactcgaggctgaacaaggagaatgacaccctgaaggcactactgaaagccaatgtggagaagcccgtgaagctggaggtgttcaatatgaagaccatgagggtgcgcgaggtggaggtggtgcccagcaacatgtggggcggccagggcctactgggtgccagtgtgcgcttctgcagcttccgcagggccagtgagcaggtgtggcatgtgctggatgtggaaccatcttcacctgctgcccttgccggcctgcgcccctacacagactatgtggttggttcggaccagattctccaggagtccgaggacttctttacgctcatcgagtctcatgaggggaagcccttgaagctgatggtgtataactccaagtcagactcctgccgggaggtgactgtaactcccaacgcagcctggggtgganagggcaggtacttcgtggggttggagggctgnanggccaggtgggttggggcctgacattgggcatggacct

SEQ ID NO: 3274 - DNA, 834 bp, Homo sapiens
  misc_feature (662)..(662): "n" may be a, t, c, g, other or unknown
  misc_feature (668)..(668): "n" may be a, t, c, g, other or unknown
  misc_feature (798)..(798): "n" may be a, t, c, g, other or unknown
  misc_feature (827)..(827): "n" may be a, t, c, g, other or unknown
  misc_feature (830)..(830): "n" may be a, t, c, g, other or unknown
ttttccgccatctttccgcgccgccacaatggtgcgcatgaatgtcctggcagatgctctcaagagtatcaacaatgccgaaaagagaggcaaacgccaggtgcttattaggccgtgctccaaagtcatcgtccggtttctcactgtgatgatgaagcatggttacattggcgaatttgaaatcattgatgaccacagagctgggaaaattgttgtgaacctcacaggcaggctaaacaaggttggagtgcagtggcacgatcttggctactgcaacctctgtctcccaggttcaagcgattctcctgcctcagcctccctagtagctgagattacagtgtggggtgatcagccccagatttgacgtgcaactcaaagacctggaaaaatggcagaataatctgcttccatcccgccagtttgggtaagttggcctttccttaattaaaagaagttaatgctaagaatttctgtggtgcagtttgacttaagggtttttttctttttttctgtttaaaacaaagcagtggtaatttgtctactcttaaccattttgacctaatagctcaagtgttatccatatttcttttctctctctttaaaaagagacagggttggccaggcacagtggctcacgcctgtgatcctagcattttggggangctgangcaggcggatcacctgaggttgggagttcgagaccaccctgccaacatggagaaccccgtgtctacctaaaatccaaaattagccagcctggtggcacacacctgtgatcccaactacttgaaaggttangcaggaaatacttgaccccggaaaaggtncgngact

SEQ ID NO: 3275 - DNA, 780 bp, Homo sapiens
  misc_feature (648)..(648): "n" may be a, t, c, g, other or unknown
  misc_feature (668)..(668): "n" may be a, t, c, g, other or unknown
  misc_feature (710)..(710): "n" may be a, t, c, g, other or unknown
  misc_feature (760)..(760): "n" may be a, t, c, g, other or unknown
  misc_feature (772)..(772): "n" may be a, t, c, g, other or unknown
aaaaaaaaaaaaaaaacttctacaagtatggagaaggcaaaaggcaaggagtggacctccacagagaagtcgagggaagaggatcagcaggcttctaatcaaccaaattcaattgctttgccaggaacatcagcaaagagaaccaaagaaaaaatgtctgtcaaaggcagtaaagtgctctgccctaagaaaaaggcagagcacactgacaaccccagacctcagaagaagataccaatccctccattaccttctaaactgccacctgttaatctgattcaccgggacattctgcgggcctggtgccaacaattgaagctgagctccaaaggccagaaattggatgcatataagcgcctgtgtgcctttgcctacccaaatcaaaaggattttcctagcacagcaaaagaggccaaaatccggaaatcattgcaaaaaaaattaaaggtggaaaagggggaaacgtccctgcaaagttctgagacacatcctcctgaagtggctcttcctcctgtgggggagccgcctgccctggaaaattccactgctctccttgagggagttaatacagttgtggtgacaacttctgccccagaggctttgctggcctcctgggcgagaatttcagccagggcgaggacaccagangcagtggaatctcccaagangcctttggtgtcaagtggtgtgtggtccatgggaaaagtctnccttgcagacacagatggttgggttcacctgcagtttcatgctggtcaancctgggttccanaaaagcca

SEQ ID NO: 3276 - DNA, 790 bp, Homo sapiens
  misc_feature (640)..(640): "n" may be a, t, c, g, other or unknown
  misc_feature (696)..(696): "n" may be a, t, c, g, other or unknown
  misc_feature (703)..(703): "n" may be a, t, c, g, other or unknown
  misc_feature (790)..(790): "n" may be a, t, c, g, other or unknown
tagcaaaaaactctccaagaagcgcgctgcgaccaccgtcttacaggagcttaaaaaacttccacctcttcctgtggtggaaaagccaaaactattttttaaaaaacgccctaaaacaatagtaaaggccggaccagaatatggccaagggatgaaccctattagccgcctggcgcaaattcaacaggccaaaaaggaaaaggagccggattatgttttgctttcagaaagaggaatgcctcgacgtcgagaatttgtgatgcaggtgaaggtaggcaatgaagttgctacaggaacaggacctaataaaaagatagccaaaaaaaatgctgcagaagcaatgctgttacaacttggttataaagcatccactaatcttcaggatcaacttgagaagacaggggaaaacaaaggatggagtggtccaaagcctgggtttcctgaaccaacaaataatactccaaaaggaattcttcatttgtctcctgatgtttatcaagagatggaagccagccgccacaaagtaatctctggcactactctaggctatttgtcacccaaagatatgaaccaaccttcaagctctttcttcagtatatctcccacatcgaatagttcagctacaattgccagggaactncttatgaatggaacatcttctacagcttgaagccataggtttaaaaggaagttctnctacttncccttggtcttcagtacaacctttaaaacaactggaatatttagcaaggattcaaggctttcaggtgtgaattaaaagcaaaaaccn

SEQ ID NO: 3277 - DNA, 638 bp, Homo sapiens
  misc_feature (604)..(604): "n" may be a, t, c, g, other or unknown
  misc_feature (624)..(624): "n" may be a, t, c, g, other or unknown
  misc_feature (631)..(631): "n" may be a, t, c, g, other or unknown
caaaaaaaaaaaggacctaggcgcggtagctggggctggcttttgaggggcgcgggcagccttctgactgggtcggaggcctgcgggcccgaagcctctgtccctcctgttcttgtccggcgctgcttagcccctccgcgtagtcatcatggatctgattttaaaccgaatggattatctgcaggtgggagtaacatctcagaagactatgaagctaattcctgcctcaagacacagagctacacaaaaggtggttattggagatcatgatggggtagttatgtgctttggcatgaagaaaggagaagcagcagcagtgttcaagactttacccgggccgaagattgcaaggctggaactgggaggggttatcaacacacctcaggagaaaatttttattgctgcagcatctgagattagaggcttcacaaaaagaggaaaacagttcctctcctttgaaacaaacctcactgaaagcattaaagctatgcacatatctggctcagacctctttctcagtgcaagttacatctataaccattattgtgactgcaaagaccaacattattacctttctggggataaaatcaatgatgtgatctgnctttcaatggaaagaatatntcgtatnacacctg

SEQ ID NO: 3278 - DNA, 703 bp, Homo sapiens
  misc_feature (675)..(675): "n" may be a, t, c, g, other or unknown
  misc_feature (684)..(684): "n" may be a, t, c, g, other or unknown
  misc_feature (686)..(686): "n" may be a, t, c, g, other or unknown
agaccactttcttcattcttttctaaactgctgcagattgccgtgaactctatcaatagtctcttttccgcaggcaaagtggcattttctaaacatgtttgcttactgccaggtggtttgaaatctatgatttactgcagtagtatgtgcttaaaacaactgttgaggtcttttaagcaggaaagttcaaaaggaagtgtcctgataatggtactggtttttctacaaatataagtagtcattagaagtttgcaaccaccaccaagtctgagagaactctgggatattctgtgggttttggcatattagatagagaaaatgacagatctagatgaagggagcttttggatgtgtgcctttaaaaactgattatgtataaatactgatatttcacatacggagatatttgaagacccaagtctgcctttcacagagccctccattccaagtttagtttttgtcaaaatatgaatcattttatttgactgtactatcagtacacaaatgcatgagtatgtttatacagtgttagactgatgtgaatttgcatttgttacattacattgccagcgcatatcatttagcaagttggcattaacatttatgctttaattaaatgccagtatacctatgtgtgcagcagtaaaaaattagtgagaaaaagcaactttttgncactcttangnaaaattttggcttaata

SEQ ID NO: 3279 - DNA, 752 bp, Homo sapiens
  misc_feature (683)..(683): "n" may be a, t, c, g, other or unknown
  misc_feature (701)..(701): "n" may be a, t, c, g, other or unknown
  misc_feature (746)..(746): "n" may be a, t, c, g, other or unknown
aaagcggcgggagggagccgagagacccgagtgcacgtgtggagaagcggcggcacaagcgcggcggcgggagacactcccgcccccaccagactcaagccctcactcgactctcgcggccttcgttgctcgcacagctccctgcccaggctaggaggccggcttgcggggttgagtggcccgagctaagggtgcggagacctaagggcggcgactacgacggcgttgatatcggtggtaacgacggcctcagcaggcggggaagatgaaaggtagccggatcgagctgggagatgtgacaccacacaatattaaacagttgaaaagattgaatcaggtcatctttccagtcagctacaatgacaagttctacaaggatgtgctggaggttggcgagctagcaaaacttgcctatttcaatgatattgctgtaggtgcagtatgctgtagggtggatcattcacagaatcagaagagactttacatcatgacactaggatgtctggcaccttaccgaaggctaggaataggaactaaaatgttaaatcatgtcttaaacatctgtgaaaaagatggtacttttgacaacatttatctgcatgtccagatcagcaatgagtcggcaattgacttctacaggaagtttggctttgagattattgagacaaagaagaactactatnagaggatagagcccgcanatgctcatgtgctgcagaaaaacctcaaagttccttcttggtcanaatgca

SEQ ID NO: 3280 - DNA, 791 bp, Homo sapiens
  misc_feature (742)..(742): "n" may be a, t, c, g, other or unknown
  misc_feature (760)..(760): "n" may be a, t, c, g, other or unknown
  misc_feature (790)..(790): "n" may be a, t, c, g, other or unknown
agacgacgtagcagccatcttttccctggctttggtgattcagccctgacttctcaaaaagcactgcacagaggaggaggcagcagaaccccacttcagcttcttaggactctgcacttccccagaaggaagaattaaaaatgaatatgttcaaggaagcagtgaccttcaaggacgtggctgtggccttcacggaggaggaattggggctgctgggccctgcccagaggaagctgtaccgagatgtgatggtggagaactttaggaacctgctgtcagtggggcatccacccttcaaacaagatgtatcacctatagaaagaaatgagcagctttggataatgacgacagcaacccgaagacagggaaatttaggagagaaaaatcaaagtaagttaattactgttcaagacagagaatcagaagaagagctttcttgttggcaaatctggcaacaaattgcaaatgacttaaccaggtgtcaagactccatgatcaataattctcagtgtcacaaacaaggtgatttcccttaccaggtagggacagaactgtctattcaaatttctgaagatgagaactatatagtaaataaagcagatggtcccaataatactgggaatccagagtttcctatcttgagaacccaggattcttggaggaaaacattcctgactgagtcacagagattgacagagatcagcaaatttccataaaaaataaattatgtcaatgtaagaanggtgttgatcccatcggntggatttcacatcatgatggtcatagagtnc

SEQ ID NO: 3281 - DNA, 897 bp, Homo sapiens
  misc_feature (761)..(761): "n" may be a, t, c, g, other or unknown
  misc_feature (781)..(781): "n" may be a, t, c, g, other or unknown
  misc_feature (855)..(855): "n" may be a, t, c, g, other or unknown
  misc_feature (894)..(894): "n" may be a, t, c, g, other or unknown
aattgcagcctgtcactctgcccacacgtctgcagccaagacgcagggtgggcacgtgtacatgtggggccagtgccggggtcagtccgtgatcctcccgcacctcacccacttctcctgcaccgacgacgtgtttgcctgctttgccactcccgccgtctcgtggcgcctcctgtctgtggagcatgaagactttttaacagttgcagagtcactgaagaaagaatttgatagtccagaaactgctgatctgaagtttcgaattgatggaaaatatattcatgtccataaagctgttttgaaaatcaggtgtgagcattttcgatccatgttccagtcgtattggaatgaagacatgaaggaagtgatagaaatcgatcagttttcttacccagtgtatcgtgcctttctccagtacctctacacagacacagtcgacctgccgccagaagatgctataggtcttctggatttggcgacatcttactgtgaaaacagactgaaaaaactttgtcagcacattatcaagagaggaattactgtggagaatgccttttcgctattctctgctgcagtcagatatgatgcagaggatttagaagaattctgctttaagttttgcatcaatcatttgacagaagttacacagactgcagcattttggcaaatggatggccctctgctaaaggaattcattgctaaagccagtaaatgtggagcctttaagaactgaagcgcaaggctgctgggttctgtgtgantgctctggggcactggtgangatgtgtccagtttggctctacggtgatgtgattcttgcaggtaaaagaccattaggtggtttttttcacattnggacacagttggttgtgtaggaacatacaaggtgtccgnttt

SEQ ID NO: 3282 - DNA, 777 bp, Homo sapiens
  misc_feature (729)..(729): "n" may be a, t, c, g, other or unknown
  misc_feature (735)..(735): "n" may be a, t, c, g, other or unknown
  misc_feature (775)..(775): "n" may be a, t, c, g, other or unknown
ttttctctgcttttcgctaccccggtcactctcatttctctcccctattccttgtctcttcccccatccccctttctcctgtcctccccctgcctctacagtggttctccccgctgagctgccaccagctgctgggccccgggctgctgcggctgggccgcctatggctgcggtccccctcccatacagccccggcccctggtctctggctgtcagggtttggcctccttcgtggtgaccacctcttcctgtgctcagcgccgggcccaggccccccagcccctgaggacatggtgcatctgcggcggctacaggagatcagtgtggtttctgcagctgacaccccagataagaaagagcatttggtcctggtggagacaggaaggaccctgtatctgcaaggagagggccggctggacttcacggcatggaacgcagccattgggggcgcggctggtgggggcggcacagggctgcaggagcagcagatgagccggggtgacatccccatcatcgtggatgcctgcatcagttttgttacccagcatgggctccggctggaaggtgtataccggaaagggggcgctcgtgcccgcagcctgagactcctggctgagttccgtcgggatgcccggtcggtgaagctccgaccaggggagcactttgtggaggatgtcactgacacacttaaacgcttctttcgtgagctcgatgacccttgtgaccttntgcacnggttgctggcttcgctggaagggaagcttgctgggaattnct

SEQ ID NO: 3283 - DNA, 800 bp, Homo sapiens
  misc_feature (748)..(748): "n" may be a, t, c, g, other or unknown
  misc_feature (751)..(751): "n" may be a, t, c, g, other or unknown
  misc_feature (792)..(792): "n" may be a, t, c, g, other or unknown
agcgaggatgtgcgcagcgacttccagcgcagagtgccctacaactacctgcagcgggcctacatcaagcttaaccagctcgaaaaagcagtggaagcagctcacacatttttcgtggctaaccctgagcacatggaaatgcagcagaacattgagaattacagggcgacagctggtgttgaagcattgcagttggtagacagagaagccaagccacacatggagagttacaatgcaggagttaaacattatgaggctgatgactttgagatggctatcaggcatttcgaacaagccttaagagaatatttcgttgaagatacagaatgccggaccctatgtgaggggcctcagagatttgaagaatatgagtatttagggtataaggctggtctgtatgaagctattgcagatcactacatgcaggtgcttgtttgtcagcatgaatgtgtgagggaacttgccacccgccctggccgcctctctcccatcgagaattttcttcctctgcactatgattacctacagtttgcctactatcgagttggtgagtatgtgaaagccctggagtgtgccaaagcctatcttctatgccatccagatgatgaggatgtcctagacaatgtggattactatgagagtctgctggatgatagcattgacccggcatccattgaggccagagaggatttaacaatgttcgtgaaacgtcataagctggagtctgagctgataaaatcagctgcanaangtctggggtttcatcactgaaccgaattattggatcagatntggaggac

SEQ ID NO: 3284 - DNA, 831 bp, Homo sapiens
  misc_feature (66)..(66): "n" may be a, t, c, g, other or unknown
  misc_feature (741)..(741): "n" may be a, t, c, g, other or unknown
  misc_feature (809)..(809): "n" may be a, t, c, g, other or unknown
  misc_feature (820)..(820): "n" may be a, t, c, g, other or unknown
cataacaagccaaacgccagaccgagagtgcctccgtgcgcgagtgcccggtgtgtgcgcgccggngagagcaggggcccgaccggctccccgcccgccgcggtccgaactcatgcagctccgagcgagcgagcggcgcccagcccagcgcctcggccgaacccctccgcagcaggctgcctgctgtttcccggggagatcatgaaacgaggtcgccttcccagcagcagtgaggattctgacgacaatggcagcctgtcaactacttggtcccagaattcccgatcccagcataggagaagctcctgctccagacatgaagatcgaaagccttcagaggtgtttaggacagacctgatcactgccatgaagttgcatgactcctaccagctgaatccggatgagtactatgtgttggcagatccctggagacaggaatgggagaaaggggtccaggtgcctgtgagcccggggaccatccctcagcctgtggccagggttgtgtctgaagagaaatccctcatgttcatcaggcccaagaagtacatcgtgtcatcaggctctgagcctcccgagttgggctatgtggacatccggacgctggctgacagcgtgtgtcgctatgacctcaatgacatggatgctgcatggctggaactgaccaatgaagaatttaaggagatgggaatgcctgaactagatgaatacaccatggagagggtcctagaggaatttgagcancgatgctacgacaatatgaatcatgccatagagacttgaggaagcctggggatcgaatatgatgaaanatgttggctgngatgtctggca

SEQ ID NO: 3285 - DNA, 901 bp, Homo sapiens
  misc_feature (820)..(820): "n" may be a, t, c, g, other or unknown
  misc_feature (842)..(842): "n" may be a, t, c, g, other or unknown
  misc_feature (850)..(850): "n" may be a, t, c, g, other or unknown
aatccaactcacctccatgttcaaggatgtccctctgactgcagaagaggtggaatttgtggtggaaaaagcattgagcatgttctccaagatgaatcttcaagaaataccacctttggtctatcagcttctggttctctcctccaagggaagcagaaagagtgttttggaaggaatcatagccttcttcagtgcactagataagcagcacaatgaggaacagagtggtgacgagctattggatgttgtcactgtgccatcaggtgaacttcgtcatgtggaaggcaccattattctacacattgtgtttgccatcaaattggactatgaactaggcagagaactcgtgaaacacttaaaggtaggacagcaaggagattccaataataacttaagtcccttcagcattgctcttcttctgtctgtaacaagaatacaaagatttcaggaccaggtgcttgatcttttaaagacttcggttgtaaagagctttaaggatcttcaactcctccaaggctcaaaatttcttcagaatctagttcctcatagatcttatgtttcaaccatgatcttggaagtagtgaagaatagcgttcatagctgggaccatgttactcagggcctcgtagaacttggtttcattttgatggattcatatgggccaaagaaggttcttgatggaaaaactattgaaaccagcccaagtctttctagaatgccaaaccagcatgcatgtaagctcggagctaatatcctgttggaaacttttaagatccatgagatgatcagaccagaaaattttggagcaggtcctcaacanggttggtaccagacatcttctnccatcagncattcttagacctgcttttaaatatcgcatgtatgcccccttagttcttca

SEQ ID NO: 3286 - DNA, 800 bp, Homo sapiens
  misc_feature (281)..(281): "n" may be a, t, c, g, other or unknown
  misc_feature (664)..(664): "n" may be a, t, c, g, other or unknown
  misc_feature (722)..(722): "n" may be a, t, c, g, other or unknown
  misc_feature (760)..(760): "n" may be a, t, c, g, other or unknown
  misc_feature (796)..(796): "n" may be a, t, c, g, other or unknown
agcagtttctgtgggcggacagggaaccctgcgtttctactgtgtgattctgccaccttcctggcccgacgccatgggagtgacttgtgtgtcccagatgcctgtggccgagggcaagagtgttcagcaaaccgtagagctccttacccggaaattggagatgcttggggcagagaagcaaggaacattttgtgtggactgtgagacttaccatacggccgcctctacccttggcagccaaggtcagaccgggaagctgatgtatgtgatgcacaactcanagtacccattgagctgtttcgccctctttgagaatggcccttgccttattgctgacaccaactttgatgtgcttatggtgaagctcaagggctttttccagagtgctaaggccagcaagattgagacccggggcaccaggtaccagtactgtgacttcctggtgaaggtgggcacggtcacaatggggcccagtgcccggggcatctctgtggaggtggagtatggcccctgtgtggtagctagtgactgctggagtctgctgctcgagttcctacagagttttctaggcagccacacaccaggggctcccgcagtgtttgggaacagacatgatgcggtctacgggccagcagataccatggtccagtacatggaactcttnaacaagatccgcaagcagcaacaggtgccggtggctgggattcgttagtgatgaacanctgccaactgaactcttgtcaccaggggtacttcacangaaggaacaggtgctgacttttaaggtcccttgganccca

SEQ ID NO: 3287 - DNA, 896 bp, Homo sapiens
  misc_feature (822)..(822): "n" may be a, t, c, g, other or unknown
  misc_feature (853)..(853): "n" may be a, t, c, g, other or unknown
  misc_feature (892)..(892): "n" may be a, t, c, g, other or unknown
acttaaaagtgaggggaaaactgagacaacaatgcaagtgggtaatagtcaaacaaaagttaaaggtgaagattcaaaaaatataccattggagaaagaaacaagaaaatcactggtttcagattcaggtggacaaaggacaagtgataaaatccaagaatatccacagctcagagaagaaacgatctagccctgctatttcagatctttcacagatccttaagtctcaagatgaatcagcatttttagagagttcaaatgaagtttcagttgctgaaaaccaatcctataaatctccatcagagacccatgataaatcacttacaacagtatcatccagcaaagaagttcaagattcactgtctgttggaacattggctcaaaaaaacgaaacagtgatatcaccattcattttacctcctgttcttacagaaagtaaaaaggctgatgtttcagaagaacaattacaaaagatgactgaagaacaaacttaccaagcagcagaaaaatctcaagctcataatgaagtaccaaatgaaaggcttgtagttgagcatcaagaatcattgtcaaaaaccaaattacaagtaaagaaacaagaaacttctacagagcaaccactcaccactcctgataaagaaccaaatgaaaatcttatacttaggcatcaagactcaatgtcaaaatcagaaatgcaagtgaaggaacaaagaactctcaaagggcaaagaattattactcatgatgaagaaccaggcaaaaatttgtgcctgacatcaaggattcagtgtcaaaactggaaatgcaaattggaaaaaaccnaaaaactttctagagaggaaaagacctagtnctcatggatgaagaatcaggtggaaaatcctattgcttnaacc

SEQ ID NO: 3288 - DNA, 919 bp, Homo sapiens
  misc_feature (758)..(758): "n" may be a, t, c, g, other or unknown
  misc_feature (850)..(850): "n" may be a, t, c, g, other or unknown
  misc_feature (881)..(881): "n" may be a, t, c, g, other or unknown
  misc_feature (907)..(907): "n" may be a, t, c, g, other or unknown
tttaaaagggacagggtacagttttattggcttagagaaaaaaagcgggggcagggatgaggtgacagtcctcctcacctgaataattgcagctgaggattaaacatatctcttcccaaatactttatcttctaggtatacttctcttacaatttattagaaagctggttacttgagataactaaagagatactaattttcatgcaaacccatcacaatgtattgaaactgagatacttttctgctgctaacatatttaggaaaaatagttttatttttagtaaataaaatctccacttatttcaataaaaatggcaaggagaaaatgtcataagattatcctgccatgtaaaataagctgctccccaaaggactgtgtcaagattggttttaaatagaaaatatctattttaaatatatttagattataattgcctgggggttggcaaactttttctgtaaagggccagatactaaataccttaggctgtacgggccttcagatctctgtcacaactgttcacccgcgcggtgtagtgtgaaggcatccacagacaaaatgtaaacacacaggtgtggctgttctaataaaacctcaccaaacaggcagcacaggccacagtatgctgacctctgcactagcctcatctcaggttaactgtcctctagttattaaaaaagaaacccaaaattaagttacacaaaagtaatttttaaaaactactttggaccgttaaaatggggcccaaggtagaatncaccggaggtaaaagttcttgaccaagccagtcagggaaaatctggaatgaattctggccctttggtcttgccccataaccagctggggaanctctttgggccaaatcaccattattcccttntggggaatttcctttattggcaatcntcttaaatctgg

SEQ ID NO: 3289 - DNA, 849 bp, Homo sapiens
  misc_feature (762)..(762): "n" may be a, t, c, g, other or unknown
  misc_feature (821)..(821): "n" may be a, t, c, g, other or unknown
  misc_feature (838)..(838): "n" may be a, t, c, g, other or unknown
gctagaatgcactgtctttgaagcattgagcaggccctcaccagacaccaaatctgctggttcctggatcttggacttcccagcctcataactaggcatcacaaatctccgagaggaacgcatccacttcctggcctggtagagcggagagcagaggtgggcccaggagtccaagaacttcccctaaggctgctagtcgcacccatctcttgagcagagacccaagagggcaggacaggaagaatggaagtgagatttggccccggtcatgttttccaaagtgctgacatcaggaaaataatagaagttaacgcagatatggggctgccactgaggagagagaagactgaaagaagcatatagataaaagtttcagttacctgaggtcaaccttggtctgaaattagattatctgagtaggctgaaccatcggtgaaaaggaggccaagcatctcaaaaataggacacgtgagagtatggagccaatgtgacactcaggtgagttagccttatgatccctaagcatgcagtccttggaccagatgcatcaggatcttctggtaagtgtgctaaaatataggctactgagacccaccctatgtctgtcaaatcagaatattctaaggaagcaggtcccagggaatatatattttaaagctccctaaatacacttcatgggctgccagatttgggaatcgcaggattaggtagctacctaaatgaagacacttaaatgtgccaaaagcttctctttcacccatncatttatcctctattcacccatccttaaccaaacatgtgccagtatctggatttgcttnatgacctgtactgctgnggtggtgcaaa

SEQ ID NO: 3290 - DNA, 704 bp, Homo sapiens
  misc_feature (645)..(645): "n" may be a, t, c, g, other or unknown
  misc_feature (648)..(648): "n" may be a, t, c, g, other or unknown
  misc_feature (694)..(694): "n" may be a, t, c, g, other or unknown
ggaaatctagttcgggaaaagtgtgaggggctcttcacgtggggaaggaacagcaggcgcggaggagggggcaagcgtgtgtgagattcagtggtccatgcgtgcgtttgtcgtgtgctggtgattgggtgtggcaactcagaactgagtgagcaactgtatgatgtgggctatcgggatatagtgaacatcgacatcagtgaggttgtcatcaagcaaatgaaggaatgtaatgccacccgacggccccagatgagcttcttgaagatggacatgacgcagatggagtttcctgatgcctcgttccaggtggtgttggacaagggcaccctggatgctgtcctgacagatgaggaagagaagaccttacaacaggtggacaggatgctggctgaggttggccgtgtcctgcaggtgggcggtcgctatctctgcatctccctggctcaggctcacatcctgaagaaagcagtgggccacttctcccgggaggggtggatggtgagggtgcaccaagtggccaacagccaggaccaggtgttggaagcagagcctcagttctccttgcctgtctttgccttcatcatgaccaagttcaggccagtccctggctctgcccttcagatctttgagctgtgtgctcangancagcgcaagcctgtgccggctggaaaagtgcccaaccggctggccnaagcggtgca

SEQ ID NO: 3291 - DNA, 792 bp, Homo sapiens
  misc_feature (758)..(758): "n" may be a, t, c, g, other or unknown
  misc_feature (764)..(764): "n" may be a, t, c, g, other or unknown
  misc_feature (791)..(791): "n" may be a, t, c, g, other or unknown
ctactccgagaggccccgggtccctctgccacaacttctgtcgctctgccgcctgcaccgtgacccgcactattcacgggagccctagagaggacaccgggacacccagaagccggggaatgatgtttcaggattcagtggcctttgaggatgtggctgtcagcttcacccaggaggagtgggctttgctggatccttcccagaagaatctctacagggatgtgatgcaggaaaccttcaagaacctgacctctgtaggaaaaacatggaaagttcagaacattgaagatgagtacaaaaatcccaggagaaatctaagtcttatgagagagaaactctgtgaaagtaaagaaagtcatcactgtggagaaagcttcaaccagattgcagatgacatgctgaacaggaaaactcttcctggaataacaccatgtgaaagcagtgtgtgtggagaagttggcacgggtcattcatctcttaatacgcatatcagagctgacactggacacaagtcatctgagtatcaggaatatggagagaatccatatagaaataaggaatgtaagaaagccttcagttatcttgactcctttcaatcacatgataaagcttgcactaaagagaaactctatgatggtaaagaatgtacagaaaccttcatttccattcatgcattcaaagacacagggtaatgcacagtggagatggccttataaatgtaagtttgtgggaaagccttctattttctcaatttatgncttatncatgaacgaattcccctggtgtgaaanc

SEQ ID NO: 3292 - DNA, 859 bp, Homo sapiens
  misc_feature (736)..(736): "n" may be a, t, c, g, other or unknown
  misc_feature (822)..(822): "n" may be a, t, c, g, other or unknown
  misc_feature (854)..(854): "n" may be a, t, c, g, other or unknown
  misc_feature (857)..(857): "n" may be a, t, c, g, other or unknown
gaggcgctccgggatactgagggcggagggcggtggcagcgctggcgctggggaccggcttggtggcttcgggaaacagtttggcgccggcggccgtccgtgttactccgcatcccgccccgtctcggcacggctagcagccccctggccaccagcgtccagcaatgtgtctcaccggccgggcgtagcagctgcgcgtgcgcggaaccgcggggccatgagcgaagccggcggccggggctgtgggtccccggttccccagcgagcgcgatggagactagtggcggcgacggccgcgttctgcctggtgtcggccacctccgtgtggacggcgggggccgagcccatgagtagggaggagaaacagaagcttgggaatcaagtactggaaatgtttgatcatgcttatggtaactatatggaacatgcttaccctgctgatgaactcatgcctttaacctgtagaggtcgagttagaggccaagagccaagtcgcggtgacgttgatgatgccttgggaaaattttctctgacactgattgattctttggacactttagaggtgattacctctagccatcagccttactccatcccatgtttggtatgcaatttgagccacaaggctcgtatcgccaacagctatatacattttgttccatttttctgtcttacagagccatgatagaactgtggttagtgagttaaaattcctggagtaactactggttttctnctttgaaacttaggtttctaaagttgcacctaaggaatctgtcacattttctggtgaatcatgggttttggttttggttttaacanatattccttttgatacggactttaaaaattanggnat

SEQ ID NO: 3293 - DNA, 710 bp, Homo sapiens
  misc_feature (669)..(669): "n" may be a, t, c, g, other or unknown
  misc_feature (682)..(682): "n" may be a, t, c, g, other or unknown
  misc_feature (686)..(686): "n" may be a, t, c, g, other or unknown
atctttaacatttgggatgctgccccacgccgcctgccactcctgctcagaagacagtggctctgacgtctccagcatctcccaccccacttcgccgggcagcagcagccccgacatctcctttctgcagcctctctcccctcccaagacccatcgtcaccgcggggcctgggtcccagccggcagcagagagctggtcgcccaccaccccaagctactgctgccgcctggctatttcccggcggggcggtacgtggtggtggctgagagccccctgccgcctggcgagtgggagctgcgccgcgcagccccgggccctgcttacgaggaggagggcactcccctgcgctaccagcgtctggtgccctcccgcagccgcatcgtgcggacgccctccctgaaggacagcccggcaggccgggggctcagcaaggccgccgtgtccgaggagctcaagtggtggcacgagcgtgcacgcctccggagcacccgcccccactcactggaccgccaaggagctttccgggtcaggagcctgccccttgggagagagggcttcggacgagccctgggaccccgggcacaggtgcccacagtttgtgtgctgcggagatcgcctgatggggcccctgtgcaagtctttgtacctgaaaaaggagagatcatcanccaggtgtaactnttgngccccacgctggaaaaaactggtt

SEQ ID NO: 3294 - DNA, 870 bp, Homo sapiens
  misc_feature (804)..(804): "n" may be a, t, c, g, other or unknown
  misc_feature (818)..(818): "n" may be a, t, c, g, other or unknown
  misc_feature (864)..(864): "n" may be a, t, c, g, other or unknown
tttctatgacccagagggtgggtccatcactcaagtagccagagttgtcatcgagagaatcgcacggaagggtgaacaatgcaatattgtacctgacaatgtcgatgatattgtagctgacctggctccagaagagaaagatgaagatgacacccctgaaacctgcatctactccaactggtccccatggtccgcctgcagctcctccacctgtgacaaaggcaagaggatgcgacagcgcatgctgaaagcacagctggacctcagcgtcccctgccctgacacccaggacttccagccctgcatgggccctggctgcagtgacgaagacggctccacctgcaccatgtccgagtggatcacctggtcgccctgcagcatctcctgcggcatgggcatgaggtcccgggagaggtatgtgaagcagttcccggaggacggctccgtgtgcacgctgcccactgaggaaacggagaagtgcacggtcaacgaggagtgctctcccagcagctgcctgatgaccgagtggggcgagtgggacgagtgcagcgccacctgcggcatgggcatgaagaagcggcaccgcatgatcaagatgaaccccgcagatggctccatgtgcaaagccgagacatcacaggcagagaagtgcatgatgccagagtgccacaccatcccatgcttgctgtccccatggtccgagtggagtgactgcagcgtgacctgcgggaaggcatgcgaacccgacagcggatgctcaagtctctggcagaacttggagactgcaatgaaggatcttggaancaggttggaaaaantgcattgcttcccttgaatgccccatttgactggtgagcttcaccnaatggg

SEQ ID NO: 3295 - DNA, 845 bp, Homo sapiens
  misc_feature (803)..(803): "n" may be a, t, c, g, other or unknown
  misc_feature (829)..(829): "n" may be a, t, c, g, other or unknown
  misc_feature (840)..(840): "n" may be a, t, c, g, other or unknown
gatactatgatgctgaatgtgcggaatctgtttgagcagcttgtgcgccgggtggagattctcagtgaaggaaatgaagtccaatttatccagttggcgaaggactttgaggatttccgtaaaaagtggcagaggactgaccatgagctggggaaatacaaggatcttttgatgaaagcagagactgagcgaagtgctctggatgttaagctgaagcatgcacgtaatcaggtggatgtagagatcaaacggagacagagagctgaggctgactgcgaaaagctggaacgacagattcagctgattcgagagatgctcatgtgtgacacatctggcagcattcaactaagcgaggagcaaaaatcagctctggcttttctcaacagaggccaaccatccagcagcaatgctgggaacaaaagactatcaaccattgatgaatctggttccattttatcagatatcagctttgacaagactgatgaatcactggattgggactcttctttggtgaagactttcaaactgaagaagagagaaaagaggcgctctactagccgacagtttgttgatggtccccctggacctgtaaagaaaactcgttccattggctctgcagtagaccaggggaatgaatccatagttgcaaaaactacagtgactgttcccaatgatggcgggcccatcgaagctgtgtccactattgagactgtgccatattggaccaggaaccgaaggaaaacaggtacttttacaacctttggaaccagtggacttcacccttgaaccaggcaaggccaacnttgggagccccaagaaaccttggggnacccggaccanttggt

SEQ ID NO: 3296 - DNA, 858 bp, Homo sapiens
  misc_feature (193)..(193): "n" may be a, t, c, g, other or unknown
  misc_feature (716)..(716): "n" may be a, t, c, g, other or unknown
  misc_feature (803)..(803): "n" may be a, t, c, g, other or unknown
  misc_feature (813)..(813): "n" may be a, t, c, g, other or unknown
  misc_feature (826)..(826): "n" may be a, t, c, g, other or unknown
atttcctccagctagaggagctcaactgatctgttttctttcgcccagccaaaatcacagaatgaaggcggtgaagagcgaacgggagcgagggagccggcgaagacaccgggacggggacgtggtgctgccggcgggggtggtagtgaagcaggagcgtctcagcccagaagtcgcacctcccgcccaccgncgtccggaccactccggtggtagcccgtctccgccgaccagcgagccggcccgctcgggccaccgcgggaaccgagcccgaggagttagccggtccccacccaaaaagaaaaacaaggcctcagggagaagaagcaagtctcctcgcagtaagagaaaccgaagtcctcaccactcaacagtcaaagtgaagcaggagcgtgaggatcatccccggagaggacgggaggatcggcagcacagggaaccatcagaacaggaacacaggagagctaggaacagtgaccgggacagacaccggggccattcccaccaaaggagaacgtctaacgagaggcctgggagtgggcagggtcagggacgggatcgagacactcagaacctgcaggctcaggaagaagagcgggagtcttataatgccaggcgacgggagcatcgccagaggaatgacgttggtggtggcggcagtgagttttcaggagttggttcctcggcctggttggcaacaacaaaagaaaaaagangtgcccgcttaaagaaaaaccaagcttttgaactttcttggggcacttttttgaggacaccaacacttttccggggtggtaagtcanttaaattttngtgagccccccanaaacccgtttttccccaaaaaaacggtggcgt

SEQ ID NO: 3297 - DNA, 887 bp, Homo sapiens
  misc_feature (682)..(682): "n" may be a, t, c, g, other or unknown
  misc_feature (858)..(858): "n" may be a, t, c, g, other or unknown
gatgatatgagtaatgctggtgattttctaaatgacaatgcagttgagatcccttctttttcaaaagggattataaatgatgatgaggatgatgaagacctcatgatggcttcaggtcgtcctagacagcgaagtcacatcctagaagatgatgaaaactcagttgatatctcaatgctaaaaactggttctagtcttctcaaagaggaggaggaagatggtcaagaaggcagcattcacaatctaccacttgtaacatcccaaaggccattttatgatggacccatgccaactccccggcaaaagccatttcagtcaggttctacaccgttgcatctcactcacagattcatggtgtggaactctattggaattattcgctgctataatgatgagcaagacaatgccatagatgtggagttccatgatacctccatacaccatgcaacacacttatcaaacactttgaattatacaatagcagatctttcccacgaagctattttgttggcatgtgaaagcactgatgaactagcaagcaagcttcactgcctgcactttagttcttgggattcaagcaaagagtggataatagacttgcctcagaatgaggatattgaagccatatgtctcggtcaaggatgggctgctgccgctactagtgccctgcttcttcgattgnttactattggaggggttcaaaaagaggtattcagccttgctggacctgtggtgtcaatggcaggacatggagaacagcttttcattgttatccagaggtccggatttgatggggatcaatgccttggagttcaactgctagagctggggaaaaagaaaaaaccaattttgcatggngacccttttcttttacaaggaaatcctac

SEQ ID NO: 3298 - DNA, 799 bp, Homo sapiens
  misc_feature (622)..(622): "n" may be a, t, c, g, other or unknown
  misc_feature (731)..(731): "n" may be a, t, c, g, other or unknown
  misc_feature (776)..(776): "n" may be a, t, c, g, other or unknown
  misc_feature (789)..(789): "n" may be a, t, c, g, other or unknown
aaaagggcagctccgggggaaagagggtggcgtcccggggaagcccgcagccgccgccgatgtcgctgggactcggaagtgccgaaagaggggtgttgggaactcgcggcgcgcgtgaacgttgccgtcgccgccgcccgggacagcccggagaaactctcagcgtaggcatcgggaaccttcgtgccaaggagccatgccgccccgatgggaactggcactttacctacttgcctcactaggcttccacttctattccttctatgaagtttacaaagtctccagagaacacgaagaggagctggaccaggaatttgagctggagactgacactttatttggaggattaaagaaggatgcgaccgactttgagtggagcttctggatggaatgggggaagcagtggctggtgtggcttctccttggccacatggtagtgtctcaaatggccacactgctggcaagaaagcacagaccctggattctcatgctctatgggatgtgggcctgctggtgtgtgctggggacccctggtgtggctatggttttgctccataccaccatctctttctgcgtggcccagttccggtctcagctcctgacgtggctctgttctctcctnctcctctccacactgaggctgcagggtgtggaagaagttaagagaaggtggtacaagacagaaaacgagtactacctgctgcagttcacgctgacccgttcgctgcctntactacaccagctttagcctggagcttttgctggcagcaacttgnctgctgcatcgancttctacttc

SEQ ID NO: 3299 - DNA, 849 bp, Homo sapiens
  misc_feature (780)..(780): "n" may be a, t, c, g, other or unknown
  misc_feature (811)..(811): "n" may be a, t, c, g, other or unknown
  misc_feature (845)..(845): "n" may be a, t, c, g, other or unknown
tccaaagaactctgctttaaaacaaggatgtgaagcgaacatttggatcaacctcacaatcaagtagtttttcaaaaattcataagcggccacacagaatacagaaagctcggaaaagcattgcccaatcaggtgtaaacatgtgcaatcaaaacagctctcctcataagaatgttacaattaaaagcagcgttgaccaaaaacctaagtatttccatcaagcagcaaaagaaaagtctaatgccaaggcaaatagccactatttgtatagacacaaatatgaaaactataggatgatcaaaaaatcaggtgaatcatatcctgtgcatttcaaaaaagaagaagctagttcattaaattctttacacctgttttcatcatcaagtaattctcacaacaattttatttcagaccctcataagcctgacgccaaaaggcctgaaagcttcaaagatcacagacgtgtagctgtaaagagagtaattaaggaatctaagaaggaaagttctgttggaggggaagacttggatagctatccagattttttgcataaaatgactgttgtcgttttgcaaaaacttaattctgctgaaaagaaagatagttatgaaacagaagatgaaagttcctgggataatgttgagttaggagactacactacacaggccatagaagatgaaacctatagtgatattaatcaagagcatgtaaatttattccctttatttaagagcaaagtggaaggcaggagcctggaaaaaatgctactcttagttatgnccaacgatggctttattttgatactttgaanatcctggaggtacaacttttgctgagatcatganctac

SEQ ID NO: 3300 - DNA, 802 bp, Homo sapiens
  misc_feature (722)..(722): "n" may be a, t, c, g, other or unknown
  misc_feature (742)..(742): "n" may be a, t, c, g, other or unknown
  misc_feature (746)..(746): "n" may be a, t, c, g, other or unknown
cttaaggctaaatcctggaataaaaagttctatgattatgaagcaaacatgccagacagatggggtcacagtggttataaagagttataccctgaagaatttgaaacagacagtagtgatcagcaagatattaccaacgggaagaaaacatctccccaggtaaagtcatctacccatgaatcccgcaaacacaagaagtcaaagaaatcccacaaaaaaaaagcagaaaaaaaggtcacacaaaaaacagaagaaaagcaaaaaggaagccacagatataacagcagattcctcgagtgagttctcagaagaaactggggcttctggtacaaggaaagggaaacaaccacataaacgcaagaaaaaatccaggaaaaagtctctcaaaaaacctgctttattcttagaggcagaaagtaacacttcacattcagatgattcagcatccagcagttctgaggaaagtgaggaaagagacactaagaaaaccaaaaggaaaaagagagagaaaaaagcccatacctctgtaaccaacaatgaaatacaggagaggacaaacaaacgcacaaattggaaagtagctacagatgaaaggtctgctgagagctcagaggatgactaaatgggaaacacttttgttttccacatgactgtggatatttacagttcttactccttgtggttttgcagtgactcttgttcagcacggggcctgaggtcanagctgtcttgtgccatctgnatgntctgacagacgtcttggcttctattttggcgttaagcttgatccccttttcttggt

SEQ ID NO: 3301 - DNA, 893 bp, Homo sapiens
  misc_feature (757)..(757): "n" may be a, t, c, g, other or unknown
  misc_feature (774)..(774): "n" may be a, t, c, g, other or unknown
  misc_feature (827)..(827): "n" may be a, t, c, g, other or unknown
  misc_feature (880)..(880): "n" may be a, t, c, g, other or unknown
  misc_feature (892)..(892): "n" may be a, t, c, g, other or unknown
ccgagcgggctgggggaggggagcgtggggccgacagttttgggggtgaaaaggcaaaaggcgggtgaaaggctgcctcccgagactctccttgcttggaattctgcccactctgcggagttagcagtcacgacctccagcacaggatgtggtaccacagattgtcccacctacacagcaggcttcaggacttgctgaagggaggagtcatatatccggcccttccacagcccaacttcaaaagcttacttcctttagctgtccattggcaccatacagcctccaagtctctgacttgtgcttggcagcaacatgaagatcattttgagctgaaatatgctaataccgtgatgcgctttgattacgtctggcttcgagaccactgccgctcagcatcgtgctacaactctaagactcaccagcgcagcctggatactgccagtgtggatttatgtatcaagccaaagaccattcgtctggatgagaccacactctttttcacttggccagatggtcatgtgactaaatatgatttgaattggctggtgaaaaacagctatgaagggcagaaacaaaaagtcatccagcctagaatactatggaatgctgaaatctaccagcaagcccaagttccatcggtagattgccagagcttcttagaaaccaacgagggactgaagaagtttctgcaaaactttctgctctatggaattgcattcgtagaaaatgtcccttccactcaagacacacagagaanttggcagaaaggatcancttaatcagagaaaccatttatgggaggatgtgggatttcactttaaaacttnttccagaggtgacactgggtacacccaagctagctctggatcgggacacttgncctacctatttna

SEQ ID NO: 3302 - DNA, 813 bp, Homo sapiens
  misc_feature (755)..(755): "n" may be a, t, c, g, other or unknown
  misc_feature (773)..(773): "n" may be a, t, c, g, other or unknown
  misc_feature (783)..(783): "n" may be a, t, c, g, other or unknown
actattccatattattaaaaagaaaaaaaaaaagccaaaaagaaaaaaaaaaaaaaagcaagccacctctctctttcttttcttgctctctttttctttctctctctctcaagtttgtgcagggagatggtgaactgttttgtcagaacttaaatggaaaaaaaaataaaactacaacaagcctaccttttataactgggtgtttagtgctaaacagccagaaccacagagacagtattgtatgaccaaagcatttgatgccaaaatttgacgttaaagtaatgatttgatttcctgccctggttttgaaggtccatttttttcccttttgcattgacttgcttgtttcccctttgaaacacctaaaaatacctttccaaaacatcgcgagagcatacatagacaaaaatgaaatagaaagctcttgcatgcttgagtccaccattgggggaaatgacagaaaactggacctgagggcattaggaacatcctacagagttgtgtttagtgtcgtttgccatggtatttcacagtgaaacatggatactctccacacatcatttacttcatgctgtgtacttatgtactggtttttgcattttactcacttgataagtctgctccactggtttcatcagatagacttgctgctactggcttttccattgtagattgggttattttacacgcagttcgccaaatgggattgctctgtatagtcaaattggtgatggacagatggacagaatgcagangtacatagatgagctgangctgatccancttccctgaaattcaaagtgtaactttgta

SEQ ID NO: 3303 - DNA, 774 bp, Homo sapiens
  misc_feature (649)..(649): "n" may be a, t, c, g, other or unknown
  misc_feature (736)..(736): "n" may be a, t, c, g, other or unknown
  misc_feature (740)..(740): "n" may be a, t, c, g, other or unknown
  misc_feature (771)..(771): "n" may be a, t, c, g, other or unknown
gagtgcgccgtgcggtctccggacgctcgctgctcagcccgatccccgccaactgtgcaggcggctgacccgcagcggtagcggcagcagcgaggactcgagcgctggctgcagcgacaccatggatctctcctttatggccgcgcagctgcccatgatggggggagctttcatggactcgcccaacgaggacttcagcaccgagtactccctgtttaactcctctgccaatgtccacgcggctgccaatggccagggccagccggaagatcctcctcggtcctccaacgacgccgtcttgctatggattgccatcatagctacgctggggaacatcgtggtggtgggcgtggtgtatgccttcaccttctgaggacggcacaccctgcaccaccatggggtgaggcttggcacgtagctctgacttgctgtcggcctttggcttctcctgtgttctagaaccaggagttttgaccaggggcggcggccgtccttctggaatttctccccagcagccctgatttcaaatatcccatgttgtggtcaagctgagtcagaagacatggaagtatgggcctcctgcccctagaggcatgacggggcaaggccttcagagggcagattggggatccttgaaactacattccangaacatgggaccagatgagacagctagttaagtttaaaacatagacatgatttgatgatcgcttgcttgtggtaaataatcactcgngtgncttggttttatgcaaacttatcgaaccttanggc

SEQ ID NO: 3304 - DNA, 765 bp, Homo sapiens
  misc_feature (708)..(708): "n" may be a, t, c, g, other or unknown
  misc_feature (711)..(711): "n" may be a, t, c, g, other or unknown
  misc_feature (739)..(739): "n" may be a, t, c, g, other or unknown
aagatggcggcggtggctggatctggggctgccgcggctccgagctcactgctcctcgtggtgggcagcgagttcgggagcccggggctcctcacctacgtcctggaggagctcgaaagaggcatccggtcttgggatgtcgatcctggcgtctgcaaccttgatgaacagctcaaggtctttgtgtcccgacactctgccaccttctccagcattgtgaaaggccagcggagcctgcaccaccgtggagacaacctggagaccctggtcctcctgaacccatcagacaagtccctgtatgatgagctccggaaccttctgttggaccctgcctctcacaagctactggtgttggctgggctctgcctggaggagacgggggagctgctgctacagacagggggcttctcgcctcaccacttcctccaggtcctgaaggacagagagatccgggacatcctggccaccacgcccccacctgtgcagccgcccatactcaccatcacctgccccaccttcggtgactgggctcagccggcacccgctgtgcctggccttcagggggcgctccggctccagctgcggctgaaccccccggcgcagctgcccaactctgagggcctgtgcgaattcctggagtacgtggctgagtctctggagccaccgtcccccttcgagctgctggagcccccgaccttcgggggcttnctnagctgggccggcctgctgctacatcttncctggagcctcgggatccgcttcttc

SEQ ID NO: 3305 - DNA, 884 bp, Homo sapiens
  misc_feature (846)..(846): "n" may be a, t, c, g, other or unknown
atagcacttttaggaaactgattattgtaaatgtttaattttgtctcaaatatagttggcattggaagtttagcctttacttgaatgtatactgtagatttttaacaaagcgagttctatatttattatgtttagtgtggtttgaaattacctctttcatatgttttaaataaagtgaaatttatgtatgttttgtacatagatacacatgattatgttaagaggctttaagatttaaaagtttcacacaaccataagtatagtatttcatgccagtaaaatttttttagtggtattctgtttacagatgtattaggaccattgatgcattacatttaagaattctctttaatacatctgggcaataaatattgaaaggtattccatgaagctgagttctttagataatcaacattactaacattacatttttgagatttttatgacattagatttttattttgtatatgtagaatattataatttttaaaaggactattgatgatagaagaataggggcaagacgacaaaagtacctttgaataaaacaatttaagaaattggtttaagatattggatgatagaagacatttaagatatctagatggtgatattttccttacaagatgggtaccagtatagtaatatctgtatactaactagggctttgtattgtcaataattttttaataattttttaatgaggtatttaccactgaagaaatatgataatgtaaaaccatcaaattttataattgagatgatactctggaaaaacatgtcatttcattttcagaaaactcttaagctctcttcagtctctgtaaggttctgaatgcatgttcntcatgaaaagtatgtggtggtttgaagtaataataata

SEQ ID NO: 3306 - DNA, 708 bp, Homo sapiens
  misc_feature (83)..(83): "n" may be a, t, c, g, other or unknown
  misc_feature (167)..(167): "n" may be a, t, c, g, other or unknown
  misc_feature (226)..(226): "n" may be a, t, c, g, other or unknown
  misc_feature (242)..(242): "n" may be a, t, c, g, other or unknown
  misc_feature (444)..(444): "n" may be a, t, c, g, other or unknown
  misc_feature (513)..(513): "n" may be a, t, c, g, other or unknown
  misc_feature (677)..(677): "n" may be a, t, c, g, other or unknown
  misc_feature (695)..(695): "n" may be a, t, c, g, other or unknown
  misc_feature (704)..(704): "n" may be a, t, c, g, other or unknown
acaaaagtaactatgtttccggtagcccctaaaccccaggattccagtcaaccatcagacagactcatgactgaaaaacagcnggaagaagcagaatgggaaagcataaatgtgctattgatgatgcatggcttaaaacctttgtctctagtcaaaagaacagacanagatctcatcatttttgacaaacagtcatcacaaaggatgagacagaattagaaattgntggtggaagaaacatnatgtcaacagaacatgatacaggagcttatagaaactaatcaacagcttagaaatgaacttcagctagagcaaagccgagcagccaatcaagaacaacgagctaatgacttggaacaaattatggaaagtgtgaaatccaaaattggtgaattggaggatgaatcactaagtagggcttgccaccaacagaattaaatgaangatcttcaaaaggagcagaaaactttacaggtgaagtgccagcattataagaaaaaacgaacggagcangaagaaactattgcttctttgcaaatggaagtctgtagattaaaaaaggaggaagaagatcgcattgtcactcaaaacagagtgtttgcctatctgtgcaaaagagttcctcatccgtcttggatagacagttgctttggctaattgattactatgaatctaanatttgaaaaattcatacnccaaggcantatt

SEQ ID NO: 3307 - DNA, 844 bp, Homo sapiens
  misc_feature (719)..(719): "n" may be a, t, c, g, other or unknown
  misc_feature (788)..(788): "n" may be a, t, c, g, other or unknown
  misc_feature (801)..(801): "n" may be a, t, c, g, other or unknown
  misc_feature (841)..(841): "n" may be a, t, c, g, other or unknown
tacgtgatggttttacagcccgaggagcccaagatcagcctgagtggcgtccaccattttgcccgagcagcttctgaatttgaaagctcagaaggggtgttccttttccctgagcttcgcatcatcagcaccatcacgagagaagtggagcctgaaggggacggggctgaggaccccacagttcaagaatcactgttgtccgaggagatcgtgcacgacctggatacctgtgaggtcacggtggagggagaggagctgaaccacgagcaggagagcctggaggtggacatggcccgcctgcagcagaagggcattgaagtgagcagctctgaactgggcatgaccttcacaggcgtggacaccatggccagctacgaggaggttttgcacctgctgcgctatcggaactggcatgccaggtccttgcttgaccggaagtttaagctcatctgctcagagctgaatggccgctatatcagcaacgaatttaaggtggaggtgaatgtaatccacacggccaaccccatggaacacgccaaccacatggctgcccagccacagttcgtgcacccggaacaccgctcctttgttgacctgtcaggccacaacctggccaacccccacccgttcgcagtcgtccccagcactgcgacagttgtgatcgtggtgtgcgtcagcttcctggtgttcatgattatcctgggggtatttcggatccnggcccggacatcggcggaccatgcgggatcaggacaccgggaaggagaacgagatggactgggacactntgccctgaccatnaccgtcaaccccatggagacctatgaggaccagcacacantga

SEQ ID NO: 3308 - DNA, 697 bp, Homo sapiens
  misc_feature (78)..(78): "n" may be a, t, c, g, other or unknown
  misc_feature (81)..(81): "n" may be a, t, c, g, other or unknown
  misc_feature (176)..(176): "n" may be a, t, c, g, other or unknown
  misc_feature (289)..(289): "n" may be a, t, c, g, other or unknown
  misc_feature (374)..(374): "n" may be a, t, c, g, other or unknown
  misc_feature (676)..(676): "n" may be a, t, c, g, other or unknown
  misc_feature (682)..(682): "n" may be a, t, c, g, other or unknown
  misc_feature (684)..(684): "n" may be a, t, c, g, other or unknown
acttccgccccaggtacgctaggccgcggccttcgttcctcccagaaaggagatggtgacattcaaggatgttgctgnggncttcactgaggaggagctggggctgctggactctgtccagaggaagctgtaccgagatgtgatgctggagaacttcaggaacctgctcttagtancacatcagcccttcaagccagacctaatatcccagctggagagagaagaaaagcttttgatggtggagacagaaaccccaagggatggatgttcaggaaggaagaatcaacanaagatggagagtattcaggaagtaacagtaagctacttttcccccaaagagctttcctcccgtcagacctggcaacaaagtgcangtgggttaatcaggtgtcaagatttcctgaaagtttttcaagggaagaattctcagttgcaagaacaaggtaattccctcggccaggtttgggcaggaataccagttcagatttctgaagataagaactatatattgactcatatagggaatggctccaattatataaaaagtcaagggtatccatcttggagggcacatcattcttggaggaaaatgtatctgaaagagtcacataattatcagtgtagatgtcagcaaatttccatgaaaaatcatttctgtaagtgtgacagtgtcagntggctntnacatcacaatgat

SEQ ID NO: 3309 - DNA, 770 bp, Homo sapiens
  misc_feature (614)..(614): "n" may be a, t, c, g, other or unknown
  misc_feature (719)..(719): "n" may be a, t, c, g, other or unknown
  misc_feature (723)..(723): "n" may be a, t, c, g, other or unknown
  misc_feature (754)..(754): "n" may be a, t, c, g, other or unknown
aaactacaacgaaaaaagacagagctcataatggatgctatccataaacaaaagagcttacaattcaagaaaaccatggatgcaaagaagaactatgagcagaaatgccgggacaaagatgaggcagaacaggccgtcagccggagtgccaacctggtgaacccgaagcaacaagaaaagctttttgtgaaactggcaacttcaaagaccgcagtagaggactcagacaaagcatacatgctgcacatcggcaccctggataaggtccgagaagagtggcagagtgagcacatcaaggcctgcgaggcatttgaggctcaagaatgtgaacgaataaacttcttccggaatgcattgtggttacatgtgaatcagctgtcacaacaatgtgtcaccagtgatgaaatgtacgaacaagtccgaaagagtttagaaatgtgcagcattcagagggacattgaatactttgtgaatcaacgcaaaactggacagattccaccagcacccatcatgcatgagaatttctactcctcccagaagaatgcagtcccagcaggaaaggctacagggcctaacttggcaaggagaggaccccttccaattcctaaaagctnaccagatgatcccaattactctttggttgatgactacagtttgctctatcagtaaaatcaatgaaaccagagctttttccggtagtgcttctgggatattggaanggcnccagacacaggcctatagccacgttttttanccatggaaactttgaa

SEQ ID NO: 3310 - DNA, 865 bp, Homo sapiens
  misc_feature (671)..(671): "n" may be a, t, c, g, other or unknown
  misc_feature (701)..(701): "n" may be a, t, c, g, other or unknown
  misc_feature (744)..(744): "n" may be a, t, c, g, other or unknown
  misc_feature (824)..(824): "n" may be a, t, c, g, other or unknown
  misc_feature (836)..(836): "n" may be a, t, c, g, other or unknown
  misc_feature (846)..(846): "n" may be a, t, c, g, other or unknown
tagaaaatgccactcctcgggggaagtccagaatggcaagatgtccaccaacggtgtgtccaacggtgtgtccaatggcctgcaccttcatagcaatggcttccggctgccggagagtaggggacatgtcagcccccaagtagagctaccaccatacctggagcgtgtgaaacagcaagccaatgaggcttttgcctgccagcagtggacccaagccattcagctttacagcaaggctgtgcagagggcccctcacaatgccatgctttatggaaaccgagcagcagcctacatgaagcgcaagtgggatggtgaccactatgatgccctgagggactgcctcaaggccatctccctaaacccatgccacctgaaggcacactttcgcctggcccgctgcctctttgagctcaagtatgtggctgaagccctggagtgcctggacgacttcaaagggaaatttccggagcaggcccacagcagcgcttgtgatgcattgggccgcgacatcacagctgccctcttctctaaaaatgatggtgaggagaagaagggacctggtggcggcgccccagtccgcctccgcagcacgagccgcaaggactccatctcagaggatgaaatggtgctgcgggagcgaagctacgactatcagtttccgctactgcggncactgcaacaccaccacggatatcaaagangccaatttctttggcagcaacgctcagtatatcgcagtggctntgacgatggctccttcttcatctgggaaaaggagaccccaacctggtccgtgtgcttccaaggggattaagtccattggnaactgcttgaancccaccccanttctggttctgggcaccaa

SEQ ID NO: 3311 - DNA, 756 bp, Homo sapiens
  misc_feature (680)..(680): "n" may be a, t, c, g, other or unknown
  misc_feature (732)..(732): "n" may be a, t, c, g, other or unknown
  misc_feature (739)..(739): "n" may be a, t, c, g, other or unknown
catagctcactgcatcctcgaactcctgggctcaagcgatcttcccaccccagcctcccgaggagctgagactacaggcgcgcgccactactcccggctaattgttcaatatttttgtggaaacagggatcttgctatgttcctatggtggtcttgagctccttagcctcctaaagtgttggtatcacaggcgtgagccactgtgcccggcgttaacaatcttctgccccagggtcggccacagttggacaggagcaccctgcctcccctgtagcattcgtccccgtgcccggagttaactcctggacgacgtacacctgctgcactgctggatatagccattcttcatttttccctcctccacccaccatgtacaccccatcagcaagtcccatccgatatacccactacatacatctgccagctgttcccatctccacccacaccccggcctccagcatctgtctggactgctgcggcagatcctcactggtttctctgcttccactctcgcccttcccctaggtccattctccacgtagcagccaaggggattcttatatttatttattatttaatttagttttagagacagggtcttgtcctgatgcccaggctggagtacagtggcatgatcatagctcactgtggcttcaacctcttgggctcaagtgatcctnctgcctcagctcctgagtagctgggactacaggtgtgcaccaccacacctangtatttntatttatttattttttg

SEQ ID NO: 3312 - DNA, 916 bp, Homo sapiens
  misc_feature (729)..(729): "n" may be a, t, c, g, other or unknown
  misc_feature (769)..(769): "n" may be a, t, c, g, other or unknown
  misc_feature (777)..(777): "n" may be a, t, c, g, other or unknown
  misc_feature (829)..(829): "n" may be a, t, c, g, other or unknown
  misc_feature (877)..(877): "n" may be a, t, c, g, other or unknown
  misc_feature (887)..(887): "n" may be a, t, c, g, other or unknown
tacaaaatgctgggatttaccaaccacatcaatccagccatggactttacccagactcctcctggaatgctggccttggacaacatgctgtacttggctaaagtccaccaggacacctacatccggattgtcttggagaacagtagccgggaagacaaacatgaatgcccctttggccgcagtgccattgagctcaccaaaatgctctgtgaaatcctgcaggttggggaactaccaaatgaaggacgcaatgactaccacccgatgttctttacccatgaccgagcctttgaagagctctttggaatctgcatccagctgttgaacaagacctggaaggagatgagggcaacagcagaggacttcaacaaggttatgcaagtcgtccgagagcaaatcactcgagctttgccctccaaacccaactctttggatcagttcaagagcaaattgcgtagcctgagttactctgagattctacgactgcgccagtctgagaggatgagtcaggatgacttccagtccccgccaattgtggagctgagggagaagatccagcccgagatccttgagctgatcaagcagcagcgcctgaaccggctctgtgagggcagcagcttccgaaagattgggaaccgccgaaggcaagaacggttctggtactgccggttggcactgaaccacaaggtccttcactatggtgacttggatgacaacccacaaggggangtgacatttgaatccctgcaggagaaaattcctggtgcanacattaanggcattggcactgggaaagattgtccccacattgaaagagaaaaagtgcttntgaaacagaacaaggaggtgttgggaaatgggctttttcaatccgggntgaaccctgntgaggacctttaactttattggacctaaa

SEQ ID NO: 3313 - DNA, 809 bp, Homo sapiens
  misc_feature (736)..(736): "n" may be a, t, c, g, other or unknown
  misc_feature (783)..(783): "n" may be a, t, c, g, other or unknown
  misc_feature (795)..(795): "n" may be a, t, c, g, other or unknown
gaatgtaaagagatccagggctcttggagagggacaagtgagagccagccaaaaaggaaaaagcaaaggcagaaacggcatcaggagagacagagatgtgaaggagggaaggagcaggagagcaggaaggaaacgcaggaggagggagcagcatctcctgtgaacacagaggagcacctgtttgctgttaaaatcgatctccctcggcaccctgagcaatggatataatatttggcaggaataggaaagaacagctggagcctgtgagggccaaagtgacaggcaagattccagcatggctgcagggaaccctgctccgcaatgggcctgggatgcacacagttggggagtccagatacaaccattggttcgacggccttgccctgctccacagcttcaccatcagagacggtgaagtctattacaggagcaaatacctgagaagcgatacctacaacaccaatattgaggcaaacaggattgtggtgtctgagtttggaacaatggcctatccggacccctgcaaaaacatattttccaaagctttctcctacttgtctcacaccatccccgatttcacagacaactgcctgatcaacatcatgaagtgcggagaagacttctacgcgacctcagagaccaattacatcaggaaaatcaacccacagactctggaaaccctggagaaggttgattatcgtaaatacgtggcggtaaatcttggcaacgtcacatncccattatgatgaagctggaaatgttctaaacatgggccccattcanttgggggaaaanggggaagaccaaat

SEQ ID NO: 3314 - DNA, 863 bp, Homo sapiens
  misc_feature (648)..(648): "n" may be a, t, c, g, other or unknown
  misc_feature (723)..(723): "n" may be a, t, c, g, other or unknown
  misc_feature (738)..(738): "n" may be a, t, c, g, other or unknown
ttattttgctttattcagagagaaagttgattactgagtgctgaattatacaatttaggctaggaaactcgtaactttggtatttaataaaagaaactatacatattctgtttgtaatgtaaataatctataccccatgcacaaatatctgtttcctgggtgtgatatattaaagtatgtattcttattttgaggtatcttttggaaataattgaaagagattaaataacaatttatgccacatgaaaaataattacttagaagtagttaggtatcatgtcttatggctttttatgttccattttggctttttttctcatttgctttattactatatgtacttgcatgtaacagtttgtaagcatatattctgacttattttccttctgtcattatctagtgctgttatgccttcctatcagaatcgataagtcaaactcagaggtgtgattttggtgttgaagttttcaggacagagatactatttccatggatgcattttaagtaataaaattaggggaagtgaaatcagaaaatgaaaaatgattacaaaataactttcaggttttctataatcaatggctttaaaaagtagacagtcttaattaattttaaattagcttgctcagaaaggtcatgccatacagncctatcataaaaggaacactataagaattaagcaatgaacagcatgatttctgatccccagtgaggactgacagngtataaaagatacangtatgctactggatgtacccgataattgtttgagagtttctagtgaaaaactcaaatattgctagcttaaccacagtagtagggggcaaccttattatatgggagagcttcaaaacatactgtcc

SEQ ID NO: 3315 - DNA, 786 bp, Homo sapiens
  misc_feature (709)..(709): "n" may be a, t, c, g, other or unknown
  misc_feature (745)..(745): "n" may be a, t, c, g, other or unknown
  misc_feature (748)..(748): "n" may be a, t, c, g, other or unknown
gtattttttcagtaagcacccagaggcctccattcaggctgtttttttcagatgcccaaatgcatatttgggcattagaaggtctgtcgcacttagtagcagcatcatttacagaggatagatttggagttgtccagacgacactaccagctatccttaatactttgttgacactgcaagaggcagtcgacaagtactttaagcttcctcatgcttccagtaaaccaccccggatttcaggaagccttgtggacacttcatataaaacattaagatttgcattcagagcatcactgaaaactgccatctatcgaataactactacatttggtgaacatctgaatgctgtgcaagcatctgcagaacatcagaaaagacttcaacagttcttggagttcaaagaatagttaagtaatataaactgtgttcattacactgctgatacaactacagatgggacagtaaatgttcagcattcttggatcagaagaaaacggactaattagatgcttcctttgtcgtggtggttgctttgaaaactatactttaatgggagaaatcatggaaagaaattctcaacagaataactgaaaactgccttttctgtaccgattgctttttgtgtgtgtggtataataaaatctttattcaattttacagaagcattgatggcagtcgaaatgtctctagctcatataacttaataggnaataactaaaaaacttttagaatttacttttgaaangangggaacccgttctgaaatgagtatagggtgattcatag

SEQ ID NO: 3316 - DNA, 662 bp, Homo sapiens
  misc_feature (244)..(244): "n" may be a, t, c, g, other or unknown
  misc_feature (274)..(274): "n" may be a, t, c, g, other or unknown
  misc_feature (364)..(364): "n" may be a, t, c, g, other or unknown
  misc_feature (459)..(459): "n" may be a, t, c, g, other or unknown
  misc_feature (580)..(580): "n" may be a, t, c, g, other or unknown
  misc_feature (637)..(637): "n" may be a, t, c, g, other or unknown
  misc_feature (639)..(639): "n" may be a, t, c, g, other or unknown
gcactgtgctgcctgtggccaccatccagaacgccagtactgccatgctgatggcagccagtgtggctcgcaaggctgtggtgctgcctggggggactgccaccagccctaagatgattgctgagaacgtgctaggcctggtgccccaagccctgcctaaggctgacgggcgggcagggctggggactgggggacagaatgtgaatggtgcctcggtggtgatggtgcaaccttcaaagacagntactgggccaagtacagggggcggcacatngatatcacggacccagtccagcctggtggaggccttcaacaagatcctcaacagcaagaacctgctccctgcctatgggccaaacctgancccaccagctgaggctgggctggccctgccttccaccggctaccgctgcctggagtgtggggatgccttctcattggagaagagcctggcacggnactatgaccgtcggagcatgcgcatcgaggtcacctgcaaccactgcgcccgccgcctggtcttcttcaacaagtgcagcctgctcctgcatgcacgtgaacacaatgacaaggggctcgncatgcagtgctcacatttggtcatgaggctgtacccttgaccagatggtgggggcancncggacattacaccgatgctgcct

SEQ ID NO: 3317 - DNA, 824 bp, Homo sapiens
  misc_feature (805)..(805): "n" may be a, t, c, g, other or unknown
  misc_feature (809)..(809): "n" may be a, t, c, g, other or unknown
  misc_feature (819)..(819): "n" may be a, t, c, g, other or unknown
attaaggaaattcaagtcccatataatgtccagtggatggcaatcttcagtgaacaactctgtgtgggattccagtcaggatttctaagataccccttgaatggagaaggaaatccatacagtatgctccattcaaatgaccatacactatcatttattgcacatcaaccaatggatgctatctgcgcagttgagatctccagtaaagaatatctgctgtgttttaacagcattgggatatacactgactgccagggccgaagatctagacaacaggaattgatgtggccagcaaatccttcctcttgttgttacaatgcaccatatctctcggtgtacagtgaaaatgcagttgatatctttgatgtgaactccatggaatggattcagactcttcctctcaaaaaggttcgacccttaaacaatgaaggatcattaaatcttttagggttggagaccattagattaatatatttcaaaaataagatggcagaaggggacgaactggtagtacctgaaacatcagataatagtcggaaacaaatggttagaaacattaacaataagcggcgttattccttcagagtcccagaagaggaaaggatgcagcagaggagggaaatgctacgagatccagaaatgagaaataaattaatttctaatccaactaattttaatcacatagcacacatgggtcctggagatggaatacagatcctgaaagatctgcccatgaaccctcggcctcaggaaagtcggacagtattcaatggctcaagtcagtattccatctatcacccaaatnccgncctgagccangcccg

SEQ ID NO: 3318 - DNA, 725 bp, Homo sapiens
  misc_feature (3)..(3): "n" may be a, t, c, g, other or unknown
  misc_feature (575)..(575): "n" may be a, t, c, g, other or unknown
  misc_feature (676)..(676): "n" may be a, t, c, g, other or unknown
  misc_feature (690)..(690): "n" may be a, t, c, g, other or unknown
  misc_feature (702)..(702): "n" may be a, t, c, g, other or unknown
agncccggcttggaactgaactgtgtgagcacgggtcctggaacccgggcccagaaccggcgagcccaggtctgagcccagagctcagcggtcagcctcgtaggccctgactcggaatcgagccgaggcgctgaggttggagccggagagcgtgagagccgaagagcagggagggcgggccggctgcgcgtccgacgagtcgcagagcaggaccgcggaaggcagggagacggccgcaagcccagggcagagggcagagggcagagagcggcctggctcggcggagagggcgccgcccggccggaaccaagctcgccgcccgggacggcgggccccgtggggcgcggacccagggtggccgtgggtccgcagcgactccccggccgacggcggggggcgtgccccctcccagcccagcctccccaacccggcccgcccgccgcgtcgcgggggcatgtgagcgggaagcctaggctgccagccgcgaggaccgcacggaggaggagcaggagcgcggagccgcgagccccgagccccgagcccggcgcctggctgagtagactgtagctctccanagggtaatgggtccccagaacccaagagaccaggagtgtcggaggctgcctctggaagccaggagaactggacttcaaccgaaatttgaaagaagtggtgncagccattgagaanctgtttgtccantgacttggaaaggagaaggttct

SEQ ID NO: 3319 - DNA, 864 bp, Homo sapiens
  misc_feature (613)..(613): "n" may be a, t, c, g, other or unknown
  misc_feature (745)..(745): "n" may be a, t, c, g, other or unknown
  misc_feature (753)..(753): "n" may be a, t, c, g, other or unknown
  misc_feature (835)..(835): "n" may be a, t, c, g, other or unknown
  misc_feature (856)..(856): "n" may be a, t, c, g, other or unknown
  misc_feature (859)..(859): "n" may be a, t, c, g, other or unknown
ccccctgggtcccaccctccctcaaggcctcctccacctccacctccaccccgcctggcctggcgtccacctctgcggctcctacctgggtgcaatcgagttaaatggctgataagcagatcagcctgccagccaagctcatcaatggcggcatcgccgggctgatcggtgtcacctgcgtgtttcccatcgacctggccaagaccaggctgcagaaccagcagaacggccagcgcgtgtacacgagcatgtccgactgcctcatcaagaccgtccgctccgagggctacttcggcatgtaccggggagctgctgtgaacttgaccctcgtcacccccgagaaggccatcaagctggcagccaacgacttcttccgacatcagctctctaaggacgggcagaagctgaccctgcttaaagagatgctggcgggctgtggggctggcacctgccaggtgatcgtgaccacgcccatggagatgctgaagatccagctgcaggatgcagggcgcattgccgcccagaggaagatcctggctgcccagggccagctctcggcccaggggggtgcccagccctcagtggaggctccagctgcccctcggcccacggncacccagctgacccgcgacctgctgcggagccgtggcattgccggtctctacaagggactcggggccacgctgctaaggatgtcccttctctgtggtgtacttccgtctttgcaactgaaccagtgggccgnccggcgtncgaagagaatcgcttctacgtgtcttctggccgctgtgtggttggatgccgccgttgtggccgtaaccctggatgtgtgaanaccggttcatccttcaccagngtnacgag

SEQ ID NO: 3320 - DNA, 840 bp, Homo sapiens
  misc_feature (3)..(3): "n" may be a, t, c, g, other or unknown
  misc_feature (7)..(7): "n" may be a, t, c, g, other or unknown
  misc_feature (661)..(661): "n" may be a, t, c, g, other or unknown
  misc_feature (694)..(694): "n" may be a, t, c, g, other or unknown
  misc_feature (754)..(754): "n" may be a, t, c, g, other or unknown
  misc_feature (797)..(797): "n" may be a, t, c, g, other or unknown
  misc_feature (829)..(829): "n" may be a, t, c, g, other or unknown
gangatngtgatccggggagacaggaacacgggcaagacagcgctgtggcaccgcctgcagggccggccgttcgtggaggagtacatccccacacaggagatccaggtcaccagcatccactggagctacaagaccacggatgacatcgtgaaggttgaagtctgggatgtagtagacaaaggaaaatgcaaaaagcgaggcgacggcttaaagatggagaacgacccccaggaggcggagtctgaaatggccctggatgctgagttcctggacgtgtgcaagaactgcaacggggtggtcatgatgttcgacattaccaagcagtggaccttcaattacattctccgggagcttccaaaagtgcccacccacgtgccagtgtgcgtgctgggaaactaccgggacatgggcgagcaccgagtcatcctgccggacgacgtgcgtgacttcatcgacaacctggacagcagacctccaggttcctcctacttccgctatgctgagtcttccatgaagaacagcttcggcctaaagtaccttcataagttcttcaatatcccatttttgcagcttcaggtaagcactcaccacgtggggtggagtggctgctggtctctcacctccttccaggtgtctcctgtgtagcaacgggtctccctnctaacccctgagaaaggctgtgggacctgctcngagattggctgctggcaaggggcccagcgttcttacttgcacctgcctgcttcttgggtnggcaagaagggtacaggggtccttgaagggcttagaccccaantcccaaggaagccccctccaaccttttttgcngggggaacccc

SEQ ID NO: 3321 - DNA, 776 bp, Homo sapiens
  misc_feature (679)..(679): "n" may be a, t, c, g, other or unknown
  misc_feature (764)..(764): "n" may be a, t, c, g, other or unknown
  misc_feature (766)..(766): "n" may be a, t, c, g, other or unknown
gaagattctgaagctgtggggatctccagcattatcagcaacctgataaccgtgttcccacgaaatgttttaactgccattccaagtgaacttttctcctcctttgttaactgcctcacacacctcacttgttcttttgggcgaagtgctgcattggaagaagtgcttgataaagatgacatggtatacatggaagcatatgataaattgttggagtcctggttaactttggttcaagatgacaaacatttccataaaggcttttttacccaacatgcagttcaagttttcaattcctatattcagtgccacctagctgctccagatggcacaagaaatttgactgccaatggtgtggcctctcgtgaggaggaagaaataagtgaacttcaagaggatgatcgagaccagttttctgatcaactggccagtgtaggaatgctaggaagaattgctgcagaacactgtatacctcttctgacaagtttattagaagaaagagtaacaagactccatggtcagtcacaacgacatcagcaacagttacttgcttcaccgggttcaagcactgttgacaacaaaatgcttgatgatctctatgaagatattcactggcttattttagttacaggctacctcttagctgatgatactcagggagagactccgctaatacctncagaaataatggaatattccattaagcattcatctgaagttgcctttattccaccctttaaattttgggaacttccggaaaaaangnttttttcctt

SEQ ID NO: 3322 - DNA, 697 bp, Homo sapiens
  misc_feature (665)..(665): "n" may be a, t, c, g, other or unknown
  misc_feature (679)..(679): "n" may be a, t, c, g, other or unknown
  misc_feature (685)..(685): "n" may be a, t, c, g, other or unknown
cggtgctcgaggcggaggggaggaggcggggaaggcgaaaggaggggttcggaggagagggttcgatctccgtacgcaccaggtggagagcgcgcgcctggggaaggaggcgtgtcgagtagcgggagggaagttgtagtacgggtggggagaaccacactaaagggagatgggggtgagcagttaaggaaccgcgagagcgccaggtagagagctgcccttaatgggggaacctggagaagagtgtgagcgtagtggggaagaagggagaagacaaataggttcgggaatgtgtctccgagggcgcgagcgggcgctaggacccggcgtcgaaaagatgaggctttggggctgtcggggcgcgcgctcccgttggtgacgcgggggtggcggaggtctccggccgggacgaagccccgcagggagtggatactcgacagccttcggcctccgctcgcttctccctgcgcgctttcctgctcccctttccggctacagccctggggtcgagctctggtcgaagcgcattccgcctctcctttggccctgcggcttcctttgcaacccgccgccacccttgctctccgtggtttacccctgggctctgaggcctggtggtagcggccactgccgcggattgctgttgcggacccggggcggggcangtggaaaagctcgntcttcncgggtttcgttg

SEQ ID NO: 3323 - DNA, 760 bp, Homo sapiens
  misc_feature (711)..(711): "n" may be a, t, c, g, other or unknown
  misc_feature (740)..(740): "n" may be a, t, c, g, other or unknown
  misc_feature (743)..(743): "n" may be a, t, c, g, other or unknown
atcgcagcgtcggatgttcagagcagcagaagccggcgtcgtcggatgttgtgttgcccgccaccatgagctacacaggctttgtccagggatctgaaaccactttgcagtcgacatactcggataccagcgctcagcccacctgtgattatggatatggaacttggaactctgggacaaatagaggctacgagggctatggctatggctatggctatggccaggataacaccaccaactatgggtatggtatggccacttcacactcttgggaaatgcctagctctgacacaaatgcaaacactagtgcctcgggtagcgccagtgccgattccgttttatccagaattaaccagcgcttagatatggtgccgcatttggagacagacatgatgcaaggaggcgtgtacggctcaggtggagaaaggtatgactcttatgagtcctgcgactcgagggccgtcctgagtgagcgcgacctgtaccggtcaggctatgactacagcgagcttgaccctgagatggaaatggcctatgagggccaatacgatgcctaccgcgaccagttccgcatgcgtggcaacgacaccttcggtcccagggcacagggctgggcccgggatgcccggagcggccggccaatggcctcagctatgggcgcatgtgggaagaccccatgggggcccggggccagtgcatgtctggtgcctntcggctgccttccttttttccagaacatnatncccgagtaccggatgtt

SEQ ID NO: 3324 - DNA, 790 bp, Homo sapiens
  misc_feature (743)..(743): "n" may be a, t, c, g, other or unknown
  misc_feature (775)..(775): "n" may be a, t, c, g, other or unknown
  misc_feature (779)..(779): "n" may be a, t, c, g, other or unknown
gattatcagctgccaaaatggtatattacttagatccttctagtcagaagcgagctatagagttggcaacaacacttgatgaatctctcactaacagaaacctccagacatgtatggaggtattggaagccttgtatgatggtagcctaggagactgtaaagaagctgctgaaatttatagagcaaattgtcataagcttttcccttatgctttggctttcatgcctcctggatatgaagaggatatgaagatcacagttaatggagatagttctgcagaagctgaagaactggccaatgaaatttgaacatcactaaacaagcaaatggaatgactttggaccatatctagtatataatatttttgtcacgcacctgctgcattgctctaacttacacagaatgagaggagtaaatgttcttgccttcaaatagtgttttacgttttttatcctgctgaaaaagtatatataaaatatctaacattacaggatagaggttcagtttcttaaaaaattaaagctgctaaaattgagtggttaaaaaagataccttatcctattcctccccacccacccatgtttttaaactaatttatataaaatctggaggctgttacagctaacaaagcaggtgtgtggcagaaatattactttaaatttgtcttgtgagattttactatatctcagacagcataaatgctggtttagcactggattctttcactgagcacaaagagttgntggggctttagcatctgactggatttggtacngggntgattcttacc

SEQ ID NO: 3325 - DNA, 797 bp, Homo sapiens
  misc_feature (783)..(783): "n" may be a, t, c, g, other or unknown
  misc_feature (786)..(786): "n" may be a, t, c, g, other or unknown
  misc_feature (788)..(788): "n" may be a, t, c, g, other or unknown
caggaaagagtaggaaactttttggcagacttttacctggtgaatggacttgttttagaatcaaggaaaagaagagaacatctcagtgaagaggatattcttcgaaataaggccatcatggagagtttgagtaaaggtggaaacataatggaacagaattttgagccgattcgaagacagtctcttacacctcctcctcagaacactattacatgggaagaatatatatctgctgaaaatggaaaagctcctcatctgggtagagaattggtgtgcaaagagagtaagaaaacgtttaaagctacgatagccatgagccaggaatttcccttagggatagagttattattgaatgttttagaagtagtagctcccttcaagcactttaacaagcttagagaatttgttcagatgaagcttcctccaggctttcctgtaaaattagatatacctgtgtttcccacaatcacagccactgtgacttttcaggagtttcgatacgatgaatttgatggctccatctttactatacctgatgactacaaggaagacccaagccgttttcctgatctttaactgacgtggaaaaggatgccgtctaaccaaggaaagaaaatacagagaccctagaagtggatccaaatagaagggacaagtgctttcagtgaagaaaagggaattacacattgaatcgacacatcagtaatacgatacagtgaaatgggcctctaataagaatttcaccgagttttctgatgtgccattttttggcttttaaaaatntcntnttataaatg

SEQ ID NO: 3326 - DNA, 822 bp, Homo sapiens
  misc_feature (756)..(756): "n" may be a, t, c, g, other or unknown
  misc_feature (771)..(771): "n" may be a, t, c, g, other or unknown
  misc_feature (793)..(793): "n" may be a, t, c, g, other or unknown
gagtcctccccgcctcgcagagttgggagaaggcagggtggggggtgtggaaaaataaaaggaaaagtccttgcaccatgtagatcagcgtcccccactttggcatcccggccggccggggacctcccagtctgcggccatgaacgcgagcagcgagggcgagagcttcgcgggctcggtgcaaattccaggtggcacaacggtgctggtggagctgactcccgacatccatatctgcggcatctgcaagcagcagtttaacaacctggatgcctttgtagctcacaagcaaagtggctgccagctgacaggcacatccgcagcagcccccagcacggtccagtttgtatcggaggaaacagtgcctgccacccagactcagaccaccaccagaaccatcacctcggagacccagacaatcacagtttcagctccagaatttgtttttgaacatggctatcaaacttacctgcccacggaaagtaatgaaaaccagacagccactgtcatctctctccctgccaagtcacgcaccaaaaagcccacaacaccacctgctcagaaaaggcttaactgttgctatccaggttgccaattcaagactgcttatggcatgaaggacatggagcggcatttaaaaattcacacgggagacaaaccccataagtgtgaagtctgtggcaagtgctttagcccggaaagacaagcttgaaaactacatgcggtgccacacgggcgtgaagccctacaagtgtnagacgtgtgacttcnccgttgccgacagcaacagctnaacagcaccctgaggatccactcggacca

SEQ ID NO: 3327 - DNA, 660 bp, Homo sapiens
  misc_feature (583)..(583): "n" may be a, t, c, g, other or unknown
  misc_feature (622)..(622): "n" may be a, t, c, g, other or unknown
  misc_feature (652)..(652): "n" may be a, t, c, g, other or unknown
agagccgcgggatttgcggccgccgccatgccgtcgtccccgctgcgggtggcggtggtgtgctcgagcaaccagaaccggagcatggaggcgcacaacatcctcagcaaacggggattcagcgtccgatcctttggaacagggactcacgtgaagcttccaggaccagctcccgacaagcccaatgtttatgatttcaaaaccacatatgaccagatgtacaatgatcttcttaggaaagacaaagaactgtatcccagcgggttgccctttaaaaaccccccgtgtggtcctccctggaaggtgttacgtgtggctcgggcacaggaggcgtgtcaccctgtgcagtgcacacactggctcctctgtctttgcgagagcttggtttctattcctggtgcacgtcggatcgtccacgggttagttccagtgccacccatggcagtaggcgtggtgaggcgcacagacacggtgtggggttcaccctgacgtggttcagcagagggtcgtgacatagcgtagaccagggatgcttaggtgaggaggtggaacccacaaaatcccattgcttttcacactgcanggctgcccgttatttcctttgcaggttggtgtgcgtgcntgtgtgcctgcgtgcctgatacacatgganccgggctg

SEQ ID NO: 3328 - DNA, 805 bp, Homo sapiens
  misc_feature (735)..(735): "n" may be a, t, c, g, other or unknown
  misc_feature (755)..(755): "n" may be a, t, c, g, other or unknown
  misc_feature (804)..(804): "n" may be a, t, c, g, other or unknown
tctaaacatcattccaacctttgcaaatcttatagactacccatccatgaaaaacgctttgataccaagaattaaaaatgcttgtctacaaacatcttcccttgcggttcgtgtaaattcattagtgtgcttaggaaagattttggaatacttggataagtggtttgtacttgatgatatcctacccttcttacaacaaattccatccaaggaacctgcggtcctcatgggaattttaggtatttacaaatgtacttttactcataagaagttgggaatcaccaaagagcagctggccggaaaagtgttgcctcatcttattcccctgagtattgaaaacaatcttaatcttaatcagttcaattctttcatttccgtcataaaagaaatgcttaatagattggagtctgaacataagactaaactggagcaacttcatataatgcaagaacagcagaaatctttggatataggaaatcaaatgaatgtttctgaggagatgaaagttacaaatattgggaatcagcaaattgacaaagtttttaacaacattggagcagaccttctgactggcagtgagtccgaaaataaagaggacgggttacagaataaacataaaagagcatcacttacacttgaagaaaaacaaaaattagcaaaagaacaagagcaggcacagaagctgaaaagccagcagcctcttaaaccccaaggccacacctggtgctactggtnaacagactaaggacttgacngacacactggtgggtaatatggcatccttggaccagcccttttggttgna

SEQ ID NO: 3329 - DNA, 793 bp, Homo sapiens
  misc_feature (718)..(718): "n" may be a, t, c, g, other or unknown
  misc_feature (739)..(739): "n" may be a, t, c, g, other or unknown
  misc_feature (774)..(774): "n" may be a, t, c, g, other or unknown
agcgcgcggaagaaaaaccagcaagaaggcggcgggggaagatggcggtcctggggtagagtttgcaagctttctgactaggctagtcgagtaactattcgggtcatggcgtcaaactcaactaagtctttcctggcagatgccggctatggcgaacaggaactggatgccaactctgcccttatggaattggacaaaggcctaagatctggcaaacttggtgaacagtgtgaagcagttgttcgctttcccagactttttcagaagtatccattccctattcttatcaattctgcattcctaaagttagctgatgttttcagagttggaaataatttcctgaggctatgtgttcttaaagttacccaacaaagtgagaaacatttggagaagattctaaatgtggatgaatttgtgaagagaattttttctgtgattcatagtaatgatcctgtggcaagagccatcaccctccggatgttgggaagtctggcatcaataattcctgagaggaagaatgctcatcatagtattcgtcagagtttagattcacatgataatgtagaagttgaagctgctgtttttgctgctgcaaacttctctgcacagtcaaaggattttgctgtaggaatctgtaacaaaatcagtgaaatgattcaaggtttagcgacaccagtagacttgaagctaaaattgatcccattctacagcacatgcnccatgatgcaatcttggcttncagtgctcgtcaacttttacaacagctggcacatnctatccgtcaccaaaatgg

SEQ ID NO: 3330 - DNA, 706 bp, Homo sapiens
  misc_feature (567)..(567): "n" may be a, t, c, g, other or unknown
  misc_feature (626)..(626): "n" may be a, t, c, g, other or unknown
  misc_feature (682)..(682): "n" may be a, t, c, g, other or unknown
  misc_feature (701)..(701): "n" may be a, t, c, g, other or unknown
gaaaaggttgcgaagatggcgacggccttgagcgaggaggagctggacaatgaagactattactcgttgctgaacgtgcgcagggaggcctcttctgaagagctgaaagctgcctaccggaggctctgtatgctctaccatccagacaagcacagagacccagagctcaagtcacaggcggaacgactgtttaaccttgttcaccaggcttacgaagtgcttagtgacccccaaaccagggccatctatgatatatatgggaagagaggactggaaatggaaggatgggaggttgtggaaaggaggagaacccctgctgaaattcgagaggagtttgagcggctgcagagagagagagaagagaggagattgcagcagcgaaccaatcccaagggaacgatcagcgttggagtagatgccaccgacctttttgatcgctatgatgaggagtatgaagatgtgtccggcagtagctttccgcagattgaaattaataaaatgcacatatcccagtccattgaggcacccttgacagcgacagacacagccatcctctctggaagcctntcaacccagaatggaaatggaggaggttccattaactttgcgctcagaccagttacttnggcaaagggatggggagagttggaatttggagctggagacctacaggggcctttgntcggtctcaactgttccgnaatct

SEQ ID NO: 3331 - DNA, 814 bp, Homo sapiens
  misc_feature (646)..(646): "n" may be a, t, c, g, other or unknown
  misc_feature (725)..(725): "n" may be a, t, c, g, other or unknown
  misc_feature (756)..(756): "n" may be a, t, c, g, other or unknown
  misc_feature (784)..(784): "n" may be a, t, c, g, other or unknown
tgaattagaagattttccagtacttggaattgactgtgagtgggtaaatttggaaggcaaagccagccctctgtcacttctacaaatggcctccccaagtggcctgtgtgtcttggttcgcctgcccaagctaatctgtggaggaaaaacactaccaagaacgttattggatattttggcagatggcaccattttgaaagttggagtgggatgctcagaagatgccagcaagcttctgcaggattatggcctcgttgttagggggtgcctggacctccgatacctagccatgcggcagagaaacaatttgctctgtaatgggcttagcctgaagtccctcgctgagactgttttgaactttccccttgacaagtcccttctacttcgttgcagcaactgggatgctgagactctcacagaggaccaggtaatttatgctgccagggatgcccagatttcagtggctctctttcttcatcttcttggataccctttctctaggaattcacctggagaaaaaaacgatgaccacagtagctggagaaaagtcttggaaaaatgccagggtgtggtcgacatcccatttcgaagcaaaggaatgagcagattgggagaagaggttaatggggaagcaacagaatctcancagaagccaagaaataagaagtctaagatggatgggatggtgccaggcaaccaccaagggagagaccccagaaaacatnaaagaaagcctctgggggtgggctattctgncagaaaatcacctctttatgataactgntttcttcatgctcctgatggacaagcccct

SEQ ID NO: 3332 - DNA, 794 bp, Homo sapiens
  misc_feature (593)..(593): "n" may be a, t, c, g, other or unknown
  misc_feature (697)..(697): "n" may be a, t, c, g, other or unknown
  misc_feature (738)..(738): "n" may be a, t, c, g, other or unknown
  misc_feature (761)..(761): "n" may be a, t, c, g, other or unknown
gagagagaatgttaaaggatgaagtttccaaatgtgtatgtcgctgtgaagatctggagaaacaaaacagattacttcatgatcagatcgaaaaattaagtgacaaggtcgttgcctctgtgaaggaaggtgtacaaggtccactgaatgtatctctcagtgaagaaggaaaatctcaagaacaaattttggaaattctcagatttatacgacgagaaaaagaaattgctgaaactaggtttgaggtggctcaggttgagagtctgcgttatcgacaaagggttgaacttttagaaagagagctgcaggaactgcaagatagtctaaatgctgaaagggagaaagtccaggtaggtatactaagctttaagaaagcacttgttaaatcaaaagagaagcactcatttatatctctaccatttaacgtaatgtaaaatttaacttgaagtaagcattcttctaaacttgtaaattcattaagcatttgttaaacactaatatagtatagtgcttaaaagtaaaggctctgtaaccaaactgcctggtttcagattctagcttcataccattagctgtggccttgggtacattgnttaacttccctgctcttagtttcttcatctgtaatatttggataataatgagggttaattgagtttgtgcacatgaagcatttagaagcatgtctggtatgtantgggtgcttaataaattccagctatcttaatttattatagntatggattattcctgtggatagncattctaggataaaggggatttaaactgcttcc

SEQ ID NO: 3333 - DNA, 875 bp, Homo sapiens
  misc_feature (760)..(760): "n" may be a, t, c, g, other or unknown
  misc_feature (853)..(853): "n" may be a, t, c, g, other or unknown
  misc_feature (863)..(863): "n" may be a, t, c, g, other or unknown
atatatgctgtaataatttaagtaaaattaccttcttttgtggaaatgtagaacagctgctcactgaaatggatatttcttcatatccttgaaaactgttgagtcacccttagtattctcttcttagatataataagttctaatttttccttacttggctcatttttaacccttttatctttttattattctgaaatctctccaaggccctcacatgtcctcaagttgtagagtcttaaattggacaacactttaattacagcctgaaggttaggtagttgttattccatttatatatcttagtatttgagtttacttttgaaatataaagtcttagtgactaatttagcatgtggttctctgccactcccttcctgaccacccaccacccctcattcttatcttctttttttaccttgtttgtacaaaaaccagttgttgcctattttatttcttctgtccataccctgtctgtctatgcatttaaaaacagagaactcattccttataaaacagacaaaccagggataattgtcaacatcaaaaaagaattctttaaatcactgcaggcttcctttaaataggtgtttcctgtggtggttttaagtgtttttatataggtcatcaactgcttgatataaagaaactaaagataaagggttaagaggcagtgccagttgaagaacagttagaaattgggataaaacagtagtcttaagtaaacagtaaaatcattcagattcacagaaaaaaaatatgnatatatatatttttgagatggagcttacagggtgtccagcttggaatgcatggcgtgatctagttactgcaacttggctccgggtcaagcganctctgctaantccgagagtgga

SEQ ID NO: 3334 - DNA, 747 bp, Homo sapiens
  misc_feature (638)..(638): "n" may be a, t, c, g, other or unknown
  misc_feature (661)..(661): "n" may be a, t, c, g, other or unknown
  misc_feature (724)..(724): "n" may be a, t, c, g, other or unknown
  misc_feature (742)..(742): "n" may be a, t, c, g, other or unknown
aaacttcattgagcacctgggtcgttttcctgctcatatcctggactgtctttcagggatttactaccggcttccgggacttgagcaagtcttgaatacgcaggatgttcaggatgttcagaacgttcagaacattttagaaatgctgttgcgactcctggacacttaccgggacaagattcccgaggaggccttgtcaccatcctacctgactgtgtgtctgaaactgcatgaagccatctgcagcagcacaaagctacttaagttttacgagctgccagccttatctgccgagattgtctgcagaatgattagacttctatctctggtggattctgcaggacagagagatgaaactggaaataattcagtccaaacagtcttccaagggacccttgctgctacgaaaaggtggctccgagaagtttttacaaagaacatgctcacatcttcaggtgcctcattcacatacgtcaaggaaattgaggtctggaggcggctggtggaaatccaattccccgcggagcatggctggaaggagtcgttgctgggagacatggaatggaggctcacaaaggaggaacccctcttccagatcactggctactgcaatagttgctgggacaccaaaggcttanaggacagtgtggccaagaccttngagaaatgcatcattgaagcccgtgagctcaacctggcaggtgaacaatcttttcttctgggnaacggattcggcttacanctggg

SEQ ID NO: 3335 - DNA, 774 bp, Homo sapiens
  misc_feature (654)..(654): "n" may be a, t, c, g, other or unknown
  misc_feature (734)..(734): "n" may be a, t, c, g, other or unknown
  misc_feature (755)..(755): "n" may be a, t, c, g, other or unknown
  misc_feature (760)..(760): "n" may be a, t, c, g, other or unknown
agtgggcgggcgcggcgcattgctgctcggcggcgccggcgccggggtccgggcggccatggggcaacaggcggccagggcgccaagggccaggtagcgacggctggcggcggcgcggcggcggggcctgcgggctcggtccggcatgtagacgcccccgcaggcgcccgcggcagcgaacggcatcagtgtttttctgaccgaagttctcatttcctgacaatggaaatggaacaagaaaaaatgaccatgaataaggaattgagtccagacgcggctgcttactgctgctcggcctgccacggcgatgagacctggagttacaaccaccccatccggggccgggccaagtctcgcagcctgtctgcctcgcccgccctggggagcaccaaggagttcaggaggacacgctctcttcatgggccatgcccggtgaccacttttggaccaaaggcctgtgtgctgcagaacccccagaccatcatgcacattcaggaccccgcgagccagcggctgacgtggaacaagtccccaaagagcgtccttgtcatcaagaagatgagagatgccagcctactgcagccgttcaaggagctcttgcacgcacctcatggaggagaacatgatcgtgtattgtggaaaagaaaagtgctngaagacccttgccatcggcagccaatgaaaagcttttgggggcaagtggaaagaaagaaaaatttcttgtacccttttcnaaggaaagaattattgaatgnaccanttttccccaattca

SEQ ID NO: 3336 - DNA, 669 bp, Homo sapiens
  misc_feature (592)..(592): "n" may be a, t, c, g, other or unknown
  misc_feature (596)..(596): "n" may be a, t, c, g, other or unknown
  misc_feature (657)..(657): "n" may be a, t, c, g, other or unknown
agagcggagcgaggaccgcgtccggcgcagtcttcaatgagcagcgcggaaactgcaccccagacccgagcctgctgcgcgccccctcccagagctcacctggtgccaggtaacaggcctggcctcgccctgtggatgatgatggccttgcccccgtgagctacaacctggccttcagcacccgcccacctccaaccagcaggatgcggctgtggaaggcggtggtggtgactttggccttcatgagtgtggacatctgcgtgaccacggccatctatgtcttcagccacctggaccgcagcctcctggaggacatccgccacttcaacatctttgactcggtgctggatctctgggcagcctgcctgtaccgcagctgcctgctgctgggagccaccattggtgtggccaagaacagtgcgctggggccccggcggctgcgggcctcgtggctggtcatcaccctcgtgtgcctcttcgtgggcatctatgccatggtgaagctgctgctcttctcagaggtgcgcaggcccatccgggacccctggttttgggccctgttcgtgtggacgtacatttcactcggcgcatncttnctgctctggtggctgctgtcaccgtgcgggcaaggcacccaagccctggaccaggggcggncaccgaggctta

SEQ ID NO: 3337 - DNA, 769 bp, Homo sapiens
  misc_feature (745)..(745): "n" may be a, t, c, g, other or unknown
  misc_feature (753)..(753): "n" may be a, t, c, g, other or unknown
  misc_feature (762)..(762): "n" may be a, t, c, g, other or unknown
attcttccacccggcaccggctccgcaatgaacaacttcaggttcactgagctgagcggattccactcgctgtgccctcggagcctgcctgaatctcccgcccagtctcaaaccatgcagctgagtaactgcaagggcgcctttgaggagtagcacgcagagagtgtcaatgaagacctcaaagtctggagaaaaatgacctttcatggaataagaagtatacctccttctacatgtttttgtcttactgacctctgataactggaacacatgactctgggtctgtagaaagtcaactgatcaaactcatcctcaccatgcatcaactgttcagactggttttgggacaaaaagatctttcacgagctggggacctcttctccttagatgactctgagattgaagacagccttacagaagctttggagcaaattaagataattagctcatcttcagattaccaaaccaataacaatgaccaggcagtagttgaaatctgtatcacaagaatcacaacagccatcagagagaccgagtccattgaaaagcatgcaaaggcccttgtggggctctgggactcctgcttggaacataacctgagaccctttgggaaagacgaagacacttctcatgcaaaaatcgcatctgatatcatgagttgcattttacagaattacaaccgacccccagtgatggcattagccattcccattgcagtgaaaattcttcacagaggcaacaaggnactgtgcnggaatatgnctaacta

SEQ ID NO: 3338 - DNA, 677 bp, Homo sapiens
  misc_feature (617)..(617): "n" may be a, t, c, g, other or unknown
  misc_feature (671)..(671): "n" may be a, t, c, g, other or unknown
  misc_feature (676)..(676): "n" may be a, t, c, g, other or unknown
gagaacaacggaggcagaggagctgaagactccagtatgcaactgactacaaggaggtagtcgtttgaaaagctttctttccttctctgaactccttctttccctcctctcaggtcattgggtgaccccgggccgggcggagacaggtgaatcccaagagaggaggaagagggagggacagatgatggagggagaaccgcgtttaggcaatgaatgagcctgctgcatccgcaccacctgttccttccaagggtgccaccccgacctgccagcagggttcccacaccaaccgggccgcgactcctgccggtgtcgcccacttgcccgccaaaggccgggcctcttctcccccagatcggggagaatgagaaccggcagtctagaagccgggaggtcggggcctagtccggaaccagggcctcaagcgtggggatggaatgaagaagcctgtggtccctggcgcgcgggccatagtaggaaccacagagagggagcaaagcaatgcattcggcctgacgagagctatgaaggcggggtcccgggcgggagtggctcaatgcccgccgggccgaggttaggggtgacaggcccggttaccggctaaatcctcccaccgnttgccggaccttacacttaccaagatccgcttgaaagcgcattcttcttgggcnggagnt

SEQ ID NO: 3339 - DNA, 717 bp, Homo sapiens
  misc_feature (663)..(663): "n" may be a, t, c, g, other or unknown
  misc_feature (674)..(674): "n" may be a, t, c, g, other or unknown
  misc_feature (695)..(695): "n" may be a, t, c, g, other or unknown
agctgtgagacgacgagtgcgtgaagtgaaggcgattgagaggggctgagggaattgtcctctgtggaagggactttcttttggccctaggccccttcctgcccctgtcgtcagcagagagatggaaaacttgatgactagctccaccctaccgcccctttttgcagatgaagacggttccaaggagagtaatgatctggctaccactgggttaaatcacccagaggttccatacagtagtggcgccacatcatccaccaacaatccagaatttgtggaggatctctctcaaggtcagttgcttcagagtgagtcttcaaatgcagcagaaggcaatgaacagaggcatgaagatgagcaacgaagtaaacgaggaggttggtccaaaggaagaaagaggaagaaacctcttcgagacagcaatgcacccaaatccccccttacaggatatgttcggttcatgaatgagcgtcgagaacaacttcgagcaaagagaccagaagtcccatttccagaaatcacaaggatgttaggcaatgaatggagtaaactgcctcctgaggaaaaacagcgctaccttgatgaagcagacagagataaggagcgttacatgaaggaactggaacagtatcagaaaacagaggcctacaaggtcttcaatanggaaaacccangaccgtcagaaaggcaaaatntcataggcaagatgcaaccccg

SEQ ID NO: 3340 - DNA, 908 bp, Homo sapiens
  misc_feature (637)..(637): "n" may be a, t, c, g, other or unknown
  misc_feature (655)..(655): "n" may be a, t, c, g, other or unknown
  misc_feature (823)..(823): "n" may be a, t, c, g, other or unknown
  misc_feature (898)..(898): "n" may be a, t, c, g, other or unknown
  misc_feature (906)..(906): "n" may be a, t, c, g, other or unknown
acacaacaatttgataccagcaaacgagctctgtctacctggggaccagttccttaccttccgccaaagacaatgactagcaacctagaaaaaagttcacaagaacaattacttgatgcagcacatcatcgacactggcctggagtattgaaggtggtatcaggatgccacatatccttatttcagattccattaccagaagatgggatgcaatttggaggatcaatgagcttacatggaaatcatatgacactggcatgttttcatggtccaaattttcgttcaaaatcttgggccctttttcatttagaagaaccaaatattgctttttggactgaagctcagaaaatctgggaagatggctccagtgatcattctacatatattgtacaaacactagattttcacctgggtcataatactatggttaccaaaccatgtggtgctttggaaagtcctatggcaacaatatccaagataacaaggcgtcgccatgaaaatccaccccatggagtagcaagtgtgaaagaatggttcaattatgttacagctacaaggaatgaagagctaaatctgcttcgtaatgttgatgctaacaacactgagaatagcactactgtgaagaattctagtttgntgagtggattcagaggangttctagctacaaccatgaaacagagactatctttgcattaccaaggatgcagcttgactttaaatccattcatgttcaagaaccacaggagccttcattacaggatgccagcctgaagcccaaagtagaatgtaatggtggtgacagagttcactggccacatttgngtgactatggatgctgagctcatcatggttcttcatgaattaatatcagcttatcttaaagaaaaagaaaaagcnttttttcnct

SEQ ID NO: 3341 - DNA, 768 bp, Homo sapiens
  misc_feature (676)..(676): "n" may be a, t, c, g, other or unknown
  misc_feature (683)..(683): "n" may be a, t, c, g, other or unknown
  misc_feature (744)..(744): "n" may be a, t, c, g, other or unknown
cagtgcgcaggcgtgagcggtcgggccccgacgcgcgcgggtctcgtttggagcgggagtgagttcctgagcgagtggacccggcagcgggcgataggggggccaggtgcctccacagtcagccatggcagcgctgcgctacgcggggctggacgacacggacagtgaggacgagctgcctccgggctgggaggagagaaccaccaaggacggctgggtttactacgccaatcacaccgaggagaagactcagtgggaacatccaaaaactggaaaaagaaaacgagtggcaggagatttgccatacggatgggaacaagaaactgatgagaacggacaagtgttttttgttgaccatataaataaaagaaccacctacttggacccaagactggcgtttactgtggatgataatccgaccaagccaaccacccggcaaagatacgacggcagcaccactgccatggaaattctccagggcccggatttcactggcaaagtggttgtggtcactggagctaattcaggaatagggttcgaaaccgccaagtcttttgccctccatggtgcacatgtgatcttggcctgcaggaacatggcaagggcgagtgaagcagtgtcacgcattttagaagaatggcataaagccaaggtagaagcaatgaccctggacctngctctgnttccgtagcgtgcagcattttgcttgaagcctttcaaggcccaagaattgtgccttctttnatggtgccttgtgtgccaacgcaa

SEQ ID NO: 3342 - DNA, 810 bp, Homo sapiens
  misc_feature (684)..(684): "n" may be a, t, c, g, other or unknown
  misc_feature (739)..(739): "n" may be a, t, c, g, other or unknown
  misc_feature (798)..(798): "n" may be a, t, c, g, other or unknown
  misc_feature (807)..(807): "n" may be a, t, c, g, other or unknown
cgcgcggccctgcccggcccaccgagccctggtgtggcagcggctcatggcggccgtggggcccccgcagcagcaggtgcggatggcccatcagcaggtctgggcggcgctcgaagtggcgctccgggtgccctgcctttacatcatcgacgccatcttcaactcctacccggattccagccaaagccggttctgcatcgtgctccagatcttcctccggctctttggtgtatttgcatccagtattgttctgatcttgtcacaacgatcacttttcaagttttacacgtacagctcagcctttctgttagctgcaacttcagtgttggtgaattattatgcttctttgcacattgacttctatggtgcctacaacacgtcagcttttggaattgagctgcttcctcgaaaaggtccctcgctgtggatggcacttatcgttctacagctaacatttggaattggatacgttacactactccagattcattccatctattcacaattaattattttggatctcttggttcctgtaataggcttaatcacagagctaccattacacatcagagagactttactgtttacttcttccttgattctcacattaaatacagtgtttgtcctggcagtgaaactgaagtggttttattattccacacgatatgtttatcttttggtgangcacatgtatcgaatttatggattacaagttattgatggaggacacatggaagangattcgtttcccagacatactacgaagtctttttggctaacaagaagttacaggttcangctacaagnggt

SEQ ID NO: 3343 - DNA, 756 bp, Homo sapiens
  misc_feature (709)..(709): "n" may be a, t, c, g, other or unknown
  misc_feature (737)..(737): "n" may be a, t, c, g, other or unknown
  misc_feature (755)..(755): "n" may be a, t, c, g, other or unknown
tcttaaacaaggagaagtgccagaaagcccggaagcaaggaaggaaagtgaccaagcatgtggcaaaatggatactgtggatattgcaaacaactctactttgggaaaacccaagaggaaaagaagaaaaaagaaggggcatggctggagcagaacgggaacgagaacgcagaaaaacaaccaacaaaatgataacagcaaagccgatggccagctggtctcgagtgaaaagaaggcgaacatgaatctgaaagacctttccaagattagggggagaaagagaggcaaacctggaacccactttactcagagtgacagagctccacagaaaagagtccgatcaagagcttcaagaaagcacaaagatgaaactgtggattttcaggctcctttacttccagtgacctgtggtggggtgaagggaattttacataaggagaaattggaacaaggaaccttggcaaagtgtatacagactgaggatggaaaatggttcacccccatggaatttgaaatcaaaggaggctacgcaagatcaaagaactggaggctgagttgtgcgctgtggcgggtggcccctacgacggctgatggaggaaggatctctacctaatccttcaagaatatattacaggaacaaaaagagaatacttgaagtctcaaaacaatagctcaattgacccttgtatgagaaacttggattaatgtnaagtgttccgggaccggaagggaacttntctggtgcgaaactttgnt

SEQ ID NO: 3344 - DNA, 741 bp, Homo sapiens
  misc_feature (702)..(702): "n" may be a, t, c, g, other or unknown
  misc_feature (716)..(716): "n" may be a, t, c, g, other or unknown
  misc_feature (737)..(737): "n" may be a, t, c, g, other or unknown
ctttcccgagccggggccatggcacctgcaaggtgtttctcagcaagattgaggaccgtgtttcagggcgtggggcattgggctttgtccacatgggctggcctgaagcccagccggctactgccacagcgggcttctcccaggctgctctcggtcggccgtgcggacctcgccaagcatcaggaactcccggggaagaagctgctctctgagaaaaagctgaaaaggtactttgtggactatcggagagtgcttgtctgtggaggaaacggaggcgctggggcaagctgcttccacagtgagccccgcaaggagtttggaggccctgatggaggggacggaggcaacggtggacacgtcattctgagagttgaccagcaagtcaagtccctgtcgtcggtcctgtcgcggtaccagggtttcagtggagaagatggagggagtaaaaactgcttcgggcgcagtggcgccgtcctctacatccgggtccccgtgggcacgctggtgaaggagggaggcagagttgtggccgacctgtcttgcgtgggagatgagtacattgccgcgctgggcggggcaggagggaaaggcaacccgcttcttcctggccaacaacaaccgtgcccctgtgacctgtacccctggacaagccaggacagcagcgagttcttcacctggagctcaagacggtggcccacgccngaatggtgggattncccaacgcccgggaagtcctnactg

SEQ ID NO: 3345 - DNA, 718 bp, Homo sapiens
  misc_feature (548)..(548): "n" may be a, t, c, g, other or unknown
  misc_feature (589)..(589): "n" may be a, t, c, g, other or unknown
  misc_feature (690)..(690): "n" may be a, t, c, g, other or unknown
  misc_feature (699)..(699): "n" may be a, t, c, g, other or unknown
  misc_feature (703)..(703): "n" may be a, t, c, g, other or unknown
aaaaaaagtctgcgcggcgcggccaggcccggccgaccgcgtctcggtctccgcgtctgccagcctggctggcagtccgtctgtccatcccgccgcgccggggcagtctaggcggagcgggggctcaggcggcggcggcctcgacgcgagtgagtgtcgtggttggggtgctggacccagagtgcctaccctcgcctgcctgggcctcagtttccacatctgcacaatgggggtgaccatccctgccctgctggctgccaggagcggctgtgagtcttcaggcgtggatgcagcctgggggaagccatagggcgctttcacaggcctggccttcaccatggcgggagggagaccgcatctgaagaggagtttctccatcatcccctgctttgtcttcgtggagtcggtgctgctgggcattgtgatcctgcttgcttaccgcctggagttcacggacaccctccctgtgcacacccagggattcttctgctatgacagtacctacgccaagccctacccagggcctgaggctgccagccgagtgcctnctgctcttgtctacgcactggtcactgccgggcccaccctnacgatcctgctgggagagctggcgcgtgcctttttcctgaccaccttcaccgtccagtcatcggggagagcaccatcgtgtctggggcctgctgccgcttnaccccccantgcngaagctggtccgctt

SEQ ID NO: 3346 - DNA, 813 bp, Homo sapiens
  misc_feature (772)..(772): "n" may be a, t, c, g, other or unknown
  misc_feature (776)..(776): "n" may be a, t, c, g, other or unknown
  misc_feature (807)..(807): "n" may be a, t, c, g, other or unknown
gaaccccaagtccagtttctggaagctggtgcggcacctggaccgcgtggatgccgtgctggtgacccaccctggcgccgacagcctccccggcctcaacagcctgctgcggcgcaaactggcggagcgctccgaggtggctgctggtgggggctcctgggacgacaggctgcgcaggctcatctcccccaacctgggggtcgtgttcttcaacgcctgcgaggccgcgtcgcggctggcgcgcggcgaggatgaggcggagctggcgctgagcctcctggcgcagctgggcatcacgcctctgccactcagccgcggccccgtgccagccaaacccaccgtgctcttcgagaagatgggcgtgggccggctggacatgtatgtgctgcacccgccctccgccggcgccgagcgcacgctggcctctgtgtgcgccctgctggtgtggcaccccgccggccccggcgagaaggtggtgcgcgtgctgttccccggttgcaccccgcccgcctgcctcctggacggcctggtccgcctgcagcacttgaggttcctgcgagagcccgtggtgacgccccaggacctggaggggccggggcgagccgagagcaaagagagcgtgggctcccgggacagctcgaagagagagggctcctggcacccaccctagcctggcaggagcgcctggggtggccgcaaggagcagcacggctgagcccacgagatgagaagagcaagaccccggagtaagaaaccaacatgtccgacacgngagncggactttggcactaaaaatcaggacagccnaggcag

SEQ ID NO: 3347 - DNA, 703 bp, Homo sapiens
  misc_feature (624)..(624): "n" may be a, t, c, g, other or unknown
  misc_feature (680)..(680): "n" may be a, t, c, g, other or unknown
  misc_feature (682)..(682): "n" may be a, t, c, g, other or unknown
agagcgcggcgcgaccggacgctgcgggcggggaagaggatggagactgtggcgtccgctgcaacggttggggctgcgcgtgagaaggtggcggtgtaggcacctgcgctcggggaaggctggcggcggcggccgagccatggcgggagacccccttctctgggctccctgaagtctcggggagccgtgacccatgggatcgttgagcagccgggtgctgcgccagccaagaccagcccttgcccagcaggcgcagggtgccagggcggggggctcggcccggaggccggacactggagacgatgcggcgggccacggattctgttactgtgcgggcagccacaagcgcaagcggagcagcgggtccttctgctactgtcaccctgactcggagacggacgaggatgaggaggagggggacgagcagcagcggctcctcaacacccctcgaaggaaaaaattaaagagtacatctaaatatatttatcaaacattatttttgaatggtgaaaacagtgacattaagatttgtgctctaggagaagaatggagcttacacaaaatatatttatgtcaatctggctacttttctagtatgttcagtggttcttggaaagaatccancatgaatattattgaactggagatttctgaccagaacatggatgtagaaacacttnangttgcatttggttactgtatc

SEQ ID NO: 3348 - DNA, 755 bp, Homo sapiens
  misc_feature (737)..(737): "n" may be a, t, c, g, other or unknown
  misc_feature (740)..(740): "n" may be a, t, c, g, other or unknown
  misc_feature (749)..(749): "n" may be a, t, c, g, other or unknown
accccacccgcttccggccgcggctcggttctcccgcctccgcctccgccgcggctcgtggttgtcccgccatggcactgtcgcgggggctgccccgggagctggctgaggcggtggccgggggccgggtgctggtggtgggggcgggcggcatcggctgcgagctcctcaagaatctcgtgctcaccggtttctcccacatcgacctgattgatctggatactattgatgtaagcaacctcaacagacagtttttgtttcaaaagaaacatgttggaagatcaaaggcacaggttgccaaggaaagtgtactgcagttttacccgaaagctaatatcgttgcctaccatgacagcatcatcaaccctgactataatgtggaatttttccgacagtttatactggttatgaatgctttagataacagagctgcccgaaaccatgttaatagagtgtgcctggcagctgatgttcctcttattgaaagtggaacagctgggtatcttggacaagtaactactatcaaaaagggtgtgaccgagtgttatgagtgtcatcctaagccgacccagagaacctttcctggctgtacaattcgtaacacaccttcagaacctatacattgcatcgtttgggcaaagtacttgttcaaccagttgtttggggaagaagatgctgatcaagaagtatcttctgacagagctgaccctgaacttgcctgggaaccaacagaaccnaanccagaactngagcat

SEQ ID NO: 3349 - DNA, 746 bp, Homo sapiens
  misc_feature (318)..(318): "n" may be a, t, c, g, other or unknown
  misc_feature (566)..(566): "n" may be a, t, c, g, other or unknown
  misc_feature (675)..(675): "n" may be a, t, c, g, other or unknown
  misc_feature (696)..(696): "n" may be a, t, c, g, other or unknown
  misc_feature (715)..(715): "n" may be a, t, c, g, other or unknown
attctttgaaatctagtcacattttagtgatctttgtgatcacaacagtgatgggagtttttttttttttttttttttttttgaaacggagtttcgctcttgttgcccaggctgcagtggcaatggtgcgatcttggctcactgcaaccttcgcctcctgggttcaagcgattctcctgtctcggcctcccgagtagctgggattacaggcatgtgccaccatgccgggctgatttttgtatttttagtagagacggggtttcaccatgttggtcaggctggtctccaactcctgactttaggtgatccgcccgcctntgcctctcaaagtgctgggattacaggcgtgagccaccgcgcccggccagttacgggaatttttaatggagttttaccctttttagctcttttccacatcactacaggtcatcacatatactttttaccttactttttagcgtctcaaaaaatagggagagctctccctgaacagtgcagagcccgtatccctgatttcctaggctatttgatttctacatccaggaacgtagggtcatatccactgntcttgctttttcttcctaagaaaggagagaattcctcgcacatatatatcgttggcttggccttccaaagcaaagcaaaactaaactctggtgattttgcctgggaatnctcggggcccctagtattggnaacttctttgaactgtgangagctgctaatttgcaggtgacatgtgaaaa

SEQ ID NO: 3350 - DNA, 741 bp, Homo sapiens
  misc_feature (596)..(596): "n" may be a, t, c, g, other or unknown
  misc_feature (696)..(696): "n" may be a, t, c, g, other or unknown
  misc_feature (710)..(710): "n" may be a, t, c, g, other or unknown
  misc_feature (723)..(723): "n" may be a, t, c, g, other or unknown
atattttcagcatcacattttaagaataatatgtgaaatacaatatgttttattagtcacctttggaaaatacagtcttccacaatctggaaccacctctttggttcaaaatgtgccattcttctgtaatgtgtgtgataaacttaaaaaaaatctgtatcctttatcctaatcatcttacttggacatcatcctgaaacaaatgacaaaaacattcacagttttatatacaaagttattggtaacaatgttcttaatagaattcaattagaaaacatataaaggcaaaggtagagttatttgatgttatggtttgaaaggattcccacaccctcatgaatattctttattatgccagagggaacctaattcccctgcctttgagtgtgggatggcattgatgagttacttgtaccacatataataggcaggaagtgatggcacgtgacattggaaacaacttcgtaaaagtcaccgagactcattccttgctttctcctatgtctcccacctggcaggaagacatttgccatcatgtaaggagagttctgcttagtgaggcattgacatctccagccagcagtgccgtgagggangtgggcagctcaagcctcagtcaaaccctgagatgaccatggtcccactcaacatctcagctgtgaccatgtgggagaattcaagcctgagccaatcagnctaactgcttccanagtcctgactctnagaaccatgccagattat

SEQ ID NO: 3351 - DNA, 708 bp, Homo sapiens
  misc_feature (513)..(513): "n" may be a, t, c, g, other or unknown
  misc_feature (658)..(658): "n" may be a, t, c, g, other or unknown
  misc_feature (689)..(690): "n" may be a, t, c, g, other or unknown
actttctaaatcacagtgcctgtggccggatgacatggagggagctccctgaccataggaggggttagagacacgacgcccctctaccctcactcacagcagaggtggaaagctggagactgacccagtcgcagagcgcaccccactggggacccccagctcagccatgctggcctgtctgcagaggacccagaacgccccgggccaacacctggcctgcccgagcaagagcctggagctgcgcaagtgcgaggcggtggccagcgccatgcattcctcccgctacccgagcccagcagaactggacgcctatgccgagaaggtggccaacagcccgctgtccatcaagatcttccccaccaacatccgtgtgccccagcacaagcacctcagccgcacagtcaatggctatgacaccggtggccagcgctacagcccctacccacagcacaccgctggctaccagggccttctggccattgtcaaggccgcggtttcctcctccagcacggncgcaccagctgggcccgccaaaagtgtgctcaagagcgccgagggcaagcggaccaagctgtcaccggccgccgtgcaagtgggcattgcgccctacccagtgcccagcactctgggtcccttggcctaccccaagccacctgangcgcctggttcaccacccgggctggccgcanncggcaattggcggcttcg

SEQ ID NO: 3352 - DNA, 832 bp, Homo sapiens
  misc_feature (704)..(704): "n" may be a, t, c, g, other or unknown
  misc_feature (776)..(776): "n" may be a, t, c, g, other or unknown
  misc_feature (804)..(804): "n" may be a, t, c, g, other or unknown
  misc_feature (818)..(818): "n" may be a, t, c, g, other or unknown
ctgccagccgcgctgctgctgctcctcctgctgtgggaccgctgaccgcgcggctgctccgctctccccgctccaagcgccgatctgggcacccgccaccagcatggacgctcgccgcgtgccgcagaaagatctcagagtaaagaagaacttaaagaaattcagatatgtgaagttgatttccatggagacctcgtcatcctctgatgacagttgtgacagctttgcttctgataattttgcaaacacgaaacctaaattcaggtcagatatcagtgaagaactggcaagtgttttttatgaggactctgataatgaatctttctgcggcttttcagaaagtgaggtgcaagatgtattagaccattgtggatttttacagaaaccaaggccagatgtcactaacgaactggccggtatttttcatgccgactctgacgatgaatcattttgcggtttctcagagagtgagatacaagatggaatgaggctgcagtcagttcgggaaggctgtaggacccgcagccagtgcaggcactctggacctctcagggtggcgatgaagtttccagcgcggagtaccaggggagcaaccaacaaaaaagcagagtcccgccagccctcagagaattctgtgactgattccaacttcgattcagaagatgaaagtggaatgaattttttggagaaaagggctttaaatntaaagcaaaacaaagcaatgcttgcaaaacttatgtctgaattagaaagctttcctggcttcgttccgtggnaaaaaattcccttccaagcttccgactnacaaatcaaagganaccgcgaaaggcgt

SEQ ID NO: 3353 - DNA, 831 bp, Homo sapiens
  misc_feature (766)..(766): "n" may be a, t, c, g, other or unknown
  misc_feature (815)..(815): "n" may be a, t, c, g, other or unknown
  misc_feature (831)..(831): "n" may be a, t, c, g, other or unknown
tcacttacccattccataattagtttccttgtatgtaaaatcaggggataataatgtcaacaaatagttatctgcttaacattgttttattaaaaagcaggtatgttcgcatgaataaaacaaccttcccttttaaactccttgtttggcatcctcaaacctctcagcttgtttcagatgggaacttcaacccaatatcaggtcacagtgcccaggttgatctgtactccgtgtgggctctgaaagcatcacccctgcagaggctggaagccctagtcttcccaggggatgccttgtctgcaggtactgcccccagcctgcagtgaactctggaccttttattgatcctgtgtgcatctggctccactctgataccaggaagaatgggggttgctggccctggacttggtcctggacaaataaatgtgtttgtcaaagccctttcctgacatcggttgtctctagcccaggtggcactgtggagggtaattagttctctttattagagggaacatcaggaagctctgcgctgctcaccgtggacacatgtaaaaagattttgttaatgcagctgttacttgccttttcattatgctaatgggcagcctgtaagaaatgtaacttcctgtcactggcaccaagcaacacctatcagacaaagcattggttcttctcactggtgataagtgtgacttgtggggaccagcgataggatgctcatttttatccgctaagtgcacaacgcttgtaaaaaaccagcagtggncttgttccacttgacgtgacactaggttaactgttacattgaccactgntgcacctttagactgn

SEQ ID NO: 3354 - DNA, 578 bp, Homo sapiens
  misc_feature (43)..(43): "n" may be a, t, c, g, other or unknown
  misc_feature (380)..(380): "n" may be a, t, c, g, other or unknown
  misc_feature (408)..(408): "n" may be a, t, c, g, other or unknown
  misc_feature (492)..(492): "n" may be a, t, c, g, other or unknown
  misc_feature (495)..(495): "n" may be a, t, c, g, other or unknown
  misc_feature (514)..(514): "n" may be a, t, c, g, other or unknown
agcgcgggcttgaccggcgtcggcccgccgcctccgctgccgnttcgccccaatccggtccctctggcccggcctgacccggtctggcttgttcgggctcagcggccgcgaggccgcagctcccgatggaaatcatattatgtagaatacttgggtgacatctgcctgagagatctccaagaattacagattgagtctcgctctgttgcccaggctggagtgcagtggtgcaatctctgctcactgcaacctccgtctcccgagttcaagcagttctcctgcctcagcctcctgagtagctgggattacagaagacaaaaatactaatgcatttgagaaagcggtagttttggggggagggggaaaaagcaactgctttnctgatctgcaacttggctggatgctaanatgtcagtggacatgaatagccaggggtctgacagcaatgaagaggactatgacccaaattgtgaggaagaggaagaagaagangangacgaccctggggacatanaggactattacgtgggagtagccagcgatgtggagcagcagggggctgatgcctttgatcccga

SEQ ID NO: 3355 - DNA, 760 bp, Homo sapiens
  misc_feature (723)..(723): "n" may be a, t, c, g, other or unknown
  misc_feature (747)..(747): "n" may be a, t, c, g, other or unknown
  misc_feature (758)..(758): "n" may be a, t, c, g, other or unknown
acaccatgtcaagtctgcacaagagccgaattgcagatttccaggatgtcctgaaggagccctcaattgcattggaaaagctgcgggaactcagctttagtggcatcccctgtgagggcggactgcggtgcctctgctggaagattctcttgaactaccttcccttggagagagcctcatggacctccatcctggccaagcagagggagctgtatgcccagttcctgagggaaatgatcatccagcctggcattgccaaggccaacatgggtgtgtccagggaggatgtgacttttgaggaccatccactcaaccccaaccctgacagccggtggaacacgtacttcaaggacaacgaggtgctgctgcagatcgacaaagatgtccggaggttgtgcccagacatttccttcttccagagggccactgactacccttgcctcctcatcctggacccccagaatgagtttgaaacccttcgtaagagagtggaacagacaacactgaaatctcagacggtggcccggaaccggagtggggtcacaaatcaagagcagaacatcaagcctcagttctttgccttccgctggctgacactgctgctgtcccaggagttcttgctgcctgacgtcacccgcatctgggactcctcttcgcgatgacaaccgctttgacttcctcctcctcgtctgctgcgccatgctcatgctgatccgggagcanttgcttggaaggggactttactgngaatatgcggntg

SEQ ID NO: 3356 - DNA, 824 bp, Homo sapiens
  misc_feature (702)..(702): "n" may be a, t, c, g, other or unknown
  misc_feature (745)..(745): "n" may be a, t, c, g, other or unknown
  misc_feature (805)..(805): "n" may be a, t, c, g, other or unknown
  misc_feature (822)..(822): "n" may be a, t, c, g, other or unknown
aagacgctagcgctgcgatggcggaggccgtggagcgcactgacgagctggtccgggagtacctgctcttccgcgggttcacgcacacactgcggcagctggacgccgagatcaaggcggacaaggagaaggggttccgggtggataagattgtggaccagctgcagcagttaatgcaggtgtatgacttggctgcccttcgggattattggagctacttggagcgtcggctcttcagccgcttggaggatatatacagacccacaatccacaagctgaaaaccagcctgtttcgattttatcttgtctacacaatccagacaaacagaaatgacaaggctcaggagttctttgcaaagcaggccacggaactccagaaccaggctgagtggaaggattggtttgtcctgcccttcctgccatccccggacaccaaccccacctttgctacctacttttctcgacagtgggctgacaccttcattgtgtccctgcacaacttcctgagcgtcctgtttcagtgcatgccagtccctgtgatcctgaactttgatgcggagtgtcagaggactaaccaggttcaagaagaaaatgaagttctgcgtcagaagctttttgcattgcaagctgaaatccaccgactgaagaaagaggagcaacagccagaagaggaagaggccttggtccaacacaaattggctncttatgtcttcaacatggaccgcctgggggactcggaacttgncatggtgtgcaacccaaggaatgccttcctttttccagtcaccttgtgtgggctttctgncctcgctggtggcttanaa

SEQ ID NO: 3357 - DNA, 838 bp, Homo sapiens
  misc_feature (678)..(678): "n" may be a, t, c, g, other or unknown
  misc_feature (743)..(743): "n" may be a, t, c, g, other or unknown
  misc_feature (802)..(802): "n" may be a, t, c, g, other or unknown
  misc_feature (837)..(837): "n" may be a, t, c, g, other or unknown
gcggcgcgagcggtcggcggcggcggaggcagtgtctcccggtcgcgcgtggaggtcggtcgctcagagctgctgggcgcagtttctccgcctgctgcttcggcgcggctgtatcggcgagcgagcgagttcccgcgagttctcggtggcgctcccccttcctttcagtctccacggactggcccctcgtccttctacttgaccgctcccgtcttccgccgccttctggcgctttccgttgggccgattcccgcccgcttcctcctgcttcccatcgaagctctagaaatgaatgtttccatctcttcagagatgaaccagattatgatgcatcattatcacagaagaaattcgtgtctatagcttttaaggacttgattacatcattttcaagcctgatagttttggaatcaccattagagcttaagacacacctgccttcatttcaaccacctgtcttcataccctgacgaagtgcaccttttaacactcctttgtccttggattacttaagagttcccagaaatacatttgccaccaacagagtagccaaatttataaggaaaaatgattcccaatggatatttgatgtttgaggatgaaaattttattgagtcttctgttgccaaattaaatgccctgaggaaaagtggccagttctgtgatgttcgacttcangtctgtggccatgaaatggtagcacacagagcagtgctagcttgctgcagtccctatttatttgnaatctttaatagtgatagtgatcctcatggaattctacgttaaatttgatgactcaatncagaactgtgaatcttgtgaatatgcctacactgnt

SEQ ID NO: 3358 - DNA, 812 bp, Homo sapiens
  misc_feature (771)..(771): "n" may be a, t, c, g, other or unknown
  misc_feature (783)..(783): "n" may be a, t, c, g, other or unknown
  misc_feature (793)..(793): "n" may be a, t, c, g, other or unknown
acatggcggcgggaagggagtgagccgccccgcgcccccgccgcgccctcagatggagaaattagcatacaaagaaactgacttgtcagaagtcagagcaaggtattggtggatccagggataaatcccaaacttcttaacccctagaccggtttttagtccattgactatgcagcctaatgtgatagactggagtgatgttagaaaacacaaatatggtcacctatcagagtctgcatcccaatatcaagaagctgctgacatcctggatctaggtcattttacctgggacaaatacctaaaagaaacatgttcagtcccagcgcctgtccattgcttcaagcagtcctacacacctccaagcaacgagttcaagatcagtatgaaattggaagcacaggaccccaggaacaccacatccacctgtattgccacagtagttggactgacaggtgcccgccttcgcctgcgccttgatgggagcgacaacaaaaatgacttctggcggctggttgactcagctgaaatccagcctattgggaactgtgaaaagaatgggggtatgctacagccacctcttggatttcggctgaatgcgtcttcttggcccatgttccttttgaagacgctaaatggagcagagatggctcccatcaggattttccacaaggagccaccatcgccttcccacaacttcttcaaaatgggaatgaagctagaagctgtggacaggaagaaccctcatttcatttgcccagccctattggggangttcgggcttanaagtgcttgncacttctgatgggtggcaa

SEQ ID NO: 3359 - DNA, 878 bp, Homo sapiens
  misc_feature (748)..(748): "n" may be a, t, c, g, other or unknown
  misc_feature (758)..(758): "n" may be a, t, c, g, other or unknown
  misc_feature (811)..(811): "n" may be a, t, c, g, other or unknown
  misc_feature (851)..(851): "n" may be a, t, c, g, other or unknown
  misc_feature (858)..(858): "n" may be a, t, c, g, other or unknown
aaagatatgctagttttgattacgaagatgcaggctaccagactgcagaacttgtaaaaatggatattctactgaatggaaatactgtagaggagctagtaactgttgtacacaatgtgaaagcctataggaaaaacgttttggcaaaatgttatggtggtgatattacccgaaaaatgaagcttttgaagagacaagcagaagggaaaaaaaagctgaggaaaattggcaacgttgaagttccaaaagatgcttttataaaagttctgaaaacacaatcttctaaataattggtgggaaaacaaagaattttcattgcaatttgtaatatgctgacaacagaaagaaaattataaaatttgcttgttactttcagggtattcaggttcaaataacctactagtctttcgttgaaagggagtagttagtgggtaggcaagagcttagattttgaagccatgttgcctgttctcaaatatctgttccaaccactcactagtaaggtgaccgtggccagattaacctttgtttcctcttcagtaaaatcgagattatactactacctacataagttgttgttgtgaagattaaatgaggtaatacgttaaatattcagaggtgcaagacacatagtaagcactcaattgtaactacagttaagtccttaaatgccatcgaaaggtcttagaaactgactttaagcaaaatgacacgtagcacaatggtcttgaatgatgtcatttccttnaagtggttgnaacatcgatgaaggaaaaaaaaattgggttatgccgtcatttcattttatttntaattatttttttggagaccagaatcttgcccctggtcgncccaagncttggaaatgccaatggggc

SEQ ID NO: 3360 - DNA, 797 bp, Homo sapiens
  misc_feature (611)..(611): "n" may be a, t, c, g, other or unknown
  misc_feature (642)..(642): "n" may be a, t, c, g, other or unknown
  misc_feature (660)..(660): "n" may be a, t, c, g, other or unknown
  misc_feature (759)..(759): "n" may be a, t, c, g, other or unknown
  misc_feature (770)..(770): "n" may be a, t, c, g, other or unknown
  misc_feature (776)..(776): "n" may be a, t, c, g, other or unknown
acggaaggggcgtgccggaccgaagtgcgcagactcggaggcatacttcctttggtgaccattcttcagtgcatgaagacagacagcatccagaaccgaacggcccgtgccctggggaacttagccatggaacctgagagctgtggggacatccactgtgctggtgctgttcccctgcttgtggagagcctgacagcctgccaggactcgcagtgcctacagagcgtggtgcgtgccctccgtaacctggcagactcaccccagcaccgcctggccttggcacagcagggagcagtgcgtccgctggccgagctcctggccactgccccagatgctgcactgaccttagccctcgtccgtgccctcctggaactcagccgaggctgctcccgggcctgtgctgagcagctaagtctgggtgggggattgggcccactcgtcagcctggcttcccaccccaagcgggcagtacgcgagggaaccattctgatcctcgccaacctgtgtgcccagggcctgattcggcctgcactgggcaatgctggtggcgtggaggtgctggtagatgagctccggcagcgccgggatcctaatggagctagcccaacctnccagcagcccctggtgcgggctgtgtgcctnctatgtcgtgaggccatnaaccgggcccgactgcgggatgctggtggcttggatctactgatgggcctgctgcgggacccttgtgcaaacgcatgggacccttgtattggggcttgnccttgtggggnttctgnatgaaacttgggggccctggg

SEQ ID NO: 3361 - DNA, 813 bp, Homo sapiens
  misc_feature (632)..(632): "n" may be a, t, c, g, other or unknown
  misc_feature (774)..(774): "n" may be a, t, c, g, other or unknown
  misc_feature (781)..(781): "n" may be a, t, c, g, other or unknown
  misc_feature (810)..(810): "n" may be a, t, c, g, other or unknown
cagcttgtcttctctgtttggctatcattgttggctagtcagcaaaaataaatctacattagaggcattcagaagtccagtatttcgacatggaacagataagaatggattcagcttgggtttcagtaaaaacatgcgacaagtttttggtgatgagaagaagtactggttgctacccattttttcaagtctaggtgatggctgctcctttccaacttgccttgttaaccaggatcctgaacaagcatctactcctgcagggctgaattccacagctaaaaatctcgaaaaccatcagtttcctgcaaagccattgagagagtcccagagccaccttcttactgattctcagtcttggacggagagcagcataaacccaggaaaatgcaaagctggtatgagcaatcctgcattaaccatggaaaatgagacttaactcttcaagcaagataaattcatactttataaaagtatcaatgctgtagatggatggaagaggcttcccacaggaaggtgccaccagtcagttgtgcctatgtccctttggctggaaatgcagaatatgaattgattagttctctccaagccattgcttaaaatataacatgttttggatccaatacacacattgntacaactaacacaaattcctattaaatattaaaagtagttctggtttattaatcaacggggaaaacatcttcttcaaaaaacttggaataaatcaaggaccagtttttacccaaatatatgggtagcacagtttatcacatngaaactncattaatcatctggattttccgaatctgnaaa

SEQ ID NO: 3362 - DNA, 876 bp, Homo sapiens
  misc_feature (728)..(728): "n" may be a, t, c, g, other or unknown
  misc_feature (764)..(764): "n" may be a, t, c, g, other or unknown
  misc_feature (804)..(804): "n" may be a, t, c, g, other or unknown
  misc_feature (855)..(855): "n" may be a, t, c, g, other or unknown
  misc_feature (872)..(872): "n" may be a, t, c, g, other or unknown
gctcgccgcccgcccgcccgacggagacgcagtcccagctatctgacttcatgtgaaagatggctaatgcagaagtgagtgtcccagtgggggatgtggttgtggtacctactgaaggaaatgaaggggagaatcctgaagacactaaaacccaagtgattttgcagttacagcctgtgcaacaagggatttatgaagctgggtcggagaacaacacggcagttgtagcagtagaaactcacacgatacacaaaattgaagaagggattgatacaggcactatagaagcaaatgaggatatggaaattgcttaccccataacttgtggggagagcaaagccatcctcctctggaagaagtttgtatgtccaggaataaacgtgaagtgtgtcaagttcaatgatcagttgatcagccccaagcactttgttcatctggctggcaagtccactctgaaggactggaagagagctattcgtctgggtgggatcatgctcaggaaaatgatggactccggacagattgatttttaccaacatgacaaagtttgctccaatacctgcagaagcaccaaatttgatcttctgatcagcagtgcaagagctccagtgccaggacagcagacaagtgtggtgcagacacccacttcggctgatggtagcatcacgcagattgccatctcagaagagagcatggaagaggcagggctggaatggaactcagctctnaccgctgctgtcaccatggccacggaggaaggtgtnaaagaaagactcagaggaaattcagaggacactttgatgntctggaaaggatactgatgtagggctgatggaagaggttgctgcaatttcngaaggaattgaggactnctca

SEQ ID NO: 3363 - DNA, 906 bp, Homo sapiens
  misc_feature (866)..(866): "n" may be a, t, c, g, other or unknown
  misc_feature (870)..(870): "n" may be a, t, c, g, other or unknown
  misc_feature (884)..(884): "n" may be a, t, c, g, other or unknown
attatacagatacagacctgaagaagtagatattgatgccaagttaagccgattatgtgaacaagataaagtggtgcatgctctggaagagaaacttcagcaactccacaaggagaaatacacgcttgagcaagctttgctatcagccagccaagagatagaaatgcatgcagataacccagcagccattcagacagtggtgttacaaagggatgatttacaaaatggactgcttagtacgtgtcgagaactttctcgagccactgccgaattggaacgagcatggagagaatatgataagttagaatacgatgtaactgttaccaggaaccagacgcaagagcagctggatcaccttggtgaagttcagacggaatcagcaggaattcagcgtgcacagattcagaaagaactttggcgaattcaggatgtcatggaagggctgagcaaacataagcagcaaagaggtactacagaaataggtatgataggatcaaagcctttctcaacagttaagtacaaaaatgagggtccagattatagactctacaagagtgaaccagagttaacaacagtggcagaagttgatgaatctaatggagaagaaaaatcagaacctgtttcagagatagaaacttcagttgttaaaggttcccactttcctgttggagtagtcccttcaagagcaaaatcaccaacacccgaatcttcgacaatagcttcctatgtaaccttgaggaaaactaagaagatgatggatctaagaacggaaagacccagaagtgcagtggaacagctctgtttggctgaaagtactcgacccaaggatgactgtggaagaaccaatgggaaggaattggaagacnttancaagcgtgcctganggagaagaaaaaagggttaatt

SEQ ID NO: 3364 - DNA, 729 bp, Homo sapiens
  misc_feature (405)..(405): "n" may be a, t, c, g, other or unknown
  misc_feature (494)..(494): "n" may be a, t, c, g, other or unknown
  misc_feature (520)..(520): "n" may be a, t, c, g, other or unknown
  misc_feature (532)..(532): "n" may be a, t, c, g, other or unknown
  misc_feature (694)..(694): "n" may be a, t, c, g, other or unknown
  misc_feature (709)..(709): "n" may be a, t, c, g, other or unknown
  misc_feature (717)..(717): "n" may be a, t, c, g, other or unknown
aaaaaatgtttgttgctggctgaatggcaatagatgtctaaggtggattcagtgtctggcacactgagacacctccaagaaggagattgatgcatcaggttcagtttaacctggaatatctgactacccctgaatccacccagaaagggggcccaacacccttgtccatttatgggtattttttttcgaagttattaagcatattccttttccacgaacctcttctgtactttgattgtaataggttggctcttacacccattccaaatgcagtttatttttagacccgattgcaaatagtgatgtagttttaaccagtatggattagttcagggatgaactgctccctccagccttactggctctgatccacagggttttgttttgttttgttttgttttttgnttaagtcgagatataaaaactgaacacgataacacttactcttaaatcaagcatcaacactttatccctgttagaattctttgcatttntgtgtttgtaacagaaacgccttaanacactatggttngggaatataggaaactatgtgtgtcccaaggaaatccctgtaaatttaactcacctacaaaaggctttttccccgcctttggttgttaaccggcattcctgaaagccacatgtgtttattcattgggcttgatcttatcagcaaataggatttctgggtttnatgactttttgtctnattttatntatgcctacatt

SEQ ID NO: 3365 - DNA, 841 bp, Homo sapiens
  misc_feature (775)..(775): "n" may be a, t, c, g, other or unknown
  misc_feature (802)..(803): "n" may be a, t, c, g, other or unknown
ctctttaaggtgcccgaggctcgcgggcgctgcgctgaggggacggcgggaggcgcggcctggcctcgcactcaaagccgccgcagcgcgccccgggctcggccgacccggcggggatctaggggtgggcgacttcgcgggaccgtggcgcatgtttcctgggagttactgatcatcttctttgaagaaacatgaagttacactatgttgctgtgcttactctagccatcctgatgttcctgacatggcttccagaatcactgagctgtaacaaagcactctgtgctagtgatgtgagcaaatgcctcattcaggagctctgccagtgccggccgggagaaggcaattgctcctgctgtaaggagtgcatgctgtgtcttggggccctttgggacgagtgctgtgactgtgttgattgaccctcctttcatttctgtcatgccacttgacaatgaaggaactgtatcagttgacctatagaatagcccacattccggatttgactgcttcctgtggaagtcctaccatactgactgttctgtcataaacaattttcataggattatgttaaggtatgtgtaatcctcgaaattatagtgacacaccttcaacttcaaagagcacagtggaggagctgcatgaaccgatcccttctctcttccgggcactcacagaaggagatactcagttgaattggaacatcgtttctttcctgttgcagaagactttcacatcatgagaatctggtttcatttttagaaactgtgaaccaagncacaccaccagaatgtgtctgtcccanncaataatggttcacgcgccttatttccagtggaccaag

SEQ ID NO: 3366 - DNA, 867 bp, Homo sapiens
  misc_feature (741)..(741): "n" may be a, t, c, g, other or unknown
  misc_feature (811)..(811): "n" may be a, t, c, g, other or unknown
  misc_feature (859)..(859): "n" may be a, t, c, g, other or unknown
  misc_feature (866)..(866): "n" may be a, t, c, g, other or unknown
gttctccgcccccgccgccgccattacggagctcccagtggttgattcttcaccacactgaaaccattaggaaaaatccttgtggttaacagcagaggcttcagagtgtaacctgtactcgggcctagaaattatttaaaatggcgactgatacgtctcaaggtgaactcgtccatcctaaggcactcccacttatagtaggagctcagctgatccacgcggacaagttaggtgagaaggtagaagatagcaccatgccgattcgtcgaactgtgaattctacccgggaaactcctcccaaaagcaagcttgctgaaggggaggaagaaaagccagaaccagacataagttcagaggaatctgtctccactgtagaagaacaagagaatgaaactccacctgctacttcgagtgaggcagagcagccaaagggggaacctgagaatgaagagaaggaagaaaataagtcttctgaggaaaccaaaaaggatgagaaagatcagtctaaagaaaaggagaagaaagtgaaaaaaacaattccttcctgggctaccctttctgccagccagctagccagggcccagaaacaaacaccgatggcttcttccccacgtcccaagatggatgcaatcttaactgaggccattaaggcatgcttccagaagagtggtgcatcagtggttgctattcgaaaatacatcatccataagtatccttctctggagctggagaagaaggggntatctccttaaacaagcccttgaaagagaattaaattgaggagtcatcaaacaggttaaaggaaaaaggngctttctggaagttttggtgggggttcaaaaatcaggaaaaacccctnagaaatnc

SEQ ID NO: 3367 - DNA, 846 bp, Homo sapiens
  misc_feature (750)..(750): "n" may be a, t, c, g, other or unknown
  misc_feature (773)..(773): "n" may be a, t, c, g, other or unknown
  misc_feature (819)..(819): "n" may be a, t, c, g, other or unknown
agcaggtttcgaatgctctttacttcctttgtggagcaaaagaaaaaagcaggagtatttgaacaaatcactaagactcatggaacaattattggcattacttcagggattgtcttggtccttctcattatttctattttagtacaagtgaaacagcctcgaaaaaaggtcatggcttgcaaaaccgcttttaataaaaccgggttccaagaagtgtttgatcctcctcattatgaactgttttcactaagggacaaagagatttctgcagacctggcagacttgtcggaagaattggacaactaccagaggatgcggcgctcctccaccgcctcccgctgcatccacgaccaccactgtgggtcgcaggcctccagcgtcaaacaaagcaggaccaacctcagttccatggagcttcctctccgaaatgactttgcacaaccacagccaatgaaaacatttaatagcaccttcaagaaaagtagttacactttcaaacagggacatgagtgccctgagcaggccctggaagaccgagtaatggaggagattccctgtgaaatttatgtcagggggcgagaagattctgcacaagcatccatatccattgacttctaatcttctgctaatggtgatgtgaattcttagggtgtgtacgtacgcagcctccagggcaccatactgtttccagcagccaacccttttctccatcacaactacgaagaccttgatttaccggtaacctattgnatggtgatgttttattctcttangcagtctatatatgttaaaccaatcaaggaacttactctattcagnggaaacaatatcatctctattgcttgg

SEQ ID NO: 3368 - DNA, 861 bp, Homo sapiens
  misc_feature (791)..(791): "n" may be a, t, c, g, other or unknown
  misc_feature (827)..(827): "n" may be a, t, c, g, other or unknown
  misc_feature (856)..(856): "n" may be a, t, c, g, other or unknown
gcggggcctctaccggcccgatggagcgcgcgggcgctactagccgcgggggccaagcccctggcttcttactgcggcttcatactgagggccgagccgaggcggcgcgggtgcaggagcaggacttacggcagtgggggctgacagggattcacctacgctcttaccagctggagggagtaaactggctcgcccagcgcttccattgtcagaatggctgtatcctgggagatgagatgggcctggggaagacctgccaggaagattaaatggtgaagggccatttctgattctttgtcccttgtctgttttgagcaactggaaagaagaaatgcagagatttgctccaggtctttcctgtgtaacatatgcaggcgacaaggaggaaagagcctgccttcagcaagacctgaaacaggagtcacgttttcatgtgctactgactacctatgagatttgcttgaaagatgcatcatttctaaaatcattcccttggagtgttcttgttgtggatgaagctcacaggttgaaaaaccaaagctccctgctgcataagaccttgtcagagttctcagtagtcttcagtctcctgttgaccggaactcccatccagaacagcctccaagagctctactccctcctcagttttgtggagcctgatctcttttccaaggaagaggtgggagattttattcaacgctaccaggatattgagaaagaatctgagtcagcaagtgaactgcacaaactcttgcagccatttcttgcttgaagccaattgaaaagctgangtagcttccagaactttcccaagaagaccagaaatngtggatataccattggcattgtcaaccanttgca

SEQ ID NO: 3369 - DNA, 854 bp, Homo sapiens
  misc_feature (768)..(768): "n" may be a, t, c, g, other or unknown
  misc_feature (776)..(776): "n" may be a, t, c, g, other or unknown
  misc_feature (835)..(835): "n" may be a, t, c, g, other or unknown
cattcaccaacaggatattttttgccatggtggattttgatgaaggctctgatgtatttcagatgctaaacatgaattcagctccaactttcatcaactttcctgcaaaagggaaacccaaacggggtgatacatatgagttacaggtgcggggtttttcagctgagcagattgcccggtggatcgccgacagaactgatgtcaatattagagtgattagacccccaaattatgctggtccccttatgttgggattgcttttggctgttattggtggacttgtgtatcttcgaagaagtaatatggaatttctctttaataaaactggatgggcttttgcagctttgtgttttgtgcttgctatgacatctggtcaaatgtggaaccatataagaggaccaccatatgcccataagaatccccacacgggacatgtgaattatatccatggaagcagtcaagcccagtttgtagctgaaacacacattgttcttctgtttaatggtggagttaccttaggaatggtgcttttatgtgaagctgctacctctgacatggatattggaaagcgaaagataatgtgtgtggctggtattggacttgttgtattattcttcagttggatgctctctatttttagatctaaatatcatggctacccatacagctttctgatgagttaaaaaggtcccagagatatatagacactggagtactggaaattgaaaaacgaaaatcgtgtgtgtttgaaaagaagaatgcacttgnatatttgnattacctcttttttcaagtgatttaaatagttaatcatttaacccaagaaaatgtgtantgccttaaccagcaatcct

SEQ ID NO: 3370 - DNA, 813 bp, Homo sapiens
  misc_feature (775)..(775): "n" may be a, t, c, g, other or unknown
  misc_feature (778)..(778): "n" may be a, t, c, g, other or unknown
  misc_feature (809)..(809): "n" may be a, t, c, g, other or unknown
attgaagattaaacgttctctcttcaactaccatgacacgaggatccatgcctgcctctactttattgcccctactggacattcactaaagtccctggatctggtcaccatgaaaaagctggacagtaaggtgaacatcattccaataattgcaaaagctgacaccattgccaagaatgaactgcacaaattcaagagtaagatcatgagtgaactggtcagcaatggggtccagatatatcagtttcccactgatgaagaaacggtggcagagattaacgcaacaatgagtgtccatctcccatttgcagtggttggcagcaccgaagaggtgaagattggcaacaagatggcaaaggccaggcagtacccctggggtgtggtgcaggttgagaatgaaaatcattgcgattttgtgaaacttcgagagatgctgatccgcgtgaacatggaggacttgcgagagcagactcacacccgccactatgaattgtaccgacgctgtaagcttgaagagatggggttcaaggacactgaccctgacagcaaacccttcagtcttcaggagacatatgaagcaaaaaggaatgaattcctgggagaactgcagaagaaagaagaagaaatgagacaaatgtttgttatgagagtgaaggagaaagaagctgaacttaaggaggcagagaaagagcttcacgagaagtttgaccttctaaagcggacacaccaagaagaaaagaagaaagtggaagacaagaagaaggagcttgaggangangtgacaactttcagaagaagaaagccacggntcaa

SEQ ID NO: 3371 - DNA, 713 bp, Homo sapiens
  misc_feature (644)..(644): "n" may be a, t, c, g, other or unknown
  misc_feature (705)..(705): "n" may be a, t, c, g, other or unknown
  misc_feature (711)..(711): "n" may be a, t, c, g, other or unknown
cctgatattctctccttcttttgaagacctgcctccatccatgagctgtatcttgatctgtctgactgtccatgttttccacctgcaaccatttgcatgtgtacagcctactgtttgtctccagtttttaaactgtacaagttgtgtttcttaatcttcccttctgccttgttctggggaggtggttattcatcatttggaatcacctttccccctcccatgtgctttccttcatttgagatcttttgacctttggctttatttgggagggggaagggtgataaagttttctgtttccctggttttcttttgtactcctctctgttgcttccctcctcccattttcttgtctattctgccgctgtgtgggcctgggctatgcggcagggcagatttcccatcagagctccaacatgcccgcagagtctggaaagagattcaaacccagcaagtatgtcccggtctctgcagccgccatcttcctagtgggagctacgacactcttctttgcctttacgtgtccaggactaagcctgtatgtgtcacctgcagtgcccatctacaatgcaattatgtttctctttgtgttggccaacttcagcatggccaccttcatggacccagggattttccctcgagctgangaggatgaggacaaggaagatgatttccgagctcccctttacaaaacaagtggagataaanggcatnca

SEQ ID NO: 3372 - DNA, 902 bp, Homo sapiens
  misc_feature (865)..(865): "n" may be a, t, c, g, other or unknown
  misc_feature (878)..(878): "n" may be a, t, c, g, other or unknown
  misc_feature (902)..(902): "n" may be a, t, c, g, other or unknown
aggagttcgagaccagcctgaccaacatggtgaaaccccgtctctactaaaaatacaaaaattagctgggcgtggtggcgcatgcctgtaatcccagctactcaggagactgaggcaggagaattgcttaaacctgggaagcagaggttgcagtgagactagatcatgccactgcactccactgccactgcctgggcaacagagcaagactccatctcaaaaacaaacaaaaaaaatcacagactcattttaaaggagcagcaacctaaccaaatacaaacttcatttgattttaggtttagaaattctagttttattttggagaatcactcagtttttaatatcaattaaaatagtcctcaaaggaatgaagaggaagtctaaataaatgaataaaactcatttttcattttatggtagtatagaaagcattgatgtgtgtagagaaattaaaagacaagagtggtttactgtctatgcacaaatgagtgcctatatttaaggctgcctataccattacagtggcgtaattggtgatttcatagcatacagagaaacaatgaaatcaaagattaaatcattaggttatgatggtcatttgtaagattggaaagtagtcaaaaacccatgtgcaactttttttcagcactctaccattaggctccttaggcaagctgcttaacttccgtcagaagcaaaggtgtgggagaacaccattcacctcagtagtaacttataaaaaccgttttaaagaaggaaaatgggccccagccccttaggatccctgactttcctgatattctaaaccatgagaagtcttgggactttaactggactcttttaccagaagtaacgtggtggatgnatattaatctttncaccttgcttttgacccaaagtcn

SEQ ID NO: 3373 - DNA, 862 bp, Homo sapiens
  misc_feature (738)..(738): "n" may be a, t, c, g, other or unknown
  misc_feature (747)..(747): "n" may be a, t, c, g, other or unknown
  misc_feature (799)..(799): "n" may be a, t, c, g, other or unknown
  misc_feature (849)..(849): "n" may be a, t, c, g, other or unknown
  misc_feature (851)..(851): "n" may be a, t, c, g, other or unknown
agcggcggggagctggcggcagcggcggtggcggtggctgagcagaggacccggcgggcggcctcgcgggtcaggacacaatgtttgcacgaggactgaagaggaaatgtgttggccacgaggaagacgtggagggagccctggccggcttgaagacagtgtcctcatacagcctgcagcggcagtcgctcctggacatgtctctggtgaagttgcagctttgccacatgcttgtggagcccaacctgtgccgctcagtcctcattgccaacacggtccggcagatccaagaggagatgacgcaggatgggacgtggcgcacagtggcaccccaggctgcagagcgggcgccgctcgaccgcttggtctccacggagatcctgtgccgtgcagcgtgggggcaagagggggcacatcctgctcctggcttgggggacggccacacacagggtccagtttctgacctttgcccagtcacctcagcacaggcaccaaggcacctgcagagcagcgcctgggagatggatggccctcgagaaaacagaggaagctttcacaagtcacttgatcagatatttgaaacgctggagactaaaaaccccagctgcatggaagagctgttctcagacgtggacagcccctactacgacctggacacagtacttgacaggcatgatggggggtgccaggccgggcccctgcgaagggctcgagggctttggcttccgggcaaccccnggcccctanctttcagcttgcaaagttccgacctggggccaaacttgggaccacgttggtnggaaaaatccctgggtgggaagaacccttgagccagggaagccccttgantngctttaacaag

SEQ ID NO: 3374 - DNA, 749 bp, Homo sapiens
  misc_feature (707)..(707): "n" may be a, t, c, g, other or unknown
  misc_feature (719)..(719): "n" may be a, t, c, g, other or unknown
  misc_feature (736)..(736): "n" may be a, t, c, g, other or unknown
tggcccatgagatgattggaactcaaattgttactgagaggttggtggctctgctggaaagtggaacggaaaaagtgctgctaattgatagccggccatttgtggaatacaatacatcccacattttggaagccattaatatcaactgctccaagcttatgaagcgaaggttgcaacaggacaaagtgttaattacagagctcatccagcattcagcgaaacataaggttgacattgattgcagtcagaaggttgtagtttacgatcaaagctcccaagatgttgcctctctctcttcagactgttttctcactgtacttctgggtaaactggagaagagcttcaactctgttcacctgcttgcaggtgggtttgctgagttctctcgttgtttccctggcctctgtgaaggaaaatccactctagtccctacctgcatttctcagccttgcttacctgttgccaacattgggccaacccgaattcttcccaatctttatcttggctgccagcgagatgtcctcaacaaggagctgatgcagcagaatgggattggttatgtgttaaatgccagcaatacctgtccaaagcctgactttatccccgagtctcatttcctgcgtgtgcctgtgaatgacagcttttgtgagaaaattttgcccgtggttggacaaatcagtagatttcattgagaaagcaaaagcctncaatggatgtgntctaatgcactgtttanctgggatcttccg

SEQ ID NO: 3375 - DNA, 650 bp, Homo sapiens
  misc_feature (579)..(579): "n" may be a, t, c, g, other or unknown
  misc_feature (629)..(629): "n" may be a, t, c, g, other or unknown
  misc_feature (650)..(650): "n" may be a, t, c, g, other or unknown
ttttttaatagcatgtatggggttctgttccatgtctgtgttgtggacattccgcggcatgaccgcgtgaactgcacggtggagctgcctcagggctgtcggtcaggttggtccagtgaggggtgactgcagccggtcaggtgggcgaggagaaggggggctgcccctttcctacctgtgcttgaggggccggaggcaggtgctgcctggcagagctgtgttaccgtcttggcctcggggtctggtccacactctgtgctcccagccttgaggctgcagtaggactctgatctcacctgccagaagagaggcggggccgcgtcctcctggcgtcaccggcgtcactgtcattccttggtgtctgtgctgggcatggttggcttgggggtctgtggtttcctgggccttgtggcagggtttctcccgtgggagaatttggtgtggaaagcataggaggccccttccgaggttgacaccgtgtcctccgcggtgtttctcgcctggtcgtctcgtcgtgtggacgctgccgttctggttctcggaggtgtgtccttcgccgtgttggggttatttgtctgngttcctgcacttttcccgggctctgagctggattgatggggccaagtctncccccttccatcttgaggtcn

SEQ ID NO: 3376 - DNA, 707 bp, Homo sapiens
  misc_feature (619)..(619): "n" may be a, t, c, g, other or unknown
  misc_feature (678)..(678): "n" may be a, t, c, g, other or unknown
  misc_feature (706)..(706): "n" may be a, t, c, g, other or unknown
aactgaatgtgtcttaacctctgtgttacatcttggctggcagagatttatgttacatgagattgtcttggtagcttgtagtgtggtcaggagaaaggggatggagcagtggtgcatagctgcttactgctcttataaacggtatataaaggttttacggattttgaaaatatttttttttagaggtcaaaataaataccattttagtggcaacagctttgaactagagaggtagatgtattaaagcagcatagaaccataacttctagataatgtagttgccactaggagatattagaaagttagaatgtatgtgtgtatttagtttttcaataataatgaacatacactttcaggagcaaagtatggttgagaaattgtggcagaaagaattttaaatgttagtcgaagttgtctgtagtttctttattaagctctgaaaacacttccaatgccagtttgattctgagggcttgggaagtgggatctcccttgtggagcagctggagctggctgggagggagcctctccatgggtaatttattatgcctgccctgcttcccccagggagctgcttcagtgtgaaatgatgtgattgtcgggggtggggtgggagganggccccttcagtcagggagttgctcacatattacacaggtagcatcacgtggacttcancgctgactgtctagtagtgagtccctgna

SEQ ID NO: 3377 - DNA, 773 bp, Homo sapiens
  misc_feature (677)..(677): "n" may be a, t, c, g, other or unknown
  misc_feature (702)..(702): "n" may be a, t, c, g, other or unknown
  misc_feature (727)..(727): "n" may be a, t, c, g, other or unknown
actgagcgctcggggccttttcaaatcgggatccgttaccgcttccccggcagccgccattgtcgcgctcggagcccctcagctcaggcggccgaggcggaggcagcggcggcgggatggcggacgccaacaaggccgaggtgcccggggccactggtggcgacagcccgcacctgcagcccgcagagccgccgggcgagccgcggcgagagccgcaccccgcggaggcggagaagcagcagccgcagcacagcagcagctccaatggcgttaaaatggagaatgatgaatcagcaaaagaagagaaatctgacttaaaggaaaaatctacaggaagtaagaaggccaatagatttcatccttattcaaaagacaagaattcgggcactggagaaaagaagggtccaaatcgtaacagagttttcattagcaacatcccatatgacatgaaatggcaagctattaaagatctaatgagagagaaagttggtgaggttacatacgtggagctctttaaggatgcggaaggaaaatcaaggggttgtggtgtggttgaattcaaagatgaagaatttgtaaagaaagccctagaaactatgaacaaatatgatcttagtggaagaccccttaatattaaagaggatcctgatggagaaaatgctcgtagggcatcgcancgaacaggaggatcattttcaggangacacgttccttgatatgggatcangggttgatgaatttaccactttcatacttcaataattccaaacatt

SEQ ID NO: 3378 - DNA, 708 bp, Homo sapiens
  misc_feature (547)..(547): "n" may be a, t, c, g, other or unknown
  misc_feature (687)..(687): "n" may be a, t, c, g, other or unknown
  misc_feature (689)..(689): "n" may be a, t, c, g, other or unknown
  misc_feature (693)..(693): "n" may be a, t, c, g, other or unknown
gtgctaccccctccccccgggtgctggctccatgtctgtgtgaccggcctcaggggtagagtccaggcccgacgcggggcgggccagcggcggcggcagctgaggtgagagacggcggcggcggcgcgggcacccggccccccagcgggaggatgaagcggcggaacgccgactgcagtaagctccgccgccccctaaagcggaaccggatcaccgagggcatttacggcagtacatttttatacctgaaattcctggtggtgtgggcacttgtcctcctagcagattttgtcctggagttcagatttgaatacctgtggccattctggcttttcatcagaagcgtctatgattccttcagataccagggactggccttctcagtattttttgtttgtgtagcattcacgtcaaatataatatgcctgctgttcatccccatacagtggcttttttttgctgctagcacatatgtatgggttcagtacgtatggcacacagaaaggggagtgtgtttgcctacagtgtctctctggatcctctttgnttatattgaagcagccattagatttaaagatctcaaaaactttcatgtagacctttgtcgtccatttgctgctcactgtattgggtaccctgtggtaactttggggtttggcttaaaagttacgtaagctacaaaatgcngntaangaaaccaaaagaagt

SEQ ID NO: 3379 - DNA, 710 bp, Homo sapiens
  misc_feature (627)..(627): "n" may be a, t, c, g, other or unknown
  misc_feature (663)..(663): "n" may be a, t, c, g, other or unknown
  misc_feature (688)..(688): "n" may be a, t, c, g, other or unknown
ctttgcagctgagactgggtggagggagaggcgcggagacactggggctctgacgagctggctgaggccctctcagtaggggggtcacgcctcctggaactcagggaccccaagtttctgtgcattcagggcggggctggccccatgccctgtgcataggggcctggctgcatcccagtcgatcagccagaggcagcagcagtggactcatcaattgtggaggaagccctggggaccctggggaccttgccgactctattcccagccagctcctaggacaagcctcagagccaacacccgctcgaccctctcccggcccctccccttctttgtcttttgcagatgatcgccgggtgtcgatccttttccctccagtcagggccaggcgtggacgccgccggaccgctgagactcggggcacggtgaagcactggccggggtctggctgggtctggcgctcgggagccagatggaggtggcgataggggccatgggagccggcgccaagtagccggtggacccccgcgctcgcacctctcccggcgcccgggcgctccccaaggctgccatggaggtgcctaacgtcaaggactttcagtggaagcgcctggcgccactgccaaccgncgggtctactgctccctgctggagaccgggggccangtctatgccatcgggggatgtgacnacaacggcgttcccatggactg

SEQ ID NO: 3380 - DNA, 758 bp, Homo sapiens
  misc_feature (543)..(543): "n" may be a, t, c, g, other or unknown
  misc_feature (627)..(627): "n" may be a, t, c, g, other or unknown
  misc_feature (685)..(685): "n" may be a, t, c, g, other or unknown
  misc_feature (751)..(751): "n" may be a, t, c, g, other or unknown
  misc_feature (758)..(758): "n" may be a, t, c, g, other or unknown
aaaaattacgcgaagatgctaagataccagcttgtgaagaaagcctaagccagaccccgccgagggtgacagggaccagtcctgctcaagaccaggatcatccatccgaggaacagggggggcagggttcctgtagagagccaggtgttaacccctgcctctcccgtctaggacgcctccagcagaagatgctgcttgcctgcagagcccccagcctgaggacacgggtgcagaaggaggggctgagtccaagacgagctcagaaaaccagaagcctgaaactttatctggaaacactgaaggtgccttcattagcagaactgcacagccgcctctgaaaaggtacgtccactcggcatggaggagtcggcgtcccttacccagttaataagatcaatgaatgcgcaggtctttcttcttctagcttccacccacaaataaaatggttccaaaaagaagatgtcgtcatcttaaagataagaataaggaatgtaaaggactacaagtgtcagtatttaagggatagagtcgttttcagtgctngggtgggagacaaattttacctggctgatctggagctgcggggcaacataaggaaagatgactgccaatgtgtgattagaaacnatgaacctgtaatcactctggccaaagagagaagggaggcatggtgtcacctactcanacagaggaccccaacgtggcttttgattttgatcactgggaagactgttgaaaggacagccacttnccaaggn

SEQ ID NO: 3381 - DNA, 719 bp, Homo sapiens
  misc_feature (101)..(101): "n" may be a, t, c, g, other or unknown
  misc_feature (533)..(533): "n" may be a, t, c, g, other or unknown
  misc_feature (638)..(638): "n" may be a, t, c, g, other or unknown
  misc_feature (691)..(691): "n" may be a, t, c, g, other or unknown
  misc_feature (711)..(711): "n" may be a, t, c, g, other or unknown
aactgatgcaattgacaaacgtgtccagggctaaagcagaagatgcactgtctgaaatgaagtctcagtattcaaaagtgttgaatgagttgacccagctnaaacaactggtggatgcacaaaaagagaactctgtctctatcacagaacatttgcaagtgataaccacgctgcggactgcagcaaaagagatggaagaaaaaataagcaatcttaaggaacaccttgcaagcaaggaagtggaagtagcaaagctggagaaacaactcttagaagagaaagctgctatgactgatgcaatggtacctcggtcttcctatgaaaaactccagtcatccttagagagtgaagtgagtgtgttggcatcgaaattaaaggaatctgtgaaagagaaagagaaggtccattcagaggttgtccagattagaagtgaggtctcacaggtgaaaagagaaaaggaaaatattcagactctcttgaaatccaaagagcaagaagtaaatgaacttctgcaaaaattccagcaagctcangaagaacttgcagaaatgaaaagatacgctgagagctcttcaaaactggaggaagataaagataaaaagataaatgagatgtcgaaggaagtcaccaaattgaangaggccttgaacagcctcttccagctctcctactcaacaagctcatccaaaangcagagtcagcagcttggangcgctgca

SEQ ID NO: 3382 - DNA, 773 bp, Homo sapiens
  misc_feature (621)..(621): "n" may be a, t, c, g, other or unknown
  misc_feature (710)..(710): "n" may be a, t, c, g, other or unknown
  misc_feature (750)..(750): "n" may be a, t, c, g, other or unknown
  misc_feature (756)..(756): "n" may be a, t, c, g, other or unknown
acatgcctccccagcccccgctctgacgatgatggccacgcagaatgtcccgcccccaccctaccaggacagcccacagatgacggcaaccgcccagccaccctccaaggcccaggctgtccacatctctgccccctcagctgctgccagcacacctgtgcccagtgcccccatcgacccccaggcccagctggaggctgacaagcgagctgtatacaggcaccctcttttcccgctcctgacgctgctgtttgagaaatgtgaacaggccacccagggctctgagtgcatcacctccgccagctttgatgtggacatcgagaactttgtccaccagcaggaacaggagcacaaacccttcttcagcgatgacccagaactggacaatctgatggtgaaggcaatccaggtcctgagaatccacctgctggagctggagaaagtcaatgaactctgcaaggacttttgtaaccgttacatcacctgcttcaaaaccaagatgcacagcgacaacctgctcaggaatgatctaggggggccctactcccccaaccagccctccatcaaccttcactcacaggacctcctgcagaattcccccaattccatgtccggagtctncaataacccccaggggattgtggtcccagcctcagcgcttcagcagggcaacatcgccatgacaaccgtcaacttacaagttgtgtcangtggagccttatccaaccgggtaccatggtaaccttccanggtcangtggtcacccaagcaat

SEQ ID NO: 3383 - DNA, 814 bp, Homo sapiens
  misc_feature (752)..(752): "n" may be a, t, c, g, other or unknown
  misc_feature (781)..(781): "n" may be a, t, c, g, other or unknown
  misc_feature (797)..(797): "n" may be a, t, c, g, other or unknown
ggggcggagagaggcgagcaccgggaaggggagcgtggggccgctggaatgggtgaatttaaggtccatcgagtacgtttctttaattatgttccatcaggaatccgctgtgtggcttacaataaccagtcaaacagattggctgtttcacgaacagatggcactgtggaaatttataacttgtcagcaaactactttcaggagaaatttttcccaggtcatgagtctcgggctacagaagctttgtgctgggcagaaggacagcgactctttagtgctgggctcaatggcgagattatggagtatgatttacaggcgttaaacatcaagtatgctatggatgcctttggaggacctatttggagcatggctgccagccccagtggctctcaacttttggttggttgtgaagatggatctgtgaaactatttcaaattaccccagacaaaatccagtttgaaagaaattttgatcggcagaaaagtcgcatcctgagtctcagctggcatccctctggtacccacattgcagctggttccatagactacattagtgtgtttgatgtcaaatcaggcagcgctgttcataagatgattgtggacaggcagtatatgggcgtgtctaagcggaagtgcatcgtgtggggtgtcgccttcttgtccgatggcactatcataagtgtggactctgctgggaaggtgcagttctgggactcaaccactgggacccttgtgaagagccatctcatcgnttatgctgacgtgcagtccattgctgtancttgaccaagaagacngtttctggtgggcacaa

SEQ ID NO: 3384 - DNA, 773 bp, Homo sapiens
  misc_feature (705)..(705): "n" may be a, t, c, g, other or unknown
  misc_feature (715)..(715): "n" may be a, t, c, g, other or unknown
  misc_feature (760)..(760): "n" may be a, t, c, g, other or unknown
aggcggtacccggacgggttcgtcccgggctgtttcgcgtccggcctgaggcggctggggccgcgcaggtagtgtccctgcacttcttgcccgggcgcgtgaggccagctccgctgcgctggcctccagcttccagccctcctcccctaagccgccgccatcatgctgctgcctgtgttcaccctgaaactgcgccacaaaatcagcccccgaatggtggccatagggcgctacgacgggactcacccgtgcctggcggccgccacccaaacgggcaaggtttttattcataatcctcatacacggaaccagcatgtcagtgcatccagggtcttccagagccccctgggatctgatgtttctcttctcaacattaaccaggcagtcagctgtctgactgcaggcgtattgaaccctgagcttggctatgatgcccttttagtggggacacagactaatcttttggcttatgatgtctacaataattcggatttgttctacagagaggtagcagatggggcaaatgcagttgtgctggggacattgggagacatttcttcccctcttgcgattattggtggcaattgtgctctgcaaggtttcaatcatgaaggaagtgatctcttttggacggttactggagacaatgttaattccttggccttgcgtgactttgatggtgatggaaaagaaagagcttcttgntggatctgangattttgatatccgagtttttaaaggaagatgaaaattgtggcanaaatgaccgaaac

SEQ ID NO: 3385 - DNA, 754 bp, Homo sapiens
  misc_feature (709)..(709): "n" may be a, t, c, g, other or unknown
  misc_feature (748)..(748): "n" may be a, t, c, g, other or unknown
  misc_feature (753)..(753): "n" may be a, t, c, g, other or unknown
aggccacataggttttcagagactcgcctggcagaggcctggagcgtcctgctgcgtggactgtgggcaccgagccaccaggaggttgttgatctcattcttgctcactggtccctgccagactggtggtgcctctctactgtcgggcagccccacctctgtgctgccccatccacctacagccctcatgcctgggcccagctggaggttctgacaggggccccctggggtggcatgcggacccttcagggtgccccaggcgcagcacaggtctccagagacacaggcaccagggcgttcagagctagtcccctcgctgctgttgactgtccttgagcagccccagggccggtttctcaacctcatttgctcacctgagcaatgaagtgaggtgggctcctggaactgcagcagccaccccccggggccatcgtgaggctaagaatccagtgcagggtgagcaaccagcgaccgctacaaggacagtgaagagctagcaccaggaccttgggtagcccacccgctggagggagcgtgtgctgcaaaaagcaagagtgggctttggaggccaacggatggagcggattcagtctgaggctgttccagcccttgcttaggatccacctacctaggtctggaaatcgtatttcacttcagatgccttctcagaggataaaataacccccggtgggggagagtactggaaganggctaattcccctggttttcttcccatgagcattaatgncaagng

SEQ ID NO: 3386 - DNA, 884 bp, Homo sapiens
  misc_feature (812)..(812): "n" may be a, t, c, g, other or unknown
  misc_feature (820)..(820): "n" may be a, t, c, g, other or unknown
  misc_feature (844)..(844): "n" may be a, t, c, g, other or unknown
aataagactctatcaagatccatagcatctgaagttgtagccaggcctgcttcattgtctaatgataaactgatggaaaagtcagagcccgttgaccagcgaagacatactgcaggaaaagcaattgttgatagtagatcagctcagcccaaagaaacctcggaagagagaaaagctcgtctgagtgagtggaaagctggcaaaggaagagtgctaaaaaggccccctaattcagtagttactcagcatgagcctgcaggacaaaatgaaaaaccagttgggtctttttggactaccatggcagaagaagatgaacaaagattatttactgaaaaagtaaacaacacattttctgaatgcctgaacttgattaatgagggatgtccaaaagaagatatactggtcacactgaatgacctgattaaaaatattccagatgccaaaaagcttgttaagtattggatatgtcttgcacttattgaaccaatcacaagtcctattgaaaatattattgcaatctatgagaaagccattctggcaggggctcagcctattgaagagatgcgacacacgattgtagatattctaacaatgaagagtcaagaaaaagctaatttaggagaaaatatggagaagtcttgtgcaagcaaggaagaagtcaaagaagtcagtattgaagatacaggtgttgatgtagatccagaaaaactggaaatggagagtaaacttcatagaaatttgctatttcaagattgtgaaaaagagcaggacaacaaaccaaaggatccacccatgatgttaaacccccaatncagaaacnaggacaagttgcttaaattaaatntaaggggctctacgccatacttgcaaagtgtgaaaaaaaa

SEQ ID NO: 3387 - DNA, 817 bp, Homo sapiens
  misc_feature (786)..(786): "n" may be a, t, c, g, other or unknown
  misc_feature (793)..(793): "n" may be a, t, c, g, other or unknown
  misc_feature (804)..(804): "n" may be a, t, c, g, other or unknown
attcatcatagaagaactttaaaattttgaaaagcatgccatattagagtaagaataacgagttgtttacagtactttctgtagagtaattagcttagaaaacttcttcagggtttctgcttgctctgttatttttccacctagaagaatagtaaaaaggaagtgctagctgtggtttggtttgaacagaccaacagcagagatgagatgaggagactggaaagtaaatgccagtagtattggtgaattttaggagctttcgtttgaagagttatcgttccttgattaggggatgtgaccaaggaattaccaactttaaaggtggtcacagaattagggcttataaatggacttctttcagatgacatttttctttgtgagacctgatcaggaaaataagtacagctttcatttcttgattgtccttcttaataatatcttagagtttcaataataattagcttgctttcgaatatctggacttagacagtcttagcctttggcctctcaagggctctaaatctctatgcacaattttgtgttttcattttggtgtggaaaatctttgtaaattttatcctattgtcagagtagtcatagaaccataaaaggataaagaagcctgatctagatctttgctgctgcttcagagaatcttttcagagagaaataaatgagttgaatatctttcaagactaacattttctgaaactttaagaagaaaaaattttctaacattgtgaacaggattaagtagctattttattaaatgctttggattttaantggaggnagtttttttgnaaacccccgggaa

SEQ ID NO: 3388 - DNA, 813 bp, Homo sapiens
  misc_feature (684)..(684): "n" may be a, t, c, g, other or unknown
  misc_feature (735)..(735): "n" may be a, t, c, g, other or unknown
  misc_feature (803)..(803): "n" may be a, t, c, g, other or unknown
  misc_feature (811)..(811): "n" may be a, t, c, g, other or unknown
atcagatgttgggacccttaagtgttctgcacctggggagagttaggaaccacttaaggagtgtctgttgcttgccaatcttaaaatttttagtttgcacctgaatcaggggctgtcagagtccagactgctcttgaaatagaaaagactggtcgttaaaggcaggttcgttgagtctttcatcgttgagtgataccacctctgcagatggctcagtggggcagccccgtaccacagcctgcccttgaggttgtgtagtttagataggtcacagagttgctgggcctaccgcaggtctcctgaccctggtgcagttttacttcaattacaaccaccaaaatagctacagtcaaaaattccaaagttcctacaccatcaacctccaccccacttccgtccaaagtccacttagaggctctcagttttggaccttagaaacacttagggagctttttaaaaagatcgattctgtatttttagtagagatggggtttcacccagctactcaggaggctgaggcaggagaatcacttgaaccggggagttggaggttgcagtgagccgagattatgtcactccagcctgggcaacagagtgagactccgtcttaggaaaaaaaaaaagattgattctggccgggcacagtggctcacgcttacagtcccagcactttgagagactcangcaggaggatcacttgagcttaggagtttgagactagcctgggcaacccantgagaccccgtatctacaaaaattagccaggtgttgtgacatgtgcctgtggtcccagcttcttcaanaggcttangt

SEQ ID NO: 3389 - DNA, 768 bp, Homo sapiens
  misc_feature (721)..(721): "n" may be a, t, c, g, other or unknown
  misc_feature (730)..(730): "n" may be a, t, c, g, other or unknown
  misc_feature (762)..(762): "n" may be a, t, c, g, other or unknown
ggaaatatgtatcgtctccctgccacccaggaggtggtgacgcagctgcagagccagatcttggagctgcagggggagctgaaggagtttaaaacttgtaataagcaacttcaccaaaagttaattctggctgaagcagtgatggaggggaggccaacgcccgacaaaacgttgctgaatgctcagccccctgtgggagcagcctaccaggacagcccaggagagcagaaaggaattaaaaccacatcttctgtctggagagacaaggaaatggacagtgatcagcaaagaagctacgagattgactctgagatttgcccacctgatgaccttgccagcttgccatcatgcaaagaaaatcctgaagatgttctgagcccaacttcagtagctacttacctgagttccaagagtcagccttctgctaaagtcagtgtgatggggactgatcagtcagagagcattaatacctcaaatgagacagaatacttaaaacagaaaatccatgacttggaaactgagctggaaggctaccagaatttcatatttcagcttcaaaagcactcccagtgcagtgaggccataattacagttttgtgtgggacagaaggggcccaggatggcttgagcaagcccaagaatggttctgatggggaagaaatgaccttttcaagtttgcaccaagtgcgatacgtgaaacacgtgaaaatcctcggtccgntggccccanagatgattgacagcagggtgctggagaacctnaaacag

SEQ ID NO: 3390 - DNA, 871 bp, Homo sapiens
  misc_feature (229)..(229): "n" may be a, t, c, g, other or unknown
  misc_feature (804)..(804): "n" may be a, t, c, g, other or unknown
  misc_feature (842)..(842): "n" may be a, t, c, g, other or unknown
  misc_feature (861)..(861): "n" may be a, t, c, g, other or unknown
ccccgccttctcgctgcccagccccggggagggaggcggggccgcgaccccggcgcgggtggggcgaatgcgttcccagcgggtagcctggggctggtgcagagttccaagcccacggccccggtcgcggcctcgccgccctcccgcgccccgcgccgggagcgggcctagagcgctcgcctcgcccctccgcgagcagggctctggcgcccgcccctgtccgcaccgntggcagcctgaagagagtcgctggccgtggtcgccgctaggtaggatatatctgcatcttgaaaggaagataaaacaaaagccttctttggaatagatggatttttgtcactttctgtgtgaactaaagtgattcaatgtctcttttggattgcttctgcacttcaagaacacaagttgaatcactcagacctgaaaaacagtctgaaaccagtatccatcaatacttggttgatgagccaaccctttcctggtcacgtccatccactagagccagtgaagtactatgttccaccaacgtttctcactatgagctccaagtagaaataggaagaggatttgacaacttgacttctgtccatcttgcacggcatactcccacaggaacactggtaactataaaaattacaaatctggaaaactgcaatgaagaacgcctgaaagctttacagaaagcccgtgattctatcccactttttcccggcatcccaatattacaacttattggacaagttttcactgttggcagctgctttgggttatttctcattatggctatggttaacaagtcaactnttgaggactattttctgaagaatgatgaaacttaatanaacatctctttgagcctanaggttgactt

SEQ ID NO: 3391 - DNA, 890 bp, Homo sapiens
  misc_feature (605)..(605): "n" may be a, t, c, g, other or unknown
  misc_feature (747)..(747): "n" may be a, t, c, g, other or unknown
  misc_feature (773)..(773): "n" may be a, t, c, g, other or unknown
  misc_feature (854)..(854): "n" may be a, t, c, g, other or unknown
actcagctgtgcgctctgatttcgtgcgcttcctcgtccttcatgttggatggccagtttttcgtttgtgcgtcatcctctacctgagaaatggtcgcttgcccctagtctagacacgcattaaagggcagtatttaaagtcagttggcaagcagtggaataagatttttgtaaagaaaccttgtgcagcatggattctctaccagatgaattttttgtgaggcatcctgctgtggaggatcagaggaaggaagaaactgagaataagctagaaaaatcatctggtcaactgaacaaacaggaaaatgacatacctactgatcttgtccctgttaacctactattagaagtgaagaagttattaaatgcaattaatactctaccaaaaggtgtggttcctcacattaagaagttcttacaagaagatttttccttccaaactatgcagagagaagttgcagctaacagccagaatggtgaggaaattgttcctgctttgactttacgtttcttgattacacagctagaagcagcacttaggaacattcaagctggcaattataccgcacaccagattaatattggttattatttgacattactgnttttatatggagtagcactcactgaaagaggaaagaaagaggattatacagaagctgagaataaatttctggtgatgaagatgatgatccaagaaaatgaaatttgtgaaaactttatgtctttagttattttggacgtggnttactgcgatgtgctcaaaagagatntaatggaggactgctagaatttcataaaagcttacaggaaattggagacaaaaatgaccattggttgacatagatcctacngaagatgaagatttacctacacttttaagacttctt

SEQ ID NO: 3392 - DNA, 723 bp, Homo sapiens
  misc_feature (673)..(673): "n" may be a, t, c, g, other or unknown
  misc_feature (699)..(699): "n" may be a, t, c, g, other or unknown
  misc_feature (719)..(719): "n" may be a, t, c, g, other or unknown
gtgaagatggcggcagtggtggaggtggaggttggaggtggtgctgctggggaacgggagctggatgaggttgatatgtcagatctctctccagaagagcaatggagggtcgagcacgcacgcatgcatgccaagcaccgtggccatgaagctatgcatgctgaaatggtcctcatcctcatcgcaaccttggtggtggcccagctgctcctggtgcagtggaagcagaggcacccacgctcctacaatatggtgaccctctttcagatgtgggttgttcccctctatttcacagtgaagctgcactggtggaggttcctagtgatctggatcttgttctctgctgtcacagcctttgttaccttccgagccacccgaaaacctctagtacagacaaccccaaggttggtttataagtggttcctgctaatctataaaatcagctatgccactggcattgttggctacatggctgtcatgtttaccctctttggtcttaacttattattcaagatcaaaccagaagatgccatggactttggcatctcccttctcttctatggcctctactatggagttctggaacgggactttgcagaaatgtgtgcagactacatggcatctaccatagggttctacagcgagtcgggcatgcctaccaaacatctttcanacagtgtgtgtgctgtgtgtgggcancagatctttgtggacgtcantgaa

SEQ ID NO: 3393 - DNA, 807 bp, Homo sapiens
  misc_feature (522)..(522): "n" may be a, t, c, g, other or unknown
  misc_feature (603)..(603): "n" may be a, t, c, g, other or unknown
  misc_feature (635)..(635): "n" may be a, t, c, g, other or unknown
  misc_feature (642)..(642): "n" may be a, t, c, g, other or unknown
  misc_feature (710)..(710): "n" may be a, t, c, g, other or unknown
  misc_feature (775)..(775): "n" may be a, t, c, g, other or unknown
  misc_feature (805)..(805): "n" may be a, t, c, g, other or unknown
gttccctgactcggagtcttagtgtgtcgttatttggacaagaggcacattgacccaatttggagacgtattttggaaggaggtgtgaaaaagacagcatgaactttaccccaacacacacccctgtctgcagaaagcgaacagttgtctccaaacgtggtgttgccgtcagtggtcccaccaagaggaggggaatggcagattcactggagtcaacccccttgccttcccccgaagatcgtctggccaaactccatccttctaaggagctcctggaatattatcaaaagaagatggctgagtgtgaggcagaaaatgaggacttgctgaagaaactggaactctacaaagaagcttgtgaaggacagcataaacttgaatgtgatttgcagcagagggaggaagagattgctgaattgcagaaagctctaagtgatatgcaggtctgcctcttccaggaacgggaacatgttttacgcctctactcagaaaatgaccgactgagaatcagggagctagaanacaagaaaaagattcagaatctcttggctcttgtgggaacagatgctggagaagtgacctatttttgtaaggagccttctnacaaagtcaccattctccaaaagactatccangctgtangtgaatgtgagcagagtgaatcttcagctttcaaagcagatcctaaaataagcaaaagaagaccatcnagagagagaaaagaaagtcttgagcattccaaagagacatacagacacttcatcctacaggtggnaacccttgcaggctcaacttgggaaaaccnga

SEQ ID NO: 3394 - DNA, 778 bp, Homo sapiens
  misc_feature (653)..(653): "n" may be a, t, c, g, other or unknown
  misc_feature (722)..(722): "n" may be a, t, c, g, other or unknown
  misc_feature (758)..(758): "n" may be a, t, c, g, other or unknown
  misc_feature (766)..(766): "n" may be a, t, c, g, other or unknown
ttgtaataatactgtatgtttatctttggcagctccaaaagttctgtagtttttacttcaggcctttagtttgaaaactatgagttttttcaggttgttgaagcatcatcaatgattttttaatgactgagagaattgttatttatataatgatcttagtacttaacatgtggtttccaatgccagtgacggcagttctcagcagagaaattaacttttccattaagctataatgaaaagaatcaataacccttacttaatcagatatctataatacctactgcagttgttctcatttgtattttaatacattacaagttagtctgtaatataatttaatgcatagcaagttagtctgtagtataatagtagttattgatggttactcatttttttaataacgtagtaaaatacactaacaatattttcatccaaaaataaattcaaggtgtaaatcagcatatctttttcaacttggaatttatattctgccatgttgctccaaagcttgttcacagttaagacacaagatcgttgggaaatcttatactatacctctgatgagcattattacactttttctgaaagcattcttctttggtagtctgattacacctttctaatctttttcttctatctacttcattcatttntttttttctgcaactactactttacttatacttataaactctgcatgacccggactttgcatctcctgnattacctttgctaagtacatctgagtaccataccgngaaaatantttttttccaga

SEQ ID NO: 3395 - DNA, 804 bp, Homo sapiens
  misc_feature (687)..(687): "n" may be a, t, c, g, other or unknown
  misc_feature (736)..(736): "n" may be a, t, c, g, other or unknown
  misc_feature (777)..(777): "n" may be a, t, c, g, other or unknown
  misc_feature (792)..(792): "n" may be a, t, c, g, other or unknown
tgtatagatgttaagtgtttcatgtggtttttgtgtcattgctatttatcaatagcaataattttgcactgaaaactttttatagttcaaaaattaagcatggactccccagtatactttaactttctttctttctttttttttttttggagacagagtctcactgtcacccaggctggagtgcagtggcatgatctcagtttatgcaacttctgcctccccaggttcaagcgattcttttgcctcagccacctgactagctgggattgcagcctgcaccaccacacctggctaaatttttgttgttgtcgttgagatacagtttcactctgtcacccaggctggagtgcagtggcatgatctcagctcactgcaacctctgccttctggattcaagtgattcttgtgccttagcctcccaagtagctgggattacaggcgtgcaccaccacgcccagttgatttttgtatttttgatagagacggagtttcaccatgttggccaggctggtctcgaactctgggttcaagaaatcctcccaccttgcctcccaaagtgctgggattacaggtgtgagccaccacgcatggccctgaaccttctctttttaggaataccaaagttttcaactttttcagctttagaatttgtaaatatttttgtagaatatcatatgactgtaattncagagtgttccaacttggttatgatatatttgggtaaatttacaactgntcttttatttgccataatctgggtataacactggttgtggnagggaaaggaaaacntgcaaaacattc

SEQ ID NO: 3396 - DNA, 646 bp, Homo sapiens
  misc_feature (482)..(482): "n" may be a, t, c, g, other or unknown
  misc_feature (583)..(583): "n" may be a, t, c, g, other or unknown
  misc_feature (613)..(613): "n" may be a, t, c, g, other or unknown
  misc_feature (632)..(632): "n" may be a, t, c, g, other or unknown
gaagatggcggactcggtggctagccgatgaggaggccgcggggggaacccggcccccgggccccgagaccgactgagggagcgacctgcgcagggcccggggagtcatgtaggggtggcgcctgcggggagggctgcgggagggcagcgggagctggtgttagcggcagcggccacggtctcctggcgtccctgggccggggtgggtgttggggcccccgacttcgccgactccgcgccatcgcaaagcggtgcactcgggctccacgcgcgccctgcaaggtgggcgctgcgttttcatttcacgggtgaggagacttagagagacgaagccacttgtccaaggtcacgccgctggtgagtgggagcgcccagcatggaacccagcaccgtccagccgcggagcccgcgttccaccctctgtgccgccgccgcctcctgtgggagagggaggtggtcgggagagtgcacgccggtgccgnctgggctccagactgggcgcgaccactaacccggttaatgacctcgggcttaacttaaccccttcgctgctctgggcctgcgtttctccaccggtgaaatnagggtcttcatcacccaacttcatgcttcnagtcctgctctctgctcanaccttccctgctcg

SEQ ID NO: 3397 - DNA, 802 bp, Homo sapiens
  misc_feature (739)..(739): "n" may be a, t, c, g, other or unknown
  misc_feature (747)..(747): "n" may be a, t, c, g, other or unknown
  misc_feature (766)..(766): "n" may be a, t, c, g, other or unknown
gtcagtccccgcgcttttcggaggctgccagcgtcccacaccagccgcaggtgaaaaccggcagaaagacattaagagattttcctgcagtcactgctggcagatgatagagccaggatttgaaagcaggcagcctggctccagaccctgtgctcttaactcccgttttgcatcaagaacagaatcctatgaaaggcttgtacagtgcttggatagcagcatcaaggagcattgtgtacatgcagaagtgcacagtacctggagtgaaactgcttgtgttcgatttctgataccattcataactggctgtgtgatctcaaaacctctaaaatgcagacctccagctctagatctgtgcacctgagtgaatggcagaagaattacttcgcaattacatctggcatatgtaccggaccgaaggcagatgcataccgtgcacagatattacgcattcagtatgcatgggcaaactctgagatttcccaggtctgtgctaccaaactgttcaaaaaatatgcagagaaatattctgcaattattgattctgacaatgttgaatctgggttgaataattatgcagaaaacattttaactttggcaggatctcaacaaacagatagtgacaagtggcagtctggattgtcaataaataatgttttcaaaatgagtagtgtacagaagatgatgcaagctggcaaaaaattcaaagactctctggtggaacctgctcttgcatcantggtaatncattaaggagggccctggnctttgaaccttcctaaaatttaatggtttgggggta

SEQ ID NO: 3398 - DNA, 733 bp, Homo sapiens
  misc_feature (591)..(591): "n" may be a, t, c, g, other or unknown
  misc_feature (683)..(683): "n" may be a, t, c, g, other or unknown
  misc_feature (723)..(723): "n" may be a, t, c, g, other or unknown
  misc_feature (731)..(731): "n" may be a, t, c, g, other or unknown
gcgccccggccgggccactgggccacaggccacgcggccacgcagtccgagcgggagccgagccgggcggggcgagggcagctccgcctggctcccaccatgagtgctgagcttaacgtgcctatcgacccctctgctcctgcctgccctgagcccggccataagggcatggattaccgggactgggtccgccgcagctacctggaactggtcacctctaaccaccactcggtacaggccctgtcgtggcggaagctctacctgagcagggccaagctgaaggcctccagcaggacctccgccctcctctccggctttgccatggtggccatggtggaggtgcagctggagacgcagtaccagtacccgcggccgctgctgattgccttcagcgcctgcaccacggtgctggtggccgtgcacctgttcgccctcctcatcagcacctgcatcctgcccaatgtggaggccgtgagcaacatccacaacctgaactccatcagcgagtccccgcatgagcgcatgcacccctacatcgagctggcctggggcttctccaccgtgcttggcatcctactcttcctggccgangtggtgctgctctgctggatcaagttcctccccgtggatgcccggcgccagcctggccccccacctggccctgggagtacacgggctggcangccgcctggtgtccaccattatcatggtgccgtgggcctnaacttcgngg

SEQ ID NO: 3399 - DNA, 716 bp, Homo sapiens
  misc_feature (643)..(643): "n" may be a, t, c, g, other or unknown
  misc_feature (667)..(667): "n" may be a, t, c, g, other or unknown
  misc_feature (712)..(712): "n" may be a, t, c, g, other or unknown
tgaggcgcgggaggcccgcgccccgcggctcgctgtgcgtgggagggcgcgagcgaacgcgggcgaggagcggccgagccgctgaagaggagctgggcgccggccgcccggccgcgctcggcccgcggatcgcctccgcccggtcttcgccggccccggcccctggcgagatgccgtgtggggaggattggctcagccacccgctgggaatcgtgcagggattcttcgcccaaaatggagttaatcctgactgggagaagaaagtaattgagtattttaaggaaaagctgaaggaaaataatgctcctaagtgggtaccatcactgaacgaagttccccttcattatttgaaacctaatagttttgtgaaatttcgttgcatgattcaggatatgtttgaccctgagttttacatgggagtttatgaaacggttaaccaaaacacaaaagcacatgttcttcattttggaaaatatagagatgtagcagagtgtgggcctcaacaagaacttgatttaaactctccacgaaataccactttggaaagacagactttctattgtgttccggtgcctggggaatctacgtgggtaaaagaagcctatgttaatgcaaaccaagctcgagtcagtccctcaacatnctacacttctagtcgccacaagangagttttgaagatgatgaccattttggacctccagccccaattangcag

SEQ ID NO: 3400 - DNA, 711 bp, Homo sapiens
  misc_feature (655)..(655): "n" may be a, t, c, g, other or unknown
  misc_feature (702)..(702): "n" may be a, t, c, g, other or unknown
  misc_feature (704)..(704): "n" may be a, t, c, g, other or unknown
gagcatgtgcacgctggccagctctgagttctcccatgaggctgtcaagacgcacatcgagacggtcatcaacgccctgaagactgagcgggacgtgagcgtgcggcagcgggccgtggacctcctctacgccatgtgcgaccgcagcaacgccccacagatcgtggccgagatgctgagctatctggagacagctgactactccatccgagaagagattgtgctgaaggtcgccatcctggctgagaagtacgcggtggactacacctggtatgtggataccatcttgaacttgatccgaattgctggtgattacgtgagtgaagaggtgtggtaccgagtcattcagatcgtcatcaaccgggacgacgtgcagggctacgcggccaagactgtgttcgaggctcttcaggctcccgcgtgccacgagaacctggtcaaagtgggcggctacatcctgggggagtttggaaacttgatagctggagacccgagatccagcccgctgatccagttccacctgctgcactccaagttccacctgtgcagcgtccccacccgcgcgctgctcctgtcacctacatcaagttcgtgaacctcttcccggaggtgaagcccaccatcaagacgtgctgcgcagcgacagccagcttangaacgcagacgtggagctgcaacaacgtgctgtggagtacctgcggntnaacaccg

SEQ ID NO: 3401 - DNA, 846 bp, Homo sapiens
  misc_feature (782)..(782): "n" may be a, t, c, g, other or unknown
  misc_feature (784)..(784): "n" may be a, t, c, g, other or unknown
  misc_feature (827)..(827): "n" may be a, t, c, g, other or unknown
gtcgccatggcctccgtcgcccaggagagcgcgggctcgcagcgccggctaccgccgcgtcacggggcgctgcgcgggctgctactgctctgcctgtggctgccaagcggccgtgcggccttgccgcccgcggcgccgctgtccgaactgcacgcgcagctgtcgggcgtggagcagctgctggaggagttccgccggcaactgcagcaggagcggcctcaggaggagctggagctggagctgcgcgcgggcggcggcccccaggaggactgcccgggcccgggcagcggcggctacagcgcaatgcctgacgccatcatccgcaccaaggactccctggcggcgggtgccagcttcctgcgggcgccggcggccgtgcggggctggcggcaatgcgtggcggcctgctgctccgagccgcgctgctccgtggccgtggtggagctgccccggcgccccgcgcccccggcagccgtgctcggctgctacctcttcaactgcacggcgcgcggccgcaacgtctgcaagttcgcgctgcacagcggctacagcaagctacagcctcagccgcgcgccggacggcgccgccctggcaccgcgcgcgcctcgccccggcaggaaaaggatgcgccttcacttagcaaggctgggcaagatgtggttctgcatctgccacagaacggggtgggtctagacggccgcgaaagcacagatgaccacgccatcgtccaatatgaagtggggcacttctgcagggggacccgtcagtggacattgaaggngncttcaatcaaggaaccctgaagcttgtcccaccttacagggangggaaccttcaacctttca

SEQ ID NO: 3402 - DNA, 857 bp, Homo sapiens
  misc_feature (730)..(730): "n" may be a, t, c, g, other or unknown
  misc_feature (804)..(804): "n" may be a, t, c, g, other or unknown
  misc_feature (833)..(833): "n" may be a, t, c, g, other or unknown
  misc_feature (848)..(848): "n" may be a, t, c, g, other or unknown
ttgcaatacagaagagtgtctaaaaactggatcacctggcaaaaaggaagagaaggccaagaacaaagaatcactttgcatggaaaacagtagcaacagctcttcagatgaagatgaagaagaaacaaaagcaaagatgacaccaactaagaaatacaatggtttggaggaaaaaagaaaatctctacggacaactggtttctattcaggattttcagaagtggcagaaaaaaggattaaacttttaaataactctgatgaaagacttcaaaacagcagggccaaagatcgaaaagatgtctggtcaagtattcagggacagtggcctaaaaaaacgctgaaagagcttttttcagactctgatactgaggctgcagcttccccaccgcatcctgccccagaggagggggtggcagaggagtcactgcagactgtggctgaagaggagagttgttcacccagtgtagaactagaaaaaccacctccagtcaatgtcgatagtaaacccattgaagaaaaaacagtagaggtcaatgacagaaaagcagaatttccaagtagtggcagtaattcagtgctaaatacccctcctactacacctgaatcgccttcatcagtcactgtaacagaaggcagccggcagcagtcttctgtaacagtatcagaaccactggctccaaaccaagaagaggttcgaagtatcaagagtgaaactgatagcacaattgangtgggatagtgttgctggggagctccaagaccttcagtctgaaaggaatagctcgccagcaggttttgatgccngtgtgagctcaagcagtagtaatcagccngaccagacattctgnaaaagctgt

SEQ ID NO: 3403 - DNA, 808 bp, Homo sapiens
  misc_feature (782)..(782): "n" may be a, t, c, g, other or unknown
  misc_feature (788)..(788): "n" may be a, t, c, g, other or unknown
  misc_feature (801)..(801): "n" may be a, t, c, g, other or unknown
gactgctgtgctagcaatcagggagactccgtgggcgtaggaccctctgagccaggtgcaggatataatctcgtggtgcgccgttttttaagccggttggaaaagcgcagtattcgggtgggagtgacccgattttccagcttttgctgcttattcctctatctcacgggttttgcacagaaccaagaggcagtctctccactgaatcaatgaagaaaaagaaaaggaaaagaaagcacactattggaatcctaggaggcagattccagttcttcttaactgaacgattggcaggcctccattgcttttgtggttgggaaccagattgaagatgatcttctcatccaagcccttaccgtggctgtccaggtccctcagcgtaaactcttcagtatggtgtcgtggcaagacattctccagcagattaatgaaataaatacacttgttggatctgcttcatctaaaaaggcaaaaaaacctgtaggtggtaatgctcctttatattatgaggtatagtcagtcctgaccaaaattaaaaaggaaaatatcagcagtcattcaaaaccaactgaaatgttctcgatgagagagttctacgtgtaccatagatgccaagattctcccagttgtgactaaatctgatacacaattcctgatatgaaactcattttttaaacagtgccttgaattaatagtcaatttaatagaattgtaagcccttatattggggggtggcccttgtcagaatgaaaaatggaaaactcatgcttcagagataggtncaaatnatatgtgaaaacntttaaga

SEQ ID NO: 3404 - DNA, 874 bp, Homo sapiens
  misc_feature (739)..(739): "n" may be a, t, c, g, other or unknown
  misc_feature (817)..(817): "n" may be a, t, c, g, other or unknown
  misc_feature (837)..(837): "n" may be a, t, c, g, other or unknown
  misc_feature (860)..(860): "n" may be a, t, c, g, other or unknown
gagcagaatgcaaaccacccacaccggattgaaatacagaacatttttgaggaagcccagtccctcgtgagagagaaaattgtgccattttataatggaggcaactgcgtaactgatgagtttgaagaaggcatccaagatatcattctgaggctgacacatgttaaaactggaggaaaaatctccttgcggaaagcaaggtatcacactttaaccaaaatctgtgcggtgcaagagataatcgaagactgcatgaaaaagcagccttccctgccgctttccgaggatgcacatccttccgttgccaaaatcaacttcgtgatgtgtgaggtgaacaaggcccgaggggtcctgattgcacttctgatgggtgtgaacaacaatgagacctgcaggcacttatcctgtgtgctctcggggctgatcgctgacctggatgctctagatgtgtgcggccggacagaaatcaggaattatcggagggaggtagtagaagatatcaacaaattattgaaatatctggatttggaagaggaagcagacacaactaaagcatttgacctgagacagaatcattccattttaaaaatagaaaaggtcctcaagagaatgagagaaataaaaaatgaacttctccaagcacaaaacccttctgaattgtacctgagctccaaaacagaattgcagggtttaattggcagttggatgaagtaagtcttgaaaaaaacccctgcatccnggaagccaggagaagagcatgatcgaggtgcaaactctgatcacatatattgacttgaaggaggccttgagaaaaagnaaagcttgtttgcttgtgangagcacccatccattaagccgtnttgaacgtccttgg

SEQ ID NO: 3405 - DNA, 887 bp, Homo sapiens
  misc_feature (868)..(868): "n" may be a, t, c, g, other or unknown
  misc_feature (887)..(887): "n" may be a, t, c, g, other or unknown
ttatgctgcactttgttgtgaaatcaagaaattaaaatatgaggctgaaactaaattttacaatggtctcttgttttatggagaaggagctacagatgccagcatggtggaaggtgattgccaaattcaaatggggagatttatttcattcttacaggaactgtcttgctttgttacgaggtgctatgaagtggtgatgaacgtagtccaccagttggctgccctctatatcagtaacaagattgcacccaaaattatagagacaactggagttcattttcagactatgtatgagcacttgggagaactgctaacagttttgctcaccctggatgaaattattgataatcatatcacactgaaagaccactggactatgtacaaaaggttactgaaatctgtccatcacaatccttcaaaatttggaattcaggaagaaacattaaagccatttgaaaagttcttgctgaagctagaagggcaattactggatggaatgatattccaggcctgtatagaacaacaatttgattctctcaatggaggagtatctgtgtcaaaaaatagtacttttgctgaggaatttgcacatagtattcagtcaatttttgcaaatgtagaagccaaacttggagaaccttctgaaattgaccagagagacaagtatgttggaatttgtggactctttgtattgcactttcagatttttcgaactattgataaaaagttttataagtctttattggacatttgtaagaaggtaccagccatcactctactgctaatattatttgggttcctgataatttctgatccagaaatccacagctgccaactgtagacagaaaagcttcagccttaaatcacnggatcttctacacagaagn

SEQ ID NO: 3406 - DNA, 860 bp, Homo sapiens
  misc_feature (644)..(644): "n" may be a, t, c, g, other or unknown
  misc_feature (787)..(787): "n" may be a, t, c, g, other or unknown
  misc_feature (825)..(825): "n" may be a, t, c, g, other or unknown
  misc_feature (845)..(845): "n" may be a, t, c, g, other or unknown
gtaaatatgttatggtggtctataaacgtgaaccagctgtggagagggtaatagaatttgcagcaaagtttgttacctcatttcaccaatcagatatggaagatgatgaggaagaggaagatggtggccttttaaattatttgtttacttttctcttaaagtctcatgaagcaaacagcaatgcagtgagatttagagtgtgcctgctcataaacaagcttttgggaagtatgccagaaaatgctcagattgatgatgatgtgtttgataaaattaataaagccatgcttattagattgaaagataagattccaaatgtgagaatacaggcagttctggcgctttcacgacttcaggatcccaaggatgatgaatgcccagtggttaatgcatatgctactttgattgaaaatgattcaaatccagaagttagacgggcagtgttatcatgtattgcaccatcagcaaagactttgccaaaaattgtagggcgcaccaaggatgtgaaagaggctgtcagaaagctggcttatcaggttttagctgaaaaggttcatatgagagctatgtccattgctcagagagtaatgctccttcaacaaggtcttaatgacagatcagacgctgtgaaacaagctatgcanaagcatcttcttcaaggctggttacggttctctgaaggaaatatcttagagttgctccatcggttggatgtagaaaattcttctgaagtggcagtctctggtctcaatgccttgttttcaataactcctctcatgaactggtngggactctgtaaaaccatgattggcaggaaattgattncagtgggaaacatttaactnctgaaattgctttgg

SEQ ID NO: 3407 - DNA, 895 bp, Homo sapiens
  misc_feature (817)..(817): "n" may be a, t, c, g, other or unknown
  misc_feature (829)..(829): "n" may be a, t, c, g, other or unknown
  misc_feature (893)..(893): "n" may be a, t, c, g, other or unknown
gttactcacattttgtgtggaacatcacacatatcacataaaaaactatattatgaacaaggacttgctaagaagagtcttggtcttgatgaattcaaagcacacttttctggccttgtgtgcccttcgctttatgaggcggataattggacttaaagatgaattttataatcgttacatcaccaagggaaatctttttgagccagttataaatgcacttctggataatggaactcggtataatctgttgaattcagctgttattgagttgtttgaatttataagagtggaagatatcaagtctcttactgcccatatagttgaaaacttttataaagcacttgaatcgattgaatatgttcagacattcaaaggattgaagactaaatatgagcaagaaaaagacagacaaaatcagaaactgaacagtaacagatttcgcagagatgcaaaagccttggaagaggatgaagaaatgtggtttaatgaagatgaagaagaggaaggaaaagcagttgtggcaccagtggaaaaacctaagccagaagatgattttccagataattatgaaaagtttatggagactaaaaaagcaaaagaaagtgaagacaaggaaaaccttcccaaaaggacatctcctggtggcttcaaatttactttctcccactctgccagtgctgctaatggaacaaacagtaaatctgtagtggctcagataccaccagcaacttctaatggatcctcttccgaaaccaccaaacttgcctacgtcagtaacagccaccaagggaagtttggttggcttaatgggattatncagatgatgaanaggaagatgaagaagaagaatcgtcccccaggaaaagaacttggcttggctcataaaatatttntt

SEQ ID NO: 3408 - DNA, 842 bp, Homo sapiens
  misc_feature (766)..(766): "n" may be a, t, c, g, other or unknown
  misc_feature (835)..(835): "n" may be a, t, c, g, other or unknown
  misc_feature (840)..(840): "n" may be a, t, c, g, other or unknown
gatcaccatgacagatataataacataatagtaacagaaaagtttgaaaaatgcaaattaccaaaatgtgagctcatggttttggagaaaatggttccaatagactcaccagatgcagggttgccacaaatcttcaatttgtaaaaaacgcaatatctctgaaccacagtaaagttgaagtgcaacaaaattaggtatgcctgtatggaaacgcagagctcacacccttctgatgaacagacagaagtgtcagatccttttctatgctagcaaaggattttaagggtttggaattctctaaaagtgtaaagctcttaggagggcgttacttggcaaagcagtgctttatcccattctcttgtttgcctgttcaaacttcccacccattgtagacccacttgctgtgttattgcaggttaagcccccaagacccttttctctcaccttttttgttcacttcccatcccctttccttctcaggtcatcctccatgcccttctgatgtccacatgtctcttcattttcttctcaggcctcctctttctctcaccatctaagttattgaaattcttgaaatcctaagcaggcctggcactgagaggtaagcacctgagagtgtcagtcttccctagataaatggaactgtgtgcagatctgggactgctggaagggtgtggggtagggatttaaggatggcgcaagtagggtggggctaaaaaagaccttggcttctttatataggagcatcgagattaaagggtgtgangtaggggttttaaggatggccaaggtcaagtggggcttaaaaaaggaccttgggctttcttttattatngggancc

SEQ ID NO: 3409 - DNA, 848 bp, Homo sapiens
  misc_feature (793)..(793): "n" may be a, t, c, g, other or unknown
  misc_feature (838)..(838): "n" may be a, t, c, g, other or unknown
  misc_feature (846)..(846): "n" may be a, t, c, g, other or unknown
aaactttatgaggcagctgtgaagaaagttcccaatagtgaggagtatcactctcacctcttcatggcctatgccagagtgggtgaatacaagaaaatgcaacaggctggcatggctctatataagattgtccccaaaaatccctactacttttggtctgtgatgagcttaattatgcaatctatatcggcacaggatgaaaacctctcaaaaacaatgtttctgccccttgctgagagaatggtcgaaaaaatggtgaaagaggacaagatagaagctgaggctgaagttgaactttattatatgaccctggaacgtttgggaaagtaccaggaggccttggatgtcatcagagggaaattaggagagaagttgacaagtgagattcagagtcgggaaaataaatgcatggctatgtacaagaagctgagcaggtggccagagtgcaatgccctttcccggcgcctcttactaaaaaactcagatgactggcagttctatctgacttatttcgattctgtctttcgactgattgaagaggcctggagtcctcctgctgaaggtgaacactctttagaaggagaagtacattattctgcagaaaaagctgtgaagtttatagaagatcggataacggaagaatctaaaagttctcgccatctccgaggaccacatctagctaaattggagctgattaggcgtttacgaagtcaaggttgtaacgatgagtacaaactgggtgatcccagaagaattaatggtccagtattttaaaaagtttggcgataaaccntggtggtttacagacccttaaggtgtttgttgacctcttacctgnttcacagngt

SEQ ID NO: 3410 - DNA, 902 bp, Homo sapiens
  misc_feature (708)..(708): "n" may be a, t, c, g, other or unknown
  misc_feature (719)..(719): "n" may be a, t, c, g, other or unknown
  misc_feature (772)..(772): "n" may be a, t, c, g, other or unknown
  misc_feature (849)..(849): "n" may be a, t, c, g, other or unknown
  misc_feature (900)..(900): "n" may be a, t, c, g, other or unknown
atgtaaatggctctagagttagagtgactgtttgctcttctgctttctggaatgcagatgacagtatggaaagaaagaataatgattctatctaataggaaaggatttcttctttcttttttaaagagtgggtggattttctcccttttgttttgcttttattttcatgctactaacatatcttcagaaggaaatggcaactagtagatcagtaaaattacgaaaacgatgcctgcaaaatttgaaggaatgcaattctgatttgccatttatcagggaaaactgaaagcatttttcttataactttttttctttttctttttttttggaggggggaggcagggtcttgctctgtccctcaggctggagcttagctcagtgcagcctccaactcctgggctcaagcaatcctcccactttagcctcctgagtagctgggactacaggcgtgtgccagcgcgcctggctaattttaaaatttttttgtagagacagagtctccctctgttgcccaggctggtctggaactcctagcttcaaatgatcctctcacctcggcctcccaaaatcctgggattccaggcgtcagccactgctctcggccctcttacaccattttgtttgattgtctagtccctgtttctttttctttctaatccttattcatttaagcaaaaccatacattatcttttccagtcctttcttgnattcttactgnttttttaaaataactttttgccttaatagctcattgtcactaataacttctgngttctcccagcagtgttatacagaagggcaatgaaaacattggacatgaccatgagtgcttcctttccttactctangtttgtagtctggtttaaataggatagttcctgcattctgaaaacattggnct

SEQ ID NO: 3411 - DNA, 760 bp, Homo sapiens
  misc_feature (694)..(694): "n" may be a, t, c, g, other or unknown
  misc_feature (698)..(698): "n" may be a, t, c, g, other or unknown
  misc_feature (753)..(753): "n" may be a, t, c, g, other or unknown
cttcgcgcacctcatggaatcccttctgcagcacctggatcgcttttccgagcttctggcggtctcaagcactacctacgtcagcacctgggaccccgccaccgtgcgccgggccttgcagtgggcgcgctacctgcgccacatccatcggcgctttggtcggcatggccccattcgcacggctctggagcggcggctgcacaaccagtggaggcaagagggcggctttgggcggggtccagttccgggattagcgaacttccaggccctcggtcactgtgacgtcctgctctctctgcgcctgctggagaaccgggccctcggggatgcagctcgttaccacctggtgcagcaactctttcccggcccgggcgtccgggacgccgatgaggagacactccaagagagcctggcccgccttgcccgccggcggtctgcggtgcacatgctgcgcttcaatggctatagagagaacccaaatctccaggaggactctctgatgaagacccaggcggagctgctgctggagcgtctgcaggaggtggggaaggccgaagcggagcgtcccgccaggtttctcagcagcctgtgggagcgcttgcctcagaacaacttcctgaaggtgatagcggtgggcgcttgttgcagcccgcctttgtcttgtcggccccaagaagaagtttggaaccccggnattncacaaatcacctggaaaaggggaagcccaaagtgcttagttcccactgggctttnttggggg

SEQ ID NO: 3412 - DNA, 748 bp, Homo sapiens
  misc_feature (682)..(682): "n" may be a, t, c, g, other or unknown
  misc_feature (706)..(706): "n" may be a, t, c, g, other or unknown
  misc_feature (733)..(733): "n" may be a, t, c, g, other or unknown
ggcgcgcggcgagctgagggtggcggcggtcgacatgttccaggtcccggatagcgagggcggccgcgccggctccagggccatgaagcccccaggaggagaatcgagcaatctttttggaagtccagaagaagccactccttccagcaggcctaataggatggcatctaatatttttggaccaacagaagaacctcagaacatacccaagaggacaaatcccccagggggtaaaggaagtggtatctttgacgaatcaacccccgtgcagactcgacagcacctgaacccacctggagggaagaccagcgacatttttgggtctccggtcactgccacttcacgcttggcacacccaaacaaacccaaggatcatgttttcttatgtgaaggagaagaaccaaaatcggatcttaaagctgcaaggagcatcccggctggagcagagccaggtgagaaaggcagcgccagaaaagcaggccccgccaaggagcaggagcccatgcccacagtcgacagccatgagccccggctggggccgcggcctcgctctcacaacaaggtcctgaacccaccgggaggcaaatccagcatctccttctactaagagaagccactgctccacccggagccagaccagaaactcaagagatagggtagccatgttttcatttccttttgnccaaatgaaccggggtgggaaganggttaagtcttatgtgagcctggctgnttaaccgtcttctgg

SEQ ID NO: 3413 - DNA, 756 bp, Homo sapiens
  misc_feature (702)..(702): "n" may be a, t, c, g, other or unknown
  misc_feature (713)..(713): "n" may be a, t, c, g, other or unknown
  misc_feature (715)..(715): "n" may be a, t, c, g, other or unknown
cgcatctgctgctgccgccgcagttgcgaatgcagcatcggcgcttagctgcctccgcggtgcagctaaggttcgtgtcgctaccccttggcccttcgctcttgttgccttaaccccgccggtggagcccgctcttctggcctgttgagcccgctccctcactgccacacagcaagttccgagaccatggattcgggcagcagcagcagcgactcggcgcccgattgctgggaccaggtggacatggaatccccggggtcggccccgagcggggatggagtctcctctgcggtggccgaggcccagcgcgagcccctcagctcggctttcagccgtaagctcaacgtcaacgccaagcccttcgtgcctaacgtacacgccgcggagttcgtgccgtccttcctgcggggcccgactcagccgcccaccctcccggccggctccggcagcaacgatgaaacctgcaccggcgcgggatacccttaaggtaaaaggatgggacggggggcacctgtggaaccttcccgagaggaaccgttagtgtcgcttgaaggttccaattcagccgttaccatggaactttcagaacctgttgtagaaaatggagaggtggaaatggccctagaagaatcatgggagcacagtaaagaagtaagtgaagcccaacctgggggtgggtcctcgggagattaagggccccanaaaaaagtggncnggaaatgatggaggaaaaagaggaaattagaaaatccaaat

SEQ ID NO: 3414 - DNA, 779 bp, Homo sapiens
  misc_feature (717)..(717): "n" may be a, t, c, g, other or unknown
  misc_feature (774)..(774): "n" may be a, t, c, g, other or unknown
  misc_feature (777)..(777): "n" may be a, t, c, g, other or unknown
atcaggggatccccaaagaaagcaaggggaccaaggccgggactgctggggtgaaggtccgggaggctgagtaaggggacggaagggcacaggccatggaaaggaatgacatcatcaacttcaaggctttggagaaagagctgcaggctgcactcactgctgatgagaagtacaaacgggagaatgctgccaagttacgggcagtggaacagagggtggcttcctatgaggagttcaggggtattgtccttgcatcacatctgaagccactggagcggaaggataagatgggaggaaagagaactgtgccctggaactgtcacactattcagggaaggaccttccaggatgtggccactgaaatctccccggagaaagcccccctccagcccgagacgtctgctgacttctatcgtgattggcgacgacacttgccaagtgggccagagcgctaccaggctctactgcagcttgggggtccaaggctcggctgcctcttccagacagatgtgggatttggacttcttggggagctgctggtggcactggctgatcacgtggggccggctgaccgggcagcggtgctggggatcctatgcagcctggcgagcactgggcgcttaccctgaacctaacctgctgagcccgggcagagagagagagctgcaagggcttgtttcaaaactgcaagccatgggcaaccccagatccgtgaangaagggctcactgggaagaacagggtctggagaacaatctggtggcttcaagaaganganag

SEQ ID NO: 3415 - DNA, 863 bp, Homo sapiens
  misc_feature (786)..(786): "n" may be a, t, c, g, other or unknown
  misc_feature (801)..(801): "n" may be a, t, c, g, other or unknown
  misc_feature (860)..(860): "n" may be a, t, c, g, other or unknown
atgttctgtcgtctctcgcagtttacgcggaagattcagagcccgagtctgatggcgaggctggaatcgaggcggtgggcagcgcggctgaggagaaaggcggattggtatctgatgcctatggggaggatgacttttctcgtctagggggtgatgaagatggttatgaagaagaagaagatgagaacagtagacagtcggaagatgacgattcagagactgaaaaacctgaggctgatgacccaaaggataatacagaagcagaaaagcgagacccccaggaactcgtggcctccttttctgaaagagctcggaacatgtcgcctgatgaaatcaagatcccgccagaaccccctggcagatgttcaaatcacttgcaagacaagatccagaagctttatgaacgaaagataaaggagggaatggatatgaactacattatccaaaggaagaaagaatttcggaaccctagcatctacgagaagctgatccagttctgtgccattgacgagcttggcaccaactacccaaaggatatgtttgatccccatggctggtctgaggactcctactatgaggcattagccaaggcccagaaaattgagatggacaaattggaaaaggccaaaaaggagcgaacaaaattgagtttgtgacgggcaccaaaaaaggcaccacgaccaacgccacgttcaccaccactccactggcagcacagcttgttgcagatgctcagaagagaaagagcaagtgggattcggttttccagtgacaacgatagcccanccaccatcttaccancacagccacccttgccactgttgtcacggtcaccaccagcgccagcgggtccaaaaccncgg
